United States Patent Application Publication US 2026/0092266 A1 - sequence listing, part 26

SEQ ID NO: 4282 - DNA, 23153 bp, synthetic construct
  misc_feature 1..23153: note = Synthetic
  source 1..23153: mol_type = other DNA
ttgggcccgatccccgcggcaccggcgagcgggtgccgcacatttacgccctcgggtattcgcccgcgtatccacgcctctgcctctacgacccggcaaccgacgaatggacgccggagttgccgatcgccgctacgatcatcccgtgggtcatcgactggctctactactacgaggaatgggtccggacaggcgaatggaagggcggcggccgtcaccccgaattgagggctgaaccatgtccgaatcccgccgcctcgactccggagagccgcgctcgcgcggagccatccctcagcgccgcgttccacaaccttggccgaaggatcggccatttcggatcttatctctggatggaggcggcatacgcggcatcttcaccgctgccaccctcgccgagcttgagcgacgacacctcggcggacgccccatcaccagctgcttcgacctcatcgccggcacttcgaccggcggcataatcgcgctcggcctcggcgccgacatgacagcagcgcagcttgccgacctgtatgtaacccgcggcaacgaggtctttccgccgccggctggtaacctcgcgcaattccgcgcctgggcccgcagcaagtggcacctggtctcgcacctctacgaccgagatgccctctctcgcctgctcgaacaagccctaggggaccgcctcttcggcgaatcctgcacgcgcctctgcattcccgcctttgaagggcgccacagcgaggtcttcgtcttcaagacacctcaccacgccgactacaagaccgaccgcttcgagcgcatgacgacggtgggactcgccacgtcggcagcgccgacatacttccggccgcttgagcacggcggctacaccctagtcgatggcggggtatgggccaacaacccgatcatgctcgccgtcatcgaggccatgacctgctatgacgtcaggcgcgaccagatacaggttctgagcattggctgcggcgacaaccgctacatcgtctcgcagcccgagattgcccacggcggcatctggcactggcgccgtgtcatgctggccgcgatgcgcctgcagtcgctcgccgcaacgaaccaggcgcgccttcttctcgggccgccgcaggtcgtccgaatagacccgcccgaaatgcagccgccgatcaggctcgatgactgggaacgctcggtgatagagcttttgccaattgccgccgagcgccttggctctcacgaagagagcattctcaatcggttcctcagtgaacccgcagaaccgttcctgcctgttgcagttcatgaataggttcaccacctgggacttcgtcacgttggggccgtgggctcagcgctggtcagcgccaaagatgagaacgctcacgccccaactttctctgcaccctttcatacgccgcatcgccggccgcctgatgctgatccagccacgaattgcatccgatggcagggatcttgttcctgctcggatcggcgatcgcctcaagttcatcctcgtcgatgagcgcgagcacgttggtcgctcgaggattgccctcgtcccaacgccggtatgcctcccactccttgaaccacttgaacagcttcgaactcgtggccgcgccgcaggcgcagacggttccgactcggtcctcttggatttgtcgaaggtcgcccgcatgacctggggcagcaatgatcattggcgcgaacgcaatcgcgaggcatgcatcttcgaatttcatcatttgccgatgtccattccctcgttggatggatcgacgatgtcgggaaaaggctgacgaagggccaagttcgtaggcaaatcactcagacgtggcggcgtcgaacaccctgagcagcgcagcgaccagactgtgcggcccctcgtgccgatagcgctggtagcggtccttgctcagggcggccatgctcggcgtcaacgcgtacttgtcggcctgatcgacggacacgctcggcacctcggccatcgggatcagccaagatgtcccgaccgatacagtcgccggctcgaacaggatcgcgaggagaagcacgtccggcgccggcttgaaggtcgacttctgcacgtcgaactggaccgtcttgcgcttcgggctggcgacggccgacttgacctgcaggcacacgctccgctgggtcgccttgtcgagcgcgatcaggtcgatgccgtggtcgtccgagagcggcacgaacggcgagaggcgccccgacgaggccagcacgatcgacgcagccacgaggtattcggtgaccgtgcccttctgggtcgacgtcagtcttgccggcaagtccatgcgatatccgattttgggataatcccaaaacgcgtttaactgtgttcgcgcttttgctcaagacgaagcgcgccccattgccaaaatcaatccagcacgaggcctacagggaactgaccagcacgaggcctacagggaactgataagtcgccttgttgatgcaaggacgacggcgggcctcacccagcaagaggtggccgatctgatcggcaagccgcagtcttacgtcgccaaggtcgagggcctggagcgccgtctcgacgtgatcgagttcctgacgatggccgctgcgatcggcttcgacccgatgccggcgatcaagtcggcgtggcgcgaggtaagggctttgtcggagtgagcgaccctggcaaagctgttgagagcgaggtcggtcgccgtcataatccggcggcgaccgactgtttcgtctaagccggcagttgcgatttctctgaccggcgtgcgtcccagctagacagcactgtctcgccggccgctcgcattttcgagcggtagaatgcgatgcagtcggctgtcgtctgggcccccggaaattcgcggcaaatgacctcggcagcgctcgggttcgagtggccgctccggatcaattccttcgcccggggtttgatggtggctggttgcatatgggcttccattaacacgatcgttgagctccgcatctggcggcgttctcaagctgaaacgattgtttcagcagttgttgatagagcaaagcctgtgccaaccatcacaggcggagaaaagtattaatgagcgctagtggtcaaatgcggagggtcacggccatggtccccgaggaactcatggcgggcatggatgaagtcgtagagataactggcctctccgcgagtgacgtgctcagagatgcaatcacggcttacctattcaacgggacatggagcgggatcgggcgcatcgcgaggcaagcgatccttgatggtaaaaccaacgaagaaggtcttgcggaagtcttaaagataaatccgtctgcctcgacgtcattgaaatcgattggctggtaccgttccgaactgcgacggcagctcggcgacgacaaggtgccaactgacggcgccatcaagcgcatgaggcagcggcaggcttagattgctcgtcagttttcggcacgctctcggtaggagaatgctccagaccaaaatcgcgaatccaaccagccgcttgatcgacgacgtcacgctccagggtagcggatgggtggcggggtccgcggtcgaggggttgtcgccgcactgcgccgcgatatccagtgcccatcccccacgagtagcggtcgcgacagatgtgacgtcacacgcggatcggagcgtggtgtcgatttaagggctgccaagtagctagcgtcctacggcgatcgccgactagccactgcgttcttcgctcgacgatgccgggcttcaacaccctctcctttttcacgagcgtcaatccgagccttgatccagctttcaacctccgactcgacgaaagccacgcgatgacgcccaataggaacaggtcgtggaaattcaccgcaattgatgcttcgatacagtcgtgacttcgacatacagatgcgagtcagaacatcgtgcatggaaagcaggcggtacgtcatggatcggttccattcggtttcagccgattgattaagtgccgataagtctcacccgcgagctgcattaaatccataagcactaatgcttggtcaagatgacgagcaccggtgctggctaagtcggttagatcggttaagtcagcggtcctccacatgagcgcgtctactgccaatggcgccttaattgccaagacagttgccgcaggaacggcctagaacgggcggaacaggttggcgagcattgcggatcagccaggaggctgaaggcgttcattccgagatgtcttcattcttcgacaatttgaaatcagcctgttccacccgttccgagcaagtatttgcaagcacttgaggccgttcctccaacccgttccgaccctgttccaaggccgttccgtcatcagaacggaacttcgtcacgtttgtcttcccagtcgcgacgcgtgagttcagctggtgtcaaaggcctgatgccggtccacacccgcgacggccgcttggcctcgcccttcttgagcgaaggctgcttggagcgtacgcgatggcccaaggcctcgagcagacgaccagagaaccgttctttgctgaacttcatagcggccggttgttcgctgtcggcgtgccattgggcgtacaccttgtacagctcgtccttcgtgcagctggcttcggcatcgaggatgcaccggtcttcgacaaaggcctttactggtgcgccgagccggtcgatgctgctgacgatttcactactgctcgacggcgtcgtgaacttgatcggcatattgcggcggccctcgatcatccacttgaggatacccgacctctcggccatcagcttggcttccagctgcgggtcttccttacccacgaaggagaatggcatctcgatcacgacgtagcgcctcagcagggcacctgacgagtcgttcagcgacggcggtgcgttggcgaggattacgaagcgcacacccagccgcccctcccaatcggtgagatttttgcgcgggatcgaaacggggtcttcgccggacacattcaggagcactcgcgcgatcgcctctttgttgtcatggtggtcaagcttcatttccgagatcagtgccagctgcttgccgatgaggagttgctgcccgaattgggtgccgaggccggagagcgagggcgagcaaacgttccggttgcccaagatgctgtgcaggacacgccccagggtactcttgcccgatcctgcggctcccacgaacacgaagatggcctggcgggaggtatcgggcgtgagcaggtagccgcaaatctgctggacgagttggacgctgtcctcgtggaagacttctcgaatgaacttgagccaacgctctggcgcagccgcgtcctggtcgtagtcgtaatcaagcgcattgaacgtgaatagctctggatcgtgcggaatgagttcgccggtcctcatatccaccatgccgttgcgtaccacgagcagctcgcgcgggtcgctcccctctcggccatccagccagcatggcggcgcgaattccgaagcatccctgagtacaagccctttggcggcatcgagaaggttagatacctggcccgagccgaatttcgggaacctgtcgtagaccctagagcgaattatttcgtcgtctttttcctgatacgcgccgctgcgataagaaaaccagcgccccccgaaacggagcagtttctgcttctgcgctgagatgaacgcgatcgccaactgacgccaagtcggtttgtcgccctgtggttcgtcgctctctcgattaaccgcatcactggcaacagcttttttcgcgcttacaatctccttttccacgtatttccgagcgttcttctgctcgagcacgcgttccgaaatcttgaatcgggcgtcggtgaggatggcgaaaatagtagtgtcggggacctcgcacctgaccagaccgcagacgacgtcgaagacccagcgagagcggtcatcgttcggcttattgctctcctgtgggtggcgcccttgttcgatgatgaccttgatgcgcggcggtacctgccaccgatccagcgcgtccaacgactgaatcggcgtgacgacgtcgtcgataaccgtggggctgatatcccaaagtggcgcaccggctgacgtcgacggtgccggcttgaactcggataacgagtagtcacgcgaccaatcgacatcgatgaccgtcgccatcgtccgcctgcggcccttctccagcttcttcttgcttggcacgttccaggtgccgggcagccgcatgatgcggtcaatgttgtggcagctgtccgccttgaagatgcgctccagctggacgttccagagcttcgcctcttcagcccgctccagcgttccgtcgagcgttagaggttccttcagcctccaaaaggcctggtagccgccgcccgtggacaccaccagcgtcgggcgtgggatgcccggcgggagcttgtccgtcagaagggcgtggatgcggttctgctcctgcgtgaggtagtcttcctttgtaagccccgtgtccgcgctccaggtgcgcgggtcgatgtcgacgtgcaaatggtcgaggcttacgatgtcagtgcgctccggcttcttggacatcctgcggccgatgcggtttcccgtgaagtagaggttccacttgccattccactcggccaggaagcgctcagcgtcgccaaccgtcgatggaccgaaggtctgcgtgcgaatgcggtcgggtccctcctccggattgatggccgtgatgacccaaggccctttggggtggaaggccttgaggaattcgatggcgtcgccgaggccgctcatgactgcctcccgacgcaaagatatccgactgataccgacgtgcccggccgctcaagctcgcgcacgagccagcgcagagccttatcttcctggctcgcccggaaggtccgcgttatgaccggacgcaactcacggccgattgtgatggtgaagtcccagggtccatcggggaatacggtgcgcatgtaatcgaggcattctgctgcgatcgcgcgagcgcgttcgggggtcctgggacccgtgccggggatgaggctgatgaagatcaccggcgccccccaacagcacgaatggcgcgctgacggcgctcagcggcaccagcaccggcgtcgcggaggccgacacgctggtcgatccacgcttgaacctcgctctcgacgaaagcgacgcgctggcggccgactggaacaggtttcggaaactcaccggcattgatcagccggtacagggtaggcttcgacatgctgatgcggtccaagaccacagcagtcggcaacagacgggtttgcgtcatcggggggctcctaggggtcagaattgaccgtctggaaccgtgtcgagttggtctcctcgacgttgggggactaatcccgaaccctgggggacatattcgattttgccttcttcggtcggcgctttcgcctcattgtgtcgtagaggccgctcacattgccgacgtggtaacggcaatcgaggtacaaggcgacaagcaaaaggaatcgcgcaggcgggttgttgcgctcgaatgcttcgcccatcgcaacttccgtttcaggcgccgcaaattcaggattgaaaccgccgccggttgccgtcttccaccactgcgtgatcgcgggatagttcagtctgagaggttcgatcggaggggccgcttcgtccgacgacctgttggcgcctgggttgccgcgcttgcggccgtaggtctcgagccagaatgcatcccagttaaagtcctcccgggcggaaggaacgcaatcggggtagtcgaagccggcttcagcgtcgccgctgtcgttctcattaaggtcgcggcgcggcctgtcaggactgttgcgcaaggtgtaagcatcgagagccagcctgtagccttccgcgatgtcggcaaggaatcgagcaaggctttcgcgatgattgcggagttcgacgccgggagttggcttcttgcgcctcgagccaatccgcgggggaactggctttcgcacccaatcaatgatgtcatcggcatcgtccagctgctgacgccaatcgaacagcggctccggttgctccgctccaacgagcagaaggcggcctattctgatgtcgctgttcaccccactatccccatgatgtgccgtgcataagcctcaagggccgagcgcttctcgtcggcgtaatcgtgcttgttataggtgcgctgcagcccgatcttcgcatgcccgagcactgcgtcgcggacgtcctgattgaagccgaggtctgccaagcggctctcgcaggtgacccggaaatcgtggatgcggtagttggcgagcgtggccgagggatcgcccgtcgacgcagtcagctcctcggtggtcagttcatcgaggtacgtcttggccttcgagaagcccgagatcggcgcctcgccggcctgggtgctgaaaaggaagggatcgagcccgttccacttcggcatggactcgtagatggtccacgcctcaggcgcgagcggaacaacatggtcacgccggcctttgtatcgagccttgggaatttcgagcactttgcgcctgacgcagacttctgactgctttgcatccgcccactcgttgcgccgctggcccgtcaggatcatcagcttgaagaacggaccgaacggataaccaagcctcgagaccgcgcgccagacagcacggatctcctgatcggtgagagcccgcccggcatctgcgcgatactgaaggtctttgcgcttcaagccggcgagcgggttctccgtgatgatctctcgatcgacggcccagttgaagagacgcgacagatgctttcggacgtcgcgcgccgtgccggcttgcccctttgcgatgaacccgtcgagcagctcatggatattgcggcggcgaatgtcggcgataggtcggccgccccattcgggaagcacatgcatgtcgagcgcgcgctcgatcttcttccagctctcgatgttgggcttgtcatgaaaaagtacatcacggaagcggccttggagcggatgaggccgccggccgaagggcgcgtggagcttggcgatacggtcgtcccggggctcatgctgcgcgtcacggcgggtggcgtcatgagctggtcggtgctctacaaggtccgcggcgagggcgggctcagccagaagacaggacggccgctgaggggcgctcaacgcaggatcacgctcggaacctatccgattctggggtcaagaaggcccgcgaggcggcaatcgcggtgctcgagaaagccgtcaatggtgccgatgcccgcaagagccgcgacgccgcgctcgtaatccgactggccagcacagtcgaggccgttacgcgccggttcatcgaacaggacgccaatccgcctcgctaaccgccagactgcattcaccgtgccaagaacctgctgacacggggtagctgcggggtagcaagacgcgcgatcaccgctgaaacacggcgatattcggtgatcttaagttccaaagtcggggaatgcccagaccgaccaagcccttacccgttctaacgagcgttgccaggacaacgtcctgttggtaagggaggggtcgagagttcaatcccctccggcagcaccatcctttcgcgattcatttcaagcgcttaggccgttgtggcgggttgcgctcgcgggcgccgaaaggtgccggggtagcggtgtgggtagcggaaaacgagggtacagaccgggtagatacctggtacagactgggtacatccctgacactttggaccgggaagataccagacagctcgattggtaaacagcgctccgtcggcggtgcctaccacaccgctcatttttgaccgggcttcctgaagttcggcgcgaagtgcatgcgaaacagttcgcgaggtcacagtcgccgcgtgcggcgaccgagcaaacagagaccagcttggtcgattgaaacggaatccccccgatggcaaagccaccgggggtaatccttcgatggaaaaccatcttgccgtggttttcctaccgacttcccgattgaactagttgcacactccaacctcaaaatcaataatcctccgattgcgacagaattctgcatgtggacggtcgggaggtgcaatgagtggacagactgaactcgttcttgggattgacttaggcatcgcaagctgcggatgggcagtcatctcccgatcggatggagtaggagtgatcgtcgcatgcggcgtccgatgctgggaagctccagagattccaaagacgcaagaacccaaaaaccaggagcgccgaagaaatcgcggacagcggcgcgtgatacggcgtaggcgccagcggatggcctctctgcgccgtctattccacgaataccggctcctgtccaatagcgagaagactgcactgagaattgttggcctcgatccttggtcgctccggctggaggcgctcgaccgcgtcttgtcggggcaggaacttgcggtcgcgcttggccacatcgcgcgccaccgcggatttcgatccaacagcaaacgagatcgcggcgccaacgctgcgagcgatactcccaaaatgctaaaagcgcttgacgcaacccgcgaaaggctgagcaggtatcgaaccgtcggagagatgatggcccacgatcctgcttttgcggagcgtaagcgaaaccgcgacggcgactactcgcgctcgacattgcgcgctgatctcgaatacgaagccgggcaaatcttcgccaaacaacgcgcattcggaaacgagttggccacagaaaatcttgaacaagcgttcagaggtattgcattcacgcaaaggccgcttgcggacagctgggacaaggtgggcacatgcccctttgagccgattgaacgacgaaccgccaagcacgcttacagcttcgaactcttccggtttcttgcccgcctgaccagtcttcgcgtgggaaacggcagaaactatcgtgcgcttacggaggctgaaatccggcgcgccgcgaacgatttcggaaatacgaaaggcatgacgtttgcgcgattgcgaaaggtgtgttccatcggcgaggaaaggttccagggcgtgcctccggcagacgagaacaatcgcgacgccatcgcgcgatcaggctcggctgccgaggggctggttacgctcaagaacatcgtggggaacgtggcttggctagatctcatgcgtcgcacggaaacgctcgatcgcgtagcagaaatcctcgcattttatgaatcggccgagagtattcgcggcgaactccaaaaattgacactcgagcctttggtgctcgatgcgatcatgcgaggggtcgcggatggggcctttgcgaaatttcgcggcgcggggcacatttcagctagggccgctcgcaacatcatcccacatttctcgcgcgggctcacctacgacaaggcttgtgccgaagcaggataccgacacacagaccggatcgaaaccgagatcacaaacccggttgcccgcaaggcgctgcttgaggctgagaagcagatacgcgccatcgctcaacaatatggaacacccgacaagatccatatcgagcttgccagagatatcggcaaaagcgccgaagaacgcgccgagatcgaacgtggcatcgaaagacgaaacaaggaaaaagacaagctgcgcgatattgagtttccggagacggtgggccggcctcctcagggacgagaagaatttctgcgatttgaattatggaaggagcaagcgggccgctgcgcttacagcgacgagattattcatccgtcacaaatctcaaggtccgacaattctgtccaggtcgaccacattctgccctggagccgcttcggtgacgacagttttcacaacagagcattgtgcctcgcccgcgagaaccagcacaagcaggaccgcacgcccttcgagtggttcgctgccgacaaaaccgagaatgaatgggaacgcttccgcgcgcggatcgagaccagcaaattgctgcgcggcatgaagaagcgcaattatttgctgcagaatgcggacgaggtcgaagagcgtttcaagacgcgaaatttgaacgacacgcgctatgcgacgcgcgctttgatgcagcgtctggagagcaagtaccccgcagaaccgggccgtcggcgcgtcttcgcgcggcccggcacgctgactggaaaactgaggcgcgcctgggcggtcaacgacctcaagaaagatccgacgaccggcaaacgttcggacgacgatcgtcatcatgcgctggacgcgatcgtcgtggccgcgacaagcgagagcacattgcaagcgcttacacgagcattccaagaggcagaaaagcgcggtcttgcgcgggagttcggaaagttcgatccaccatggtccacattcttggacgacgtccggaaggcgttcgacggcataatggtctcgagagccgagcgccgccgcgcccgcggcaaggctcacgatgcaacgatcaagcaggtgcgcgaggtcgatggcaagtccgtggtctacgaacgaaagccagttgataaactgacggaagcagacctagagaggattcctgtaccggaaccgcacgaaagggccgctgatccggcaaagctccgggacgcgacggttgcggcattgcgggagtggatcagggctggcaagcccaaagacagacctccccgttcgcctcggggcgacgtcatacgaaaaatccgtgtcgcgacgaccgacaaagttgccgtcgaaattcgcgaaggtaccgcagaccgtggcgatatggttcgcgtcgacgtctttgccaagtcaaacgcaaagggcaagcgccagtttttcctcgtgccggtttatccccacgaggtcgcgatgcgcgaaaccccgccaaatcgtgccgtgcaaggcggtggcgatgattcgaattggccagttgtcgacgaaaccttcgagtttctttggtcaatctacccgatgtcgttgatcgaggtgaccaagtccgacggcgaagtcatcaagggctaccatcggagtttggatcgcaatacgggcgcgctgaccgtatccgccgtcaacaattcaaccagcattaaaaagggtatcggcgcccgcactctattgaatttccggaagttgaccattgatcggctgggtcgtgaagccgaagtaccgcgtgagagacgaacatggcgtggaaaggcttgcacctgacgcggccgtcgcgtctcaactactccaataaacagattgtcgtcacgcagggcgacggcgaagtgagattggcaatagaagatgtggcttgggttatcctcgacacgcaacaggtctctcttaccggcaccttgctcgcggcctgtctggacgccggcatcgtcctcatctcgtgcgacagcaagcacacaccgtgtggcttagctctgccatttcacgggcattttcgccaaccggcaatcgcacaggctcagatcgccatgagcgagcctcaaaaaaagcgtctgtggcaatccatcattcaacgcaaaatagaaaatcaggcagccgtgctggcgttcagtgcgcctggagaagcgccggcgctactcgagatggtccgatgggttcgctcaggcgacccggacaatgtggaagcacgtgccgcacgctattattggcaacggctatttcccgatttcaaacgcggtgacgaaacggatcgccgcaataaactactcaactacggttatgccattgtccgtgctgccgtggcccgggtacttgtcgcggcgggcctgctgccggccttcggactcaatcattcgagcgttaccaatgccttcaaccttgctgacgatttagttgagccattccgaccctttgttgaccgtgtcgcgcgggaactggccggtcatgagattacacgttcggatgacctgacggttgaagatcgccgcgccatggcgtcggtgctgctggaaaacgcgtgcgttggcggtgagcgactcgcgttgctcgtcgccgcggagcgaaccgcggcgtcgctcgtccgcgcgatcgaagcgaaatcggccgaagcgttggaactccccgaagtagtaaaaatcgaggaggcacccctcgatgcagagtgaggacgtgcgtatcatgtggctgtttgtatttttcgatctgcctgttggcacgaaacctgagcgcggagaggcaaaccgctttcgcaactttctcaaaaacgacggctatatgatgatccagttctcggtttatgcgcgcgtttgccggggcgaagaagctgtggaaaagcacatcgcgcgggtcacaaagtctctgccaaccaagggcagtgtgcgcacgctacaggtcactgagcgtcagtacggccgcatgaagctgctcgttggagaacgaaagaaaaatgagaaagtcgcctcccagcaaatggttctcctctaatttttgcattggcaagaccgcaaaaatcagaggttgagcaaccatttgtcgagaacgcagcctaccagtgggaagtcggtagggaaaccacggcccacttgcgcaaacggtccttggcttcctcagcctaccagtgggaagtcggtagggaaaccacggcgccccgatcgcgatagagctcctcccaccaagcctaccagtgggaagtcggtagggaaaccacggcgaattgatttagctgggtaagcgacgtctgagcctaccagtgggaagtcggtagggaaaccacggccgaagagcacttctccgctgacgccttctgcagcctaccagtgggaagtcggtagggaaaccacggctctcgccggtgaatgccgcgatcatcgccgagcctaccagtgggaagtcggtagggaaaccacggcaccttcgctgagcacgtcctcgcgcgcgatagcctaccagtgggaagtcggtagggaaaccacggcgcgcacggctttgaagaggtcgagacctgcagcctaccagtgggaagtcggtagggaaaccacggcctcgaacagccgccgggtcagcgggttctgagcctaccagtgggaagtcggtagggaaaccacggcatgaggggcctagaccagtgacaaagctctagcctaccagtgggaagtcggtagggaaaccacggcggaacgatgtgctgatgcaccaggccgggaagcctaccagtgggaagtcggtagggaaaccacggcctcttcgtcgatcagagcaattttgctctcagcctaccagtgggaagtcggtagggaaaccacggcgatccgtcgaaaggccgtcatcggtggcgaagcctaccagtgggaagtcggtagggaaaccacggctcgaattgtccgcccctccgcatcaaccaaagcctaccagtgggaagtcggtagggaaaccacggcggccgtcacccccaggccgcgcgacttcaaagcctaccagtgggaagtcggtagggaaaccacggccacttcgctggcgccgaacaattcgtagccagcctaccagtgggaagtcggtagggaaaccacggcgcttacatgcccgtcaatgacaaccggttcagcctaccagtgggaagtcggtagggaaaccacggcagcaaccttatggtgcaactcgcggaggacagcctaccagtgggaagtcggtagggaaaccacggcccagatgcgagggcagcttcaggtcgccaaagcctaccagtgggaagtcggtagggaaaccacggccctgtaccgcgcttgcaacggctttgatgaagcctaccagtgggaagtcggtagggaaaccacggcccacttgagcaggcaggctgtgatggtggcagcctaccagtgggaagtcggtagggaaaccacggcccagatgcgagggcagcttcaggtcgccaaagcctaccagtgggaagtcggtagggaaaccacggcgggtcccggtctggtctcctgccccgggccagcctaccagtgggaagtcggtagggaaaccacggcggatgtgctcgcgtgcagaaagatgatattagcctaccagtgggaagtcggtagggaaaccacggcacgatcagcagccgaccgagccgcgtggcgagcctaccagtgggaagtcggtagggaaaccacggctgaaggattgggcggtctcgcagccgctatagcctaccagtgggaagtcggtagggaaaccacggcaatatctggaaagcaccgtcgccgcacgcgagcctaccagtgggaagtcggtagggaaaccacggcagagcttcattaacatcgtggccaagcataagcctaccagtgggaagtcggtagggaaaccacggccgcccggccgatatcgcggcgctgctcctgagcctaccagtgggaagtcggtagggaaaccacggccacttcgctggcgccgaacaattcgtagccagcctaccagtgggaagtcggtagggaaaccacggctcgagcgcgcgatgcacgaccgtcatctgcagcctaccagtgggaagtcggtagggaaaccacggcgagggggcgcgctgtgttcgcgaacaacgaagcctaccagtgggaagtcggtagggaaaccacggctcaaaccccagcacgacgcggcgcaggacggagcctaccagtgggaagtcggtagggaaaccacggccgcgccggtatcgagcaccggcaattcctcagcctaccagtgggaagtcggtagggaaaccacggcacggcggacgtgtgttgccacatgccggccagcctaccagtgggaagtcggtagggaaaccacggcgcgcatttgcagcagccgtcgcgtcgcgggagcctaccagtgggaagtcggtagggaaaccacggccaacgaggttcgtttctacaaatgacacagagcctaccagtgggaagtcggtagggaaaccacggctacatgcgcgagcgccgccgcgaggctctgagcctaccagtgggaagtcggtagggaaaccacggcctatgcggagtacctgccccggctaaagccagcctaccagtgggaagtcggtagggaaaccacggctctatgcctattacccgctacacctggccgagcctaccagtgggaagtcggtagggaaaccacggcctcccctgtcagtcaatcagtgtccccatcagcctaccagtgggaagtcggtagggaaaccacggcacagaaacagcggttgccgaagaagcgtccagcctaccagtgggaagtcggtagggaaaccacggcacgcagactcgatatgctctgacctaggcgagcctaccagtgggaagtcggtagggaaaccacggccttatctcatcaacggcgatgcgagcggacagcctaccagtgggaagtcggtagggaaaccacggcacatctgaaatgtttgaaaatgatccgcttagcctaccagtgggaagtcggtagggaaaccacggcacggggaaaccacggccgtgtggctgtgaggggcgccgagccgcggccgctgttcgctttcgccggcttatggcgtcggcacgtcgggtcgatcaaccatgagcgcatgcctgtgctcctttccactgaggccgaattcgagacttggatcacccggacaccaaatgaggcgttcgcgctcgtgggggagcacccaccggacaagatgcgcatggtgcaatcggggttcgagaaacgtgacttgcggctggtgtgaactcaacttttcggtcctatctggtcgcggctttctacaagcggactaaattgttgcgacgtgatggtcataagggtcactccaccatttcattacgggcttggcgacgtaacacttgagggggctgtccgaaggcacgcagaaatgcgcgacgcatgtgatctccatcgctgaagccggtttgacgagccacaacttcgatggggtgacggctttgctccatcaaatctcgcgctacttcgatacggaggttttcgatcgccttcgcgggcgactgtcctgtttctgcgcggaaggcgcggctaaactgtctcgggctcagacgagctgcgtcagctaggtcaggcactcccaacggcttatgcaggttttcacgtgcataggcgagcgccgcttgaattctgtcggtctttggtgccagttcgaggagatttgagaactgtgattggccgcccccacggcgatggtaaagcactagctttcgcgccaccgacttcgcagcatctgctccaaggtcattttcgataagagctagtgccaagtctatccctgccgacattcctgcggatgtccacacctgcccatcgttgatgaagatgcgatcctcatcgactttggctttcggaaaccggccttgcagctcgcgtgcgtggagccagtgcgtggtaacgcggcggccatcgagaaggccagcttcgccaagtacaaacgcgccggtacaaatcgaagcgatgcggcgatacttgcgcggggccgctcgtatgaacgctatcaagcccggcgacaaaggttttgcgaacgatgcaccgccgacgatgagtgtatcacctcgttcctggccgagtggttcgcatttcagaggtagccccgaagaggtgctgacagcgccacccttctcagacatgaacctaaactcgtactcagctttgccttgcactgcgttggctgtttcgaaaaccgcgacagctgccaacgccatcgcggaatacccgggatagatcacgaacgtcacgcggcgcatgtccggctccatgtcttaaattgacggatatatgacatttaagccgtcgcgcagcaagtgtaggttccttcccagcagatgcatccgaggcaataggaggaacaaagtgatgtgcaatccaacaacgaagggtatcgcggtcgtaacgggtgcttccaccgggatgggagcagtctatgccgatcgtctcgcaaagcgcggctatgacttggtgctcgttgcccgcagcgaagggcggctcaaacaggccgccagccgaatttgggaagagacgcgccgtgaagtaaccgtgcttcctgccgatctcaacaacccggcagatcttgcgaaggtagaaaccctgctgaagaccaatgaagccattaccatgttggtcaacaatgcgggcgtcggttccgtcgcttcggtcctgcaggcggatgtcgcgactgttgatgcaatgatcgacctcaacatcaaggctctgacgcggttgacctacgccgtcgcaccggctttcgttgcgcggaaaaacggcaccatcgtcaacattgcgtcggtggtaggcatcgcggccgagatgttaaatggcgtgtatagcgcctccaaatcctacgtcatcagtctgggtcattccctccaaaaggacctctcagacaaaggcgtgcgcgtgcaaaccgtgctgcccggggctactgctaccgagttctgggatgtggcaggctatgcagcgcagaagtcggcaagcatcacgatgtcggcagaggacgccgttgatgcagcgttagccggtctggacaagggtgaactcgttaccattcccggcctgcacgacggcgatgcgtgggagcgttgggaggcagaccgccgcgcactttcgaagaagttcggaaatgccaaaccggctgaccgctacgaggtcaagtcgcctcaggctgcctgatccggttacacggcttgtcacgcaaacttcagaaaggggccgctcatgcggccccatttttagaggtgcataaatgccctatctgcagcttgatctgaatggattttcgacgccgcaagagaggaagcgcttggcggctgcgatgagtaagacgtactcgcgaatgatgtcggtcgatatccaatggatcaccgtcgcaatccataatctaagcgaaggtacgatttggcggacatcgcagaagggtgagcctgagcctgcttccgtgttgttgctcgatattcgtaggggccggacacccgagcttcgattggaactcgccaaagccctatgcgctgattgcgcagcttctcgacgattttgcccttgtcttcggggagaacctcggcctcgacatcactgatgccaagcttttgcgccaccgctttcgccgtcgtcagattgtcgcccgtcagcatgacgacgcggatgccgtcagcctgcaaggcgcggatcgcctccggcgtcgttgccttcaccggatccgcgatcgcaaagatgcctgccgccttgccgtcaatcgcgacataaatcgcggtcgcgccatcgcggcgcagttcatcggcggcggcatccatcgcgctcgtgtcgatgccggcatcctgcataatgcgaacgttgccgacgatgagcttacggccatcgaccacgcccagcacgcctttgccgacgggcgagtcgaagccctgcacgtccttgaaggcaagatccttgtctttggcagactgaagatggcggcagccagaggatgctcgctgctacgttcgaggcttgccgccagctgcagcaaggtcatctcgttaatggatcccgaggtgcggatcgcgacaaccctcggcttgccttctgtcagcgtccccgtcttgtcgatcaccagtgtgtcgaccttctccatgtgttccaacgcttccgcgttcttgataagcacgccggattgcgccccgcgccccacgccgaccatgatcgacatcggcgtcgccagaccaagggcgcacgggcaggcgatgatcagaacagagacggccgcgatgaggccatacgtcaatcgtggctcgggcccccagacgctccatgccaggaaggcgagaaccgctatggctataacggcgggcacgaaccagcccgacacctggtcggcgagccgctggatgggcgcgcggctgcgctgagcttgcgccaccatctgcacaatctgcgccagcgccgtttccttaccaatgcgttcggcgcgcatgacgaaggcgccggatttgttcatggtgccgccgaccaccttgtcgccggtgctcttcgtgaccggcatggactcgcccgtgaccatggactcgtcgatggcgctacggccatcgaggatggacccatcaaccggcacgcgctcgcccggacgcactcgcagctgatcgccggcgttgacctgatcgaggctcacgtcttcgtcgctgccatcgggtttgatgcggcgcgctattttcggtgagagatcgaggagcgccttgatggcgccgcttgtccgttcacgcgctctcagttccagtacctgtcccaacagaacaagcacggtgatcacggctgcggcttcgaaataaacaggcgccgcgtcgtcgtgggtcctcatggctgacgggaagatgtcaggcaagaacgttccaacgatgctgtagagccaggccacgccagtgcccatcgcgatgagcgtgaacatgttcaagttgcgcgtctgcaacgagaaccatgcgcgttcgaagaacggccaacccgcccacaagaccacgggtgttgccagcgcgagctggatccaattcgaggtctgcgctccgagcgtctgagtgagcccggtcatgtggccgcccatctccagtatgacaacgggaagcgacagcgccaacccgatccagaaccgccgcgtcatgtcggcgagttcagtgttgtggatgtgttcgccggtgactacctccggttcgagcgccatgccgcagatcggacacgagcccggcccgacctgacggatctcaggatgcatcgggcaagtgtagatcgtgccttcgggcacgctctcggcagcttgggaacctggggcgtcaggtaattcgcagggtcagccacgaaccggtcgcagcatttggccgagcagaaatagtaaggctgcccggcgtgctccgcccgatgcttcgcagtgtctgggtccaccgtcatcccgcagaccggatcgcggccgtgacctgacgacatatctggctggccatgtgcgttctggtgatgttgatgggcgcggtgatcgtgagcgccgtgaccgccgcagcagccgcctttcgaagccgagccttcgatagggttgttcatgaccgcctccactaccctcagggggtattctcattgacacatatacccgggtagggtatgctttcaaacatgcataaggacatggcagatgcctgcctcaaacgcttgaacaagatcgaaggccaagtgcggggaattgcccacatggtcgaggaaaagcggtactgcatcgacgtgatcacccagattgcggccgtacgagcggcgctgcggcgcgtcgaggaagcggttctgaaggatcacatcagccattgtgtgcaacacgcgatcgaaagcggcaatcctgccgagcagcgaaaaaaaatcaccgaactgatggacgtgatcgagcgctctaatcgctgagcactccgaggtcggctgcgctggaccgataaccgcaaatcagcgtcttcatcgcagagggccggcgaaaccggacgtcgccggttccgtgtccacgcgaaaaaacgcttgcggccgacacctgctccactcagacggacaccggtgtcgctggtcggtgctttggccggaatcggaatccccgtgcagcgccgtgaggtgtgcactgcatgccccaaacagcggtaccacgcgaaacccgataggagactctttcccaatcagcaccccagaaccggcgccaggggagtccctgcgtcccggcggacatgcccgtcggacgtaacccgcgagaacgacagactaagttcgcaccgcgtccagaatacgaaaaatatccttgataatcaataaattatggcggagagggagggattcgaacccccggtacccttgcgagtactccgcatttcgagtgcggcgcgatcgaccactctgccacctctcctggtgccgtggtgcctcaaggcaggacccggcttgtatcgtctcgggcccgcctgcgcaagtcgctaagaggggacaaattgcagccctcgatcagttggatatgcgccaggaaagatcgagcgtttccgtagcggccctgccctgctcatagcctcgcgcgatcatgcggccggatttcgcgtcggccaccatggcaaggcgcgtgcggacattcaggatcggcggggcgagccaaccgaactcacgatcgaactcaggggcgatgccggccatcatgcgagccctgccggggctgtctatgcctcgggcgtggccgtaccagccggccgcctcccaatgattggcggcaacctgcgcgccctcgcgaatctga

SEQ ID NO: 4283 - DNA, 23084 bp, synthetic construct
  source 1..23084: mol_type = other DNA
  misc_feature 1..23084: note = Synthetic
cgcagaccatgcacgcgacgctgcagatctacgtgctgatcttcgccatcggcatcagccgctggccgcaattcgcccgcaccgtgcgcggctcgacgttggtagagcgcaacaaggactacgtgatggccgccaggctgatcggcctcggccgcgtgcggatcatggcgacgcacatcctgcccaacgtgctggggccggtgctggtgctcggcacattgactctgggcctggcgatcctggacgaggcgacgctgtcgttcctgggcgtcgggctgccgccgacaaagccctcgctcggcacattgatccgcatcggagacgatttcctgttcagcggccagtggtgggtgacgatctttccgggcctggcgctggtgctgatggtgctgtcgatcaacctgttgggcgactggctgcgcgacgcgctgaaccccaggcttcgctgatggcgttgctgaacctcgaaaacctgaccgtcgagttccccacccgccggggcatcctgcgcgcgctggacggcatctcgctttctatcgatgacggcgaagtcctaggcgtggtcggtgaatccggcgccggcaagtcgctgacaggcgtcgcggtcatcggcctgctggaacccccgggccgcatcgccggcggccagatcctgttgaacggcaagcgtatcgacaatttgccgtatgaggcgatgcggcgcatccgcggccggcagatcggcaccatcttccaggacccgctgaccacgctcaacccgctctattcgatcggccgccagttggtcgagacgatccagacgcatctgcatttgtcggacgccgacgcccgcaagcgtgccatcaactggctgtccgaagtcggtatccctgccgcttcgcaacggatcgatgcctatccgcacgaattctccggcggcatgcgccagcgcgtggtgatcgcgctggcgctgtgcgccgaaccgattctggtcatcgccgacgagcccacgacggcgctggacgtctcgatccaggcacagatcatcaccttgctgaaacggctgacccgcgaccacggcaccgccgtgatgctggtcacccacgacatgggcgtgatcgccgagaccgccgaccgcgtcgccgtcatgtatgccggccgcattgccgagatcggcccggtggccgaggtggtgaggcaccccgcgcacccctacaccgagggcctgatgggctcgatcccgtcgctggagcaccgcgtcgcccggttgcgccagatcgacggcgcgatgccgcggctgaacgccatcccgccgggctgtgccttcaacccgcgctgccccaaggtgttcgaccgctgccgcaacgaacgtccagagctgctggcggcgggcgccacgcacgccgcctgctggctgttcggcggagggcgggctgatgccgaggccgacgatgcgtgaggcgccgttgcctcgcgccccgttgcccgaggcgccgatgctcggggagccaatgccgggggcaccgctgcccggggcgccaatgcgtgaagcaccaatccccgaggcgccaacgcctgcgacatccgggacaatggtgtcggaggtgccaatgcccggagcgccaatgggccgcggcgccaatgcttgagccacccacccccgccgcaccaattcgtgcgtcgtctgatgcgccggtgcccgacgcgccgatgctcgaagcatccgcgatctcgcgcgtgttcgacgtctcgaaaccctggctgcagcgggtgctggcgcgcgagccgcgcctgacgctgcgtgcggtggacgaggcaagtttcagcatcgcccccggcagcacgctgtcgctggtgggcgagtccggctgcggcaaatcgaccattgcgcgcatggcggtcggcctgctgccgcccagcgcgggagagctccgtttcgagggcaaccccatctccaccgcccgcgcgcagccggagctgcgccggcggatgaacatgatcttccaggacccctacgcctcgctcaacccgcgctggcgggtgcgcaatatcgttgccgaaccgatccgcgctttcgccatcctgtccggcacgccggcgatcgccgcgcgggtcggcgagctgctggcgcaggtcggcctggcgcccgcggacggcgagaaatacccgcacgaattctccggcggccagcgccagcgcatctcgattgcccgcgcgctggcctcggagccggacttcctggtgtgcgacgagccgaccagcgcgctggacgtttcggtccaagcacagatcctcaacctgatgcgcgatttgcagcagcggctgggcctgacctacctgttcatcagccacaacctggccgtggtgcgccatgtctccgaccggctcggcgtgatgtacctcgggcgtatcgtcgagcagggaccggccgaaacgatcttccgcaccccgcgccacccctatacgcgcctgctgctggacgcgatcccggacctggagatggtcggacgcagccgcacgccggtgggcggcgaggtgcccagcccgatcgatccgccctccggctgcccgttccatccgcgctgtccgcttgccaatgaccgctgccgcgcggagaaaccgaagcatacacagcagcgcgaggtgcaggtggcgtgccacgccgtggcggaaggacgggaggcgatctgatgtccgatcacgatcaatccgggcacgatcgataccgacaaggacggaaggcggtctgatgtccgatcaagatcaatccgggcccgatcaggacagggaaccggcacccgggccgccgcgtggcgctctgatggccctgctgctggtagccgtgctgatcggcgccgtcatgttcattatgaatcggctgcgccaggcaggtcagctccaggattgcgtggcttcagggcggaccaactgcgcgccgatcgacacgcagcaccaatagatggacgcgcgtcagcgacgcgggcggcgcgcccatacgcgcggcgtcgacaccgaggccgctgccagcgcggcgctgctgcgtgacggctggacggtgcacgcgcgacgcctccgcaccgcatcgggcgagatcgatctcgttgcggaaaaggacgggctgctggccatcgtcgaagtgaaatcccgccccacccttgccgacgccgccgctgcgctcaccaccaggcagcgcgcacggctgattgccgcggcggaaatcctgctgggcgagcacccagagtggggcacgaacggcgtccgcttcgacgtggtcgtggtggatgccaccggcgccgtgcgacggatcgccgatgcgttccggctggagggttagagcattttcaccctggccggaaacgcaccctgtcattgcgaggagcgcagcgaggaagcaatcccctgcgtcgggggggattgcttcgtcgctacgctcctcgcaatgacaggtgggggcaatgacaggtgggggcaatgacaggtggggccggcgattccagtcagcgtgaacgtgctcttgttgtgccgatgatcgccggtgacggtcggggccggctgcctcaccaccacccgacgcccagcggacatgggctgcgtccttttacctctttcgcccagtctggcgtgcaaacacggatatctcctgcaatcaccttgaaaacaccaaggtcatcgcgaagtcgatcccgcgtcgtcatgagcgaaacaaccaagacgtggtcagcgacctcttgcatcgcgcggtcgacactgtaaaggcccacgaccctgacctcgacggagcgtcggtcctcgatcagacatccggctgccacaacgccaagcagttgaattccggcaggcaccggggcgtgtggctctcggcaataaatctgcaatgcctcacgcggcgtccgcggcggcgagtaccgacctgatcctggcgaaatctcgaccacgttgtacgcatagtaaagaccgatggtcggcacacgcgatcctggagagcgatcagacgaccaatacgatgtcgacgcgccgcatccggcaggtggcaccagatagacctcggtgccgtgatccgacccgacccagtccttcggcagcggacaatacgtcagaccaggtggaaagctggccatcagaccatggttttccgtgacatagacgggcgggaccggtcgcggctggtcggcgccgagatcgtcggccacgctcggcgcgatccggaggaaccaggtcatacccagcaggagacgcacaagccgaatgtcgcaccgcaccgccacgtccctggcctgacgcattattcgtgtcgtcgatatgtcatcgacgaacgacgatgacgcacactaggcacattcaagcatcggctgcgtcttgcacgccgccagatgctgcaggaacacctcgcagaatcgccgcgcggtcgactggtgaaccttgtcctgcagtgcctggtgccgggcacggcgttcgtccagctccatcaacagcgcccggtggatggcctcagcaatctcgtccgggtcgaacgggttgacgatcagcgcctcggtcagctcatccgccgcaccggcgaagcgcgacagcacgagcacgccgggatcggccgggttctgtgccgcgacgtattccttggccaccaggttcatgccatcgcgcagcggcgtcaccacaccgacgcgggcgatgcgatagaaaccggccagggtgcgccggctcagcgcgcgggtgatatagcgcaccggagtccagtcgaactcggagtagcggccattcgtgtcaccgacgatacggtccagctcgcggcgaagctgcaggtagtcggtgttgtcctcgcgtgagcgtgcggcgacctggaggaagctcaccttgcggcgatgctcgggatactcggcgagcagccggccgaacgcgatcaggcggttgggcaggcccttcgagtaatccagccgatccacgccgaccgccagcgcgcgcccctccaggctgtcgcgcaaccgccgtgcctccgctccacgcgctgcccgtaccgcatccttgacgaatgcctcggtatcgatgccgatcgggtcgacgatggcatgcaccgtcgagccattgtgcacgaaggagtcgcggtccagttccacgccgagcatctgctgtgcgcactgcaggaacgcgcggcgatacccatcggtgtgaaagccgaccacgtcataggccgccattccttccagcaactccggcgcacaaggtagcacctcaagcatcaccggtggcacgaaggggatatgcaggaaaaagccgatccgatttcgcaccgacaggcgtcgcagctcctgggccagcgggatcagatggtaatcgtgcacccagatcaggtcgtcaggttgcagcaccgtcgccagcgccgcggcgaagcgccgattgacggcgcagtaaccaacataatcctcacgccgatacgtcatcaggccgagccgaaaatgcagcagcggccacagcgcgccattggcgaagccgacgtagaaggcgcggtactcggcctccgtcatatcgaccgtggcgtaggtgaccccgtccgcctgcacgagctccggtgtctccgccggcgtctcgacgcgctttccgctccagccgaaccacagcgtccccggtcgcagcgcatcggccagcgccaccgcgagaccgccggctcgcggcccgcgctccgtcggcagcgggacccggttggaaacgattaccaggcgtgccacatgccctcctcccacgagcgcgacgggcgcactcacgcttatttgttcatcctggtcacccgcaccccagattgacaagagccggccgcgccaagtctgcggcgaaatccgggcgggcgcgccgcaaaagcgacccaatcaccgcgctttggtaggcatggcgctgccgccgcccccggagcttcacgattatgcgaattgcccagatcgcgccgctgaccgaatcggtcccgccgaagctctatggcggaaccgagcggatcgtttcatatctgacggaagagctcaccgagctcggtcacgacgtgacgctgttcgccagcggcgattcgaccacctcggcgacactcgagccgatgtcatcctgcgcgctgcgcttcgacgccgcgctgcgcgacccgatcgcacctcatatggcgatgctggagacggtgtatcgtcgcgcgcatgagttcgacgtgctgcactgccacctcgactactggacgttctcgctgttcagccgcgcggcgacgccgttcctgacgacgctgcacggccggctcgatctgccggaccatgcgccagtttacgacctgtttccagacgtgccgctggtctcgatttccttcgcgcaacgccgcggcctgccgggcgcgaattacgtgaagacgatccaccacggcatcccgcctgatctgctgacgccgcaacgggtcgagccgagctacctcgcgttcctgggccgcatcacgcccgacaagcgggccgatcgcgccatccgcattgcaaggcgcgccggcctgaagctgaagatcgccgccaaggtggaccgcgtggaccaggcgtatttcgacgcgacgatccgtccgatgatcgacggggatcaaatcgagatgatcggcgagatcggcgacgacacgaagtccgcattcctgagtggggcgcacgcgctgctgatgccgatcgactggccggaaccgttcggtctcgtgatgatcgaggcgatggcctgcggcaccccggtgatcgcgttcgactgtggctcggtgccggagatcgtcgaccacggcctgaccggcttcgtcgtcgacagcgaggatgcggcggtcgccgcgatcccgcgcctgcaacgcctgtcgcgccacgcgatccgccagcaattcgagcgccggttcaccgcgcggcggatggcgagcgattacctggatctgtatcaccagctcgccatccgcgagcgcccgcggctgcgcgtggtgtcgtaacgcgcgcgtccacggctgttcggtagagtcgggcgcaccgcccggcgtttacttgccgtcgcgccagggacagtcccgcttcttgtcgcgagacaagccagggccgcactcccgcgatatggaagcgaaggcagctagcgcccaacgtcgtgcggcgtggccgaatcaggaaacaaacctgcttgcgacgcgcctcccccgaggagaatttcctccgccggcctacccccttgccttcccggccattttctttctttgtcgcggcgaacgaccgatggagctcacgttgccgccacatctatcacgccgcgcgttcggcggcaccgccttggcacttctcgcgcagccgcacatcgcccgcgcagcgccggcggacatcaccatcgactgggcaacctacaaccccgtcagcatcgtgctgaaacagcaggccctgctcgagcgggagctcgcccccgacaggatcggcgtccgttgggtgcagtcgctgggatcgaacaaggcgctggagttcctcaatgccggctcgatcgacttcggctcgaccgccggcgcggcggcgctgatcggcaagatcaacggcaatccgatcaagtcgatctacgtcttttcgcggcccgaatggacggcgctggtgaccatgccgaacagcccgatccacaccgtcgccgatctgaaggggcagcgcatcgcggtgacgcgcggcaccgatccgcacatcttcctggtgcgtgcgctggccaccgccgggctgacggaacacgacgtgaagctggtactgctgcagcgtccggacggccgcaccgcgctcgagcgtggcgacgtccccgcctgggccggcctcgatccgatgatggccgccgcagagatcgagagcggcgcccggctgttctaccgcaatccggcggcgaacacctggggcgtgctgaacgtgcacgaggcattcgccgccgagaacccggagctggtgcgccgcgtcctcgcgacctacgagcatgcgcggcgttggtcggtggagcatccggccgagctgaaggcgctgatggtcgcggcgatgaagctgccggacgcggtggtggcgcgccagctcgaacgcaacgatctgtccagcggcgcgatcggcgacaagcaggcgcagactatcatcgaggcgggcaaggcgctgcagcttgccggcgtgctgccgggggatgtcgacgtggccgcggtgaccaatcggatgatcgacccgacctacgcgcgtgctgccggggcatgaacgttacgactaccgctactccccctccccttgagggagggggagtagtaacagtagcagcagtccgcctgcgccattacctaaccgccctgatcgttccggtggcgctcgccgtcgcctgggaaatcgcggtgcgcgccggcgtcgcaccaggccggctgatgccgccgccgtcgcgcctgctgcacaccgcgatcgcgctagccgcatcgggcgagctgcaaacgcacgtcgcagcgaccatgacccgcgtcgtcatcggcttcggcgtcggtgccgttgccggcacgctgttcggcatgctgaccggcgccagcgagaccgcgcgccgcctgctcgatccctccatccaggcgctgcgcgccgtcccctcgatcgcctgggtgccgatcttcatcctctggctcggcattttcgagacctcgaagctcgcgctgatcgctttgggcgtgttcttcccggtctatctcggcgtgctgtccgccatccaaggcgtagaccgcaagctgatcgaggtcggccgcgtgttcggcctctcccaagttggcatcatgctgcgcatcacctggcccgccgtgttgccaatctggatcgcgtcgctgcgcagcggcctcgggctcggtttcatgttcgttgtcgcggcggaactgatgggcgcgtcggagggcctcggctacctgctgctcgacggccagcagatggggcgcgccgacatcatcctggtggcgatgatcgtcttcgccctgctcggcaaggcgtcggacggcgtgctggtcgcggtgacccggccgctggtgcgctggcaggatacggtgcgggaacgactgtgacccggcttgcgatcaacggtctgggaaagacctatgccgacggcaccgaggcgctgcgcgatatccatatcgtggcgcagagcggcgagatcgttgccatcctcggtggttccggtcgcggcaagacaacgctgctgcgcctgacggccgggctggatcggccgagcgccggggtgatctccattgatggccgggcgatcgacgggcaggccgcctcgggcacgcatccggcgatcagcgcggtgtttcaggagccgcgcctgctgccctggctgacggtcgggcgcaacatcgcgttcggcggcagacgtattgcgcggccggaacgacagcgccgcgtcgccgacctgttggcgcgtatcgggctggcgggttacggcgcgcgctggccgaaggacctgtccggcggccagcagcagcgggtggcggtcgcccgcgcgctgatcggccatcccgagatcctgctgctggacgagccgttctccgcgctggacgctttcacccgaggcagcctgcacgagatgctgttgagcctgtggcaggaactgcggccgacgatcctgatcgtcacgcatgacgtggaggaggcggtgttcctcgccgaccgcatcgtggtgatgcggccgcggcccgggcgggtgtacgaaacgatgacgatccgactgccgcggccgcgcaacaagttgacctcggagtacgacgtggcgcgacgcgatgtgctgcgtgcgatcgaccggtcgttggcgtcggagggggcgagcggactgtggtccggcgcggtgtcgccctgggtgtaacggattagaggggggaaaggcgcaagaatccccctcccgggccgttgccgatccgagaggggttatccttcggtggtagaaaaccaccttgccgtggctttcctaccgatttccccgctactatctgcgcgaaatgatcaccgcctgtcaatagcgcgggatcggcggggaaatgacaatgcgcattttcggcatcgacggcggtatcgcctccatcggctgggccgttctggacatcacggacgacacggcatccatcgtcgccgctggtgttcgcatgttcgatgcgccggagacggataaggagcgcacgccgacgaacgcagtgaggcggctgcatcgcggccaacgccgcgtcattcgccggcgccggcaacgcatggcggcgttgcggatgatgttccagcaacacgggttgctgaccgaggcgcatcgcgacgcattgaagcagccgggcctcgatccgtggcgactgcgtgcggagggactcgaacggcctctgtccggtctcgaaatggcggtggtgctcggccacatcgcgcggcatcgcggcttccgctccaacgccaagcgggaggcgggcgcaaatgcggccgacgagacgtccaagatgaaaaaggccatcgcggcgacgcaggagcggcttggccaatggcagacggtcggcctgatgttcgcgcgtgatccgaactacacggaccgcaagcataaccgcggcctgaattttgaccggtcgatccagcgttcggatcacgaagacgaggtccgcacgctgttcgccactcaacgtcggcttggcaatgcgctggcgacggaagaactccaggttgcatatgccgacaaggcattctcccagcttccgttgcaggacagcgagcacctgctcgccgcctgcccgttcgagccggaccagaagcgcaccgcccgccgctgctatgcattcgagaagttccgtctgctgtcgcggttggcgacgctgcgactgaccgtgcgtggccaggaacagccgccgttatcggccgaacagatcagcctggcggcagccgatttcggccaccaaaaatcgctgtcctaccgctggctgcgcaagaccctggaccttgatacgggcgtgcgcttcgccggggtggcggaaaaggacgaaaagaacgacttcgtcgcccggagcggtgccgcagtcgaaggcacctacgcgctgcgtgaggtcctgggcgatgccggctggcgggtgctgatgcacaacccggtcatgcgcgaccgcatcggcgaggtactgacgttccgcgaagatcctggctctatccgccgcggcctggaggaggccggcgtcgcgggactgatcctggacgcactgatggacggtgtcgccaccggcaagttccacgcgtttacccgcgctggccatatctccgccaaggcagcgcgggcactgattccgccgctggcgcgtgggctggtctactccgacgcctgcgccgaagtgggctacgaccatgctaaacgggtggaggtaaagttggaggacgtgcgcaacccggtggcccgcaaggcggtgaccgagatgctgaagcaggtccgcgcactggtgcacgaatacggcctgcccgagttcatccatgtcgaactggcgcgcgacatcggcaagggcgtcgaggagcgcgacaagatcaccaagggcatcgaggatcgcaacaaggaacgcgataaggcgcgaaagcgccttgaggaagacatattgggtcgtccggccagcctggaagaattgattcgttacgaattgtggaaggagcagaacggcttctgcctgtataccggcgactacatcgaaccgggatggatcgccgccggcgacaaccgcgtgcaggtggatcacatcttgccttggagccggtttggcgatgacagtttcgtaaacaagacgttgtgcctggcacgggcgaaccaggcaaagctcggacgcacgccgtacgagtggttcgaggctgagggtctcgactggccgctgttcgccgcccgcgtagaaggctgcaaggagatgaagggccgcaaaaagggcggcttctatctgcggaagaacgccgtggaggtggaggagcggtttcgcaaccgcaacctgggcgacacccgctatgcgacacgcctgctgctcgatctactggcgagaatgtatccgagggatgggcaacttcacgttctagcgcgtcccggacagttgacggcaaagttgcggcgggcctggggcctcgatgatctgaagaaggacgcggagggtaatcgcctggaggatgaccgtcaccacgccctggacgcgatcgtggtggcggcaacgagtcaatcgatgctcctgcgactgacaaaggcagcgcaagaggcagagcggcaaggagcccctcgtggcttcgattttgagcatgtgccgctgccggcgggagggttccgtgacgttgtgcgggatgtggttaaggatgtgttcgtctcccgcgccgaacggcggcgggcacgcggcgaggcgcatgccgcgacgatcaagcaggtgcgcgagatcgacggcgcgcaggtggtgttcgagcggaaggccattgagcggctgacgccggcggacctggataatatcccgatccctgagccgtatgggaatatcggcgatccggggaagctgcgcgatgagaccgtggcggagctgcggcgctggatcgaggccggcaagccgaaggatgcgctgccgcactcgccgaagggcgatgtgatccgcaaggtgcgcgtggcgaacaaggacaaggtcgcagtcgaggtgcgaggtggcacggcggatcgcggcgacatggcgcgggtggatgtgttcgcgaaggcagatcgacgcggccggaaacagtaccacgtggtaccaatctaccctcaccagatagccgacagagacgcatttccacaaccgcccgatcgagcagttatcgcgttcaagttggaagcagattggacaaaagtggatccgaccttcgacttccaattcagtttatatcagaacagcttcgttgaggttgccaaacctgacggcgagatcattcgcggctatttcaagggaatggatcggcagggagcgcagattcatcttgcgctgcattccagtcaacgcagcctcattcggggaatcggcagcaagacactgttggcgttccacaaattcgccgtcgacaggctggggcgcatgtcagaaatcgagcacgagaaacgcacatggcatggcgaggcgtgcacataacgcagccctcgcggctgtcactggcggacggacagctcgtcgttacgcgcgacgacggggacgtgcgcctgccgatcgaggatgtggcctggctgatgatcgatacgccgcaggtgacgctgtccaccgcgctgatctcggcctgcatggatgccgggatggtgctgatcaccacggatcggacccacacgccaagcggaatgatgctgccgttccaccggcaccatcgccaggccgaaatcgccgcattgcagatcgcgatttccgcaccgctgaaaaagcgcctgtggcagacgatcattcagatgaagatcgccaaccaggcagcggtgctaaccggctgcggacagagtgcctcggccttgctggcgatggcgcggctggtcggctccggcgatcccgacaacaccgaggcgcgcgcggcccgcgcctattggccaaggctgttcgttgatttcatccgcgaggatggcagcgacaagcgcaatgcattgctcaattatggctatgccgttgtgcgctcagcggtggcgcgcgcgctggtggccgccggcctgctgccggccttcggcgtcaaccacgccagcatcaccaatgcgttcaacctggcggatgacctcgtggaaccgtttcggccgttcgtcgatcggctggtatggcgcctgaccgacacgggccgcacgcgaaccggcgaaacgactgtggaggagcggcgttcgctggcctccctgcccacggaagaagccctgtttgccgacgacacggtgactctgctggtcgctaccgaacgcacggcggaaagtttggtgcgggcgatggaaggcaacagcgccgcgctgctgttgctgccgcggctcgacggctgatgccggcgaccgagatccggttcgtgtggttgtttgtgttcttcgacctgccggtgggcaccaagccggagcggcgggacgccacgcggtttcgtaacttcctcaaagacgatggcttcatgatgttgcagtattcagtttacgcgcgcgtctgccggggcgaggatggttcgatgaaacacgttgcacgcgtgacgcggaacctgcccggcaagggcagcgtccgcgcgcttcaagtcaccgaccggcagtacggccggatgcggttgctactcggcgaggcgacaaaaaccgagtcggtcggctcccgacagatggtgttgctgtgaattccgactcggcaagaagccggaattcacagcaactccatacgtctatcggcaagggaacctaccacggggaaatcggtagggaagccacggctagatggtgggaacatagaagggattgccaaacctaccacggggaaatcggtagggaagccacggcctgacaatccagccggctaacgctcataacaacctaccacggggaaatcggtagggaagccacggcccgctgagccgaacacccttgttggtggacaacctaccacggggaaatcggtagggaagccacggcaagatgatttcgtcattcgcaccgccggggaacctaccacggggaaatcggtagggaagccacggccaaagacaggtgtcatgccgtctgacttgaaacctaccacggggaaatcggtagggaagccacggcgttgctacagggatggggcgttgtgcttcgaacctaccacggggaaatcggtagggaagccacggcgtttcgtaggttgaaaactctgtgtgtgtgaacctaccacggggaaatcggtagggaagccacggctggcgcgacgatcacccggacattggccgtaacctaccacggggaaatcggtagggaagccacggccctaagcctgcaagggtaatataccccagaaaacctaccacggggaaatcggtagggaagccacggcgtatagcattgacgggcacggacgcaagggaacctaccacggggaaatcggtagggaagccacggcccccagaacggcggcaagtacaagcgccataacctaccacggggaaatcggtagggaagccacggccgatccggtcttcgcggcgaggggcgccacgcgcgccggaaatcgtgtcaccgtgcccgcccctcgccgcgaagaccggaagggggccacgacccccaaaggctcatgaagcccgcggaaaagaaaattagtacgaaacaaccgcaccacggcaaggatggcggaaggcgctgcgcttttcggccctacgacgccatcgcctgctcaaacaccccagtatacccgaacagcccaaccgccccgcccgtgtgcaaaaacaccacccgctcgcccttgccgatcgcgcccttgcggatcaggtcgatcatccccgccattgccttgccggaatagaccgggtccagcagcacaccctcaagccgtgccagcatcagcaccgcctcgatcatccccggcgtcggctggccataccccggcccgacataatcgcaattcgcctccaccgccccgcgcggcaccccgccacgcacgccaaccaactccgcggtcgcctcggccagccggtgcacgttcgcctcctgccggtccttcggcagccttacgccaatccccagcaccggcaccccggcgttgcagccggccagtcccaccaccagccccgcctgcgtcccggcactccccgtcgccgtcaccacacggtcgatccgcagccccatctcgtcggcctgctgcatcagctcctgcgcgcaaccgacatagcccagcgcgcccaccgggttcgatccaccgcccgggatcacgtacggcttcgcgcccgtctcgcgcaacgcggcgcccttcgcctcggcctcggcgttcatgtcgaggccagccgcccggtactcgatcgcgcagtcgaacagccggtccagcagcacgttgccgctgttcaggtagtcgcggtcgttggtctcgatccggtgctccagcagcgcggtgcacttcatgccgaagcgccgcgccaccgccgccgtctggcgcacatggttggactgcaccgcaccctgagtcaccaggtggtccgccccctcggcccgcgccgcgccaaccaggtactccagttttcgaattttgttgccgccggtcgccaccaccgtgcagtcgtcccgcttgatccagatctccggcccgcccagctcgcgtgtcaggttgtccagccgctccagcggcgtcggggtcggaaacatgcgaacgcgagggaaccgggcgaggtgcatcagcgtaactcctgtcaaggtgccacccacggcgaggcaatacccgggggcggctgtaatgttcccgatcctcgggcgtccgacaatcagggcgcatgcagggcagatggcaatggccggccgccgcatgtgtttgtatgctgaccaaccggaagggaccacccgatgctgatcaagcgacgccgaggctgggaaataccggaccgcgaggccacgccggaggctctggtgctacgccgccgcgacgccatggccggcgccgttgcggtgtccgtcgctatgccgacgatcatcgcgcccgccgcggcccgcgccgactccgcgccggtgccgcgcaacccgaaatacacggtcgatcgggcgctgaccgcggagaaaaacgccaccacctacaacaactattacgaattcagcgatgacaaggatttgtggcaggacgctcaggcgctgcatcagcgcccgtggtcgatcgagctggccggcatgctgcccaagccgcgcaccatcggcctcgacgacctgttgaagcagttccagctcgaggagcgcgtctaccgccatcgctgcgtggaggcgtgggcgatgacggtgccctggaccggcttcccgctcagccaattggtaaaactcgcggaaccgctcgggtcggccaagtatgttgtgttccagaccatccaggacaagacgatgcccggcctcagcgcgccgtactacccgttcccgtataccgagggcgtcaccatggacgaggccaacaacgaccttgccttcatggtgaccggcctctacggcaagcccgtgccgccgcagaacggtggcccaattcgcctcgcactgccctggaaatacggcttcaaatccgccaaggcgatcatcaagatcacattcaccgaccagcgcccgcacaccttctgggaagccatccagcccagcgagtatggcttctgggccaacgtcaacccggaggtctcgcatccgcgctggagccaggcgagcgaacgcctgctcggcagcaacgaacgcgtgccaacccgcctgtataacggctatgctgagttcgtcggggggctgtaccagaacctcaatggcgagaagctgttcatgtgattgcgcaacgcatcctcgcaattctatcagcggcgctgctggtcggcgcggtggccgtggcactgctcgcaccgccgggcatgccgctcggccaggcgctgctgacgatcgaccacacgatgctggatgtgctgcggtccgcggtggagcgggtcttcgcgcgctggatgtggaccgaggtcgttctacccgtgctggcacgccccgcttggctgcccccggcggccctgggcctgatctgcggcggtctctgtgtcacgctgccgctcggccggcgtgccgagcggcctcgccagcgtagattctgacccggacactcgggtctgatccggccacgcggggtctgatcttggcacgcgtccgggcacgcaccaaccgggcacgcaccaacgtgatgccggggtgacccgatgccggtgtgaccgatgccagcgtgactcgccaacgtgacgccggcgtgacacgatacgccacggtgcgtgacggcacattacgggcatcgcaagcgcccgtccacgcaccaaggaggctgccaccccggagatgtctgatccgtcgccgccatcgacgaccagtgccgtggaaatgccaggccacaagcgcggactggcaccgttgggagccctgttgattgtcgtcgtcgtcgccatggcggcactggcaatcatgggcgcgcgcaagcacgcgatcacgcaggcgcagcagatcagcggcaatcttggcgcgctgctggcggagcagaccttgcgcacgctgcaaggggtcgatgtcgcgctgcaaacgaccgccgagcaaatccgcgccgccggcatcgcctcgcccgacgcgttccgtccagggctggacaaacccgtggtgggcaaccccgggcgggacaaaccggcgctgggcagcgagcgcatgcacgacgcgctcgcggaccaactgaagagcctgccgcaggccaccgcactggcggtgctcgacgcggacggcaagacggtggtctcgtcgctgtcctggccgacggtgccggccgacctgtcggatcgtgacttcgtgcgcaccctgcgcgcccatccggagacggcgatttatatcggcgcgccggagcgcagccctgccggcagcgacgggtcgatcgtcctcgcccgtcgcgtcagcggcccgaacggcgagcttctgggcatcgtcgcggcgtccttgccggtgcggtatttcgagcaattctaccaggccatcgcgctgatggacggcgcaaaggtcagcatcgtcaggcgcgacggcacccggctggtgctcttcccgcatgacgacgaggtgatcggcgcggcggtctcgcccggttccccctggtaccagctcgtcgccgcgggaggcggtgactacttcgcgcaagaccgcggtgcggcagactacgtttccgtccgcccgctgcgggagtatcccctggtcgtcgatgtcggcgtgacgcgcgacgcagcgctggccggatggtggcaagatgcgatctcgatcatgctcggtgcgctcgcgatcgtgctggcgatcgtgctgctgttcctcgtgctggcgcgccagttccagcgcctcgcggcgtcggaacgctcgctcgcccagaagaacgccgacctcgagcgcacccagcgccggctgcagatgcaggccaccgaactccgccgcaccgccgacgcgctcacccagagcgagcatctgattgccgagaaatccgccgtgctcgagaccacgctcgagtccatgggccagggcatcatgatgatcaccgcgaaccggaccgtggcggtttgcaaccagcgcaccatcgagatgctcggcctgccgcccgagatgcgcacgcccggcaccccgttcgcgcaggtcctcgcctatcagtggcgcaccgacgaattcaagcacacgccggccgacctgctggatttcatccgtgccggcggcatcctcgaccagccgcatgtctacgagcggcggcggccggacgggcggatgatcgaggtgcgcagcacgccactgcccgacggcagcgtcgtgcgcacctacaccgacatctccgagcgcaaggcggccgaagaccgcgccgcgcaggcgcacgaactggccgaacaggcccgcatccacgcggaggaggcgagccgggcaaagaccgacttcctggcgcgcatgtcgcacgagatccgcacgccgatgaacggcatcatcggcatgaacgccatcctgctcggctccaagctgggcgaggagcagcgcgaatgcgccgtcgcggtgcgcgagagtgccgactcgctgcttggcgtgatcaacgacatcctcgacatctccaagctcgaggccggctgtctcgagctggagacgatcgatttcgacatggtcgatctgatcgagggggcggttgggctgcttgcgccgcgggcacgcgagaaacggatcgagctttctacctttatcgatccggccgcgaggttcggcttccgcggcgatccgacgcggctgcgccaggtggtgctcaacctggtcggcaatgcgatcaagttcaccgacgccggcggggtggccgtcgaggtgatgttgcagtcaggcgccgggcagtcaggcgccgggaactcacgcgcagcgcaacacgagtccggcgaagcgaactggcgcgtgcgcgtcgaggtcgccgacaccggccccggcgtcccgcaaagcgtcagggcgcggctgttcgagccattcgcccaggccgaccgctcgatctcgcgccgcttcggcggcaccggcctcggcctcgccatctgtcgccagctcgtggagctgatgggcggcacgatcggaatgacctccacgcccggccgcggcagccgcttcttcttcgaggtcaagctggcccgcgccgacgcccccgtgctgatccgccgttcgctgcccgaacagttgcgcggcctgcgcgtgctgctggtcgacagcaccgacatcaatcgccgcgtgctgcgccgcgagctggccgcgcttgggatggagatcatcaccgcgcaggacggcggcgcggcgatcgccgtgctggagcagggctggtacgccggcgagcccttcgatctggcgctgatcgacctggagatgcccggccgtccgcgtgtgggcctcgcgggtaagggtctcgcgggagaggacctcgcaggtgcggcgttggtgcggcggatccgcgacatgccaggcatgggcgagctgcgactggtgatcgtcggctcggcggattgcgatgcgctgccgccgtcgctggagccgctggtcgacgcggtgctgacaaagccggtgcgcgagcagcccctgcgcgacacgttgggccggctgttcggcctggccgcacccggcggcggtcttccgaccgcgccggctcccggacaggacgtggcgaacctgttgccgatgcgggtgctggtggcggaggacaacaagatcaaccagcggctgatggtgatgctgctcggcgcggccggccatcaggtggaggtcgtcggcaatggcgaggaagccgtggccgccgcgcgccaaggcggtttcgaccttatcctgatggatatccagatgccggtgctcgacggcgtcggtgccatccggcgcatccgcgccatgcccgaaccactgtgctcggtccccatcctggcgctgaccgccgatgcgatcgccggggcggaggagcgctacctggcggtgggcgtggatgcctatctcgccaaaccgattacccccgcggcgctacaggccgcactcgccaggctaaccgcgcggaggcgcgacctgcatgagaccgctgccgacgagactgcttccgacctggcgtcggttgcccgatcacctgccccggcggcgctgcggccgccaccgtccgagccgcggttggatggaccccagctcgatccgtcggtgctggcggagctgcgccgcatcttcaatccggaccagttcgacagcttcctggccgacgcgctcgatgacattccacaccgtatcgtgcgactgagcgaacgcctggcagccggggaactgccggtggcgacgcaggaggcgcatgaccttgtggcgttgttcggcaacctgggcgcacgccgggcgagcgggctcgcgcgcgcggtcgagcagacgtgccgcgccgacgatcgagccacggtgctggcgcggcaccacgcgttcgccgccgccgccgccgccgccttggccgagctggcggcgcagcgccagttggtcggttagcagcctgtcggacctagccgaaaattgggggaatttggagttttatgtcgtctagccgcgatttccacggagcggaattggcctaacaattggcgcacaccacaagctgccggagctcggtggccactcgctttgcggcgcagagccaaccgcacggcagttcgccatggctgcacggagcgtggctccgatgggatggccttgtggctgttgtacgcaagcaaggactaacgtagagatcgcagagaagaaagccttgggtgcttcgcgcggcagcgtctcggcactgtcatcgaagttggtacgacggtctccggttgtttacatgtgatacctcgcgaaccgtctcggggttggctccgcggccggcgccagggattgactcgcgtgcgaccaatgcgctcaagccgacgggcataaccgactcaaaagacctcaagaaccttccggacggacgcttaggtccgacaggctgctcgggactgttcgggacttggcccgacaggaacgtgcgaggcacgggacagaaggacctccctgtgatgctggattttcctgcccgttcggaccgcccccccgtccaggtcgcgccggccgaaacccctggcctgcgcagcctgctgaccatcgccgtcgcgttcgtcgtggtcgcagggctttatttcggccggtcggtgctgatcccacttacgcttgcggtgctgttgtccttcctgctcgcgccgctcgtcagcctgctgcggcgggggcatctcggccgtatcccctcggtgatgcttgccatattggcggccctcgcggtgatcctggcgctcggcggtctgatcggcacacaggtggccggactggcagatgatgtgccgcgctacgtgtccaccatccagcagaaggtcgatacggtgcagcggcttgtgctgtcgcgcatgacgacattcacgcgcagcctggtcaatcagcctgctcctgtcgacgtcgccgccagcaccaaaccgcgtgccgccccggttggaacaccaccggctggaacatccccggctccggcaccatccgctgccgcgcagaagccgatcccggtggaggtgcatcagccggaccagacggtcattcagctcgtgcagcgcatcgtcacgccggttgtcgaaccgctgtccacgacggctatcgtgttcgtcgtcgcgatcttcatcctgctgcagcgcgaggacctgcgcgaccggatgatccggctgttcggctcctccgacctgcaccggaccacagtcgcgatgaacgacgcggcgcgacgcctgtcgcgctacctttttacccagcttgtcgtgaacacggcgttcggcgtgttcatcgccacgggtctggcctttatcggcataccctcgccggtgatttggggcgttctcggcgctttgctgcgcttcgtgccctatatcggcgcgccgctgtccgccgtgattccg

SEQ ID NO: 4284 - DNA, 23069 bp, synthetic construct
  source 1..23069: mol_type = other DNA
  misc_feature 1..23069: note = Synthetic
ccatcagcccgaagccgcccagggccgccagcgccagcaccagaacgccgttgcccaggtcccccagatggtcgccggccaggaagctgagcgccagcagggcccagaacaggccagcacccaggcgccgggggttgccagcatcccgcgccgcgcgccaggcggcggcggcgaacatcaggccggccaggtcgtaggccagggtgatgccgatcatgaccgtccccccttggcggccatcaggcggcggtccagcaacagcaggcgggcgccatggacgacgacggcgaccagggcggtggggatggcccagaccgacacgtccagcgggctgacctcgatgccgttggccgccagatagcccttgatcaggatgacggagccgatggcgacgaagatatcctcgctgaagaacagggcgatgttctcagccgccgccgcgtgggcgcggaccaaggtccgttcctcaggcgccaggggacggcccagcgtctccgccgccacggcctcgcccatcggggccaggacggggcgcaccatctgggcatggccgctgagatccttggcgcccagggcggccaatacctggcgcaggacgaagaacaccaggtaggtgcggcccaccgtggcggctttcagcccgccgatcaggcgctgggcctgcacctggatgcccagccgttccagcaagccgatcaggggcaggaaaagatagaccaggcagatatagcggttgccgttgaacagccggccgaaggccgacacgatttcaaggacgcccatgccggccgccagaccagtgccgaaggccgccgccaccgcgaccaagagcgggttcaggcgggcggcgaaaccggcggcgacaatggcgatgccgaccaggctgagcatcaggcgccgccctcgcccaccgggccgaagcccccgccacccggtgtcttcaccaggatggcgtcgcccgggttcatctccaccgtatcggtggcggccagcacctggacgccgccgtcggcgcggtgcacctccgtcacgccctgcgccccggggtcaccaccggcgaggccgaatggcggcacgcggcggcggttggagaggatggcggcggtcatgggggcgcggaagcggatcaggcgctccaccccgtccccgccccggtggcgccccgccccgccggagccccggcggatggcgaagcgttccaccagcacgggatagcgcacctccatcacctcgggatcagtgaggcggctgttggtcatgtgggtctgcaccgcactggtgccgtcgaaatcgggtccggcaccggacccgccgcaaatggtctcgtaatactggcgggcatcatcgccgaaggtgaagttgttcatggtgccctgggcgccggccatgacgcccagggcgccgtacagggcatccaccaccacctggctggtttccacattgccggccaccaccgccgccggataggccggattcagcaggcaaccggccggcaccttcagcacgatgggcttgaggcagccctcgttcatcgggatctcatcatccaccagggtgcggaagacatagagcacggcggcgcggcagacggacagcggcgcgttgaagttggtttccaattgcgcgctggtaccggtgaagtccaccaccgcctgacgggcggcgcgatcgacggtgacggccacctggatgacggcgccgttgtccatctcataggtgaaggcgccgtcgcgcaaaacgtcgatgacccgccgcaccgcctcctcggcgttgtcctgcatgtgggccatgtaggcctcgaccacggcgcggccgaactgtcgcaccatggccgccatctcgtccgcccccttggcgcaggcggccacctgggcgcgcaggtcgccgatgttctggtcgggattgcgggcggggtaacggccgccggccagcagggcccgggtctccgcctcccggaaccgcccgccttccaccagcaggaaattgtcgatcaggacgccctcgtcttcaacggtgcggctgttgggcggcatggaaccgggggtgatgccaccgatgtcaccttggtggccgcgcgcggcgacgaagaccagcaggctgccatcggtgtcgaacaccggcatgaccacggtgacgtcgggcaggtgggtgccgccattgtagggcgcgttcagcatgtagacgtcgccgggccgcatgccccggccgtcgcgcgcccgcgcctccacgatcgcgcgcacgctgtcacccatggagcccaggtggacgggcatgtgcggggcgttggcgatcaggccgccgttccggtcgaacagggcgcaggagaaatccagccgctccttgatgttgaccgagtaggcggtgttctgcagggcgtagcccatctgctccgccaccgccatgaacaggttgttgaagacctccagcatcaccggatccaccgtggtgccgatggcggtacggggcgccagcgccaccacccgttccaggaccaagttggcgtggccgtccacccgggcgcgccagccgggctcgatcaccgtggtggccgtggcctcgcggatcagggccgggccatcgacctcgtgccccggcgccaggtgggcgcgatcatagaccggggtgtcggccacggcgcccgccatataggtgggcacggtcgccaggggcgggagggcgccggcggcgccggcgatgcccgccgagagggccgccccccgggccgggcgcccgatggcctcggcggccagggcctcgaccaccacggtcttgcccggcgcggtgaagccgaagcggcgctggtgcgcctcggcgaaggcctcggccagcgccaaggcatcaccgaagggcacggtcaggctggtgtcggtgccagcgtatttcaaacgggcggtcagttccaccgccacgcccgccaccggcacctcctgcgcggccagggcggcgcgcgcctcttgcgccagcgtctcggccggacccgccaagtccaggctggccgacagtggctgttccaccgtgcggtcgcggatgacgcgcaggtcggccaggcccatgccataggccgacaggacgccggcgagggggtggatcatcacccgcctcatgcccagcgcatcggccaccaggcaggcgtgctgccccccggcaccaccgaagcaggccaacgtgtattgcgccacgtcatagccgcgctggacggagatttccttgatggccttggccatcttctccaccgcgatggtgatgaagccttccgccagctggtgcggcgtgcgcacctcacccgtcgccgccctgacctggtcggccagcgcggcaaagcgggcctcgacagcgcccaggtccagcggctggtcggcgccggcgccgaagacatgggggaagaaggccggctggatcttgcccagcatcaggttgcagtcggtgacggctagcggcccgccccggcgatagcaggcaggcccgggcacggcgccggccgagtccggaccgacgcggaagcgggcgccatcgaaggagcagacgctgccgccaccggcagccacggtgtggatgttcatcatgggcgcgcacaggcgcacgccggccaccatggtctcgtacgtgcgctcgtacgtgccggcgtagtgcgagacgtcggtggaggtgccgcccatatcgaagccgatgacccggtcgaacccggcctccaccgccgtgctgaccatgccgacgatgccgccggcggggccggacagcacggcgtccttgccctggaacacccgggcatcgaccaacccgccgttggactgcatgaacagcagccgggcgtcccccttgttctcatgcaacgcgccggacacctggccgacatagcggcgcagcaccggcgacagataggcgtccaccaccgtggtatcgccccggcgcaccagcttgatcaggcggccggtctcatggctgaccgacacctgggtgtagccgatggcccgggcgatggccgccacccgcagctcatgcgcgtcgaagcggtagccgtgcatcagcacgatggcgacggcgcggaacccggcgtcataggccgcccgcaggtcgcggcgggtggcgtcctcgtccagcggggtcaggatggcgccttcggcgtccacccgctccaccacctccaccacgcggctgtagagggcatcggccaggcggatgtggcggtcgaacaggcgggggcgcgcctgatagccaatacgcaacgcatcggcatggccccgggtgatggccagcaccagcggttcgcccttacgctccagcagggcgttggtggcgacggtggtgccgatcttcacggcatcgatgtcggcggggaaatcgacgttgtcggccagcagccggccgatgccggccacggcggcgtcggcatagtgttccgggttttcggacagcagcttggcggtcagcaaccggccatccggccggcgggccaccacgtcggtgaaggtgccgccgcgatccacccagaattcccagccggatccatcgtcctccggacgcgctgccaccatgtcccgtctttctttgaagcgccgcgggcgacattgccgcccgcggcccactgatgctgacgggccttaccctaccctgccggcatgcgcgggaccaaggcgggatcgttggtgaaaatgaccgaaagaacccgccgccagtttcgaatattctgcggttcgcgttggaagcggaatttcctacttcgcgcgcacagctttcttgaaaacgctgggcgtgcccacgtacagcagcacggcctcttcctcggtgcgattttccaccgtgtgcttcatgcgggcgtcaaaatgcatgctgtcgccggccttcagcgtggtgcgggtgttgccggcggtggcgtacagttccccggacagcacgtagcggaaatgctccccgttgcgggtgtccacggggaagacgtgccccggcggaatccgcatcaggatgatgtccagcttgcggtcatccaggtccgacgccaggtcgatgtactggacggggctgtcgacctcgatgacgttgggcttggccgcgcgatggacgatggtgccggtgttgggcacctgcatgaagaaggagatgtcaacctccagcgcctcggccagcgccagcaaggacaccagcgacggaacgctgaggttgcgttcggcctggctgatgaacggggccgacaggccggaacgatcggccagttgctgcagcgtcaggcccatgtccttgcgacgcttgcggatttgctccccgatgggcattgacggcttcttcgcccgggcactcaaaatctgcatcggaaaacctcgaccttcctcgatgggcggagccgggtttcccggccgcccccaacccctcctgatacgcttaggccccatcccgaaaccgttaagcccggttccggccctgtttgttcacgccaaccgtcaggaagcgttccgcgtcaaaaaatttgaaccaaaaaatttggcccagaaaaatttagcgttgccaccatagggtaattttgttccatgtccactaccggaacccgggacctgcattgcgcataagtccttcattccggacattttattactcacacccccggcccacgcggggccgggggtgtcagccccatcagctgcgcggggacaaaaggtcatccagacgtgccggcgtgccctcaacccgttccaggtgcgggtagcgcagaccatcgtgatagtcgatgcccagggtgcgatagcggtcgccgttcttcacgatcagctccaccgccggcccgtcacccttggcacccgtcaccgccgccttcatgcggtcggcgtcataagccacaccgttgaccgccaccaccgtggtgcccaccgtcaaccccgccttgaaggccgggccgttccactgcaccgacgtcagcgcgccggccttgtcgagggcgaaccccagcgagtaggtcaggttcagcgagccgggcgcctcgttggcgcggctggcctcggacagcggctggtcggtgtagaccagcttgtagccgccacgggccaggccatccaggggggcggactggtgggtgtccagccgctgacgcaggaaggtcgcccagtcatagggctccacctggttcagggtcttgaccacgtcatcgaaggtgtaggtggccggcacatagctgccgtcctgcatgccgaagaaggccttggcgaaatcgtccaggctgcgcttgccgcccgaccgctcacggatcaggctgtcggcgtccagccacaccagctggccctcggtgtaatagtcctcggcccgctgccagctgatccatggcgccgggcggcgcatggcgacgacggggccgttggtggtgtcgtccaggtcgcgccaggcgcggcccacccgggtgtccagcgtggcggccacgctggccaggccatccagggcctgctgccgggtggtcaggcccgagcgtgccgccagcacccagccccagaactgggtctgcccctcatagacccacaagccgctgtcgcgcatgggcacgttgaagttcggcgtccacaggtcggccgggcggcggtacttgccgttccaggaatgggtgtattcgtgcgatagcagctcatgccccgccgacttgttccagtcggtgaagtatgtcggcgtggtgccgttctcgctggagcgatggtgttcgaggccgatatggcccagcttgtcgctgagcgccaacagcatctcgtaatggtcgtagtggcgggcgccgaacagcttgtccgcctggaccaccaggttgcggtgcagggcgatctggtcgggcgtcgcctccagcaggtccggccggtcggcgacgatgttcagatgcatgggcgagcgtccgcccggatccaggtccagccggcggaagtagcggccggcgaacatggggctgtccaccagggtttcgaacggcaccggcttgaaggtggtgacgccgtccttgcccgcctctttcgccacgtccagcgccgtgccgaagccccagccatcgggcagcttcacgctggcctccaccgggatgcggcgggtgaaatatcccgccgggtacagggcgacggcgttccactgcacgttcgtcatgtccggggtcatgacgacgcggccctggttgtccgccgtgggggagacgaactggaattccagctccagcgcggtggcacccttgggcacgtccacatggaagccgtagacctccaccgggtcgcgctgccattccacccgctggccgtcggcggccccgcccttggcatggatgatcaggcccgccagcttgtcgatcgcgccggtgggggaatggttgcccggcagccacttcggatacagcagggtcaacggcccggcacccttcaccggcaccgtctccttcacccagaagatgcggcgttcggtgtcggtggcgtcaacctgcagccggatggtgccgggataggccgtgtcctgcggttccgggatgggggcggccggcggatagggctgcggcagggcctcgtcagcccgggccggcggcgacgccaacgggcccatcagggcggtaccggccgccagcgcggcggccagggacaggacggcagacttcacggatcaaaaccccattgttggcccgccccgcgcaggcatgttgtcatgggccaattttagcttagcccttcaattcatgtgcaaaaatcttgtattgtttctttaataatttgaatagcgaaatttttgacaagactgcggcggtcatgatcctggatcgggcgggccgccccgcctctcaatccaggatgccgtccaggctgatgatctccgcgtggtcccggccggccaggaccaggggcgactcatccgccaggcgctggtcgaacgtcgccgccaccgccgcgtccgaccagccccgccggcggtactcggtgatgaagcgggcgcggcgcgcggcctcatccgtggcgatgaacaggcggtgtttggtcaatctccgccattccggctgggtcaaggcgggcacgccctcgacgatgacgatgtcgtccggccccagggtcaccgcttcccggccggcatggctggtctgggtcaggggatcgtaccgtggcggggtcaccgccgtgccccgggacagcagggccgccaaggcggccttggccgcgtccagatcataccggcccaggacaccgggctgccgccggtcgcgggatttcgcccagttgtccaggccgatgaccacggcgcgccggccctgccgctccagatgcagggccaggcactgcgccagcaggcttttgccggagcgcgccaggccgccgatcaggaccatgtcgccggcatcgacgcgggcggccaaggggtccaggaaagcctccagccgtggccagacgtccaggatgaaatggacgccgccggccatgtcatcgaccacgacgtggggctgcgccgggcatttgccgtcgcgaccgccatgcccctcgcgcaccaggatgccgcccaggccgcaggaccgggccagccccatgtcggtggagctgtcgccgatcatccaggaccgggagaggtcgatgttgaggtcggccgccgccgcatgggccatgcccggccccggcttgcggcaatcgcactggaccagcagcgccggcaccccgcccgccagcgtggggtcgggatgatgggggcagaagtagacacggtcgacataggcgccttcggcgcccagccgcgtctccagccgggcgtggatggcgtccagcccctccagcgtgagcagcccccgggccaccgccgcctggttggtcaccaccggggtgcggtaggcggcgcggttcaatcgcgccagggcccgggccgcgctggggaccacctccagctcatccggcgtcttgatgtggctgcgttccacgttcagcacgccgtcccggtccaggaacacggcctgcaggggccgccgcaggctgaggcgctcgaccaggccgctggccacgtccgcccgcgcgcgcgccaggccctccggcgtcctgatggagcggacatattcggggctgcgatagccctggaccgcgcgccccgccgcccgcaggcggtcgagcagcccccgccccgccagggccccggggcccatggtcaagaccgccggttccaacacacagggaccgggccaggtgaggttatgggcgtcctggtcggcgggccaggaccggggcagcacgccccgcacacggccttgcccgtccaggtcaaccaagtcggcctcggccggccgctcgaccggctgaaccaacagggtggcgtcggcgccatggcggcggtggtggtccagcagacggtccagatccacgtccaggacaaggtcgccgggcaggatcacggcggtatcgtttgacaggatggcatcgcccgccggcgcggtgcgcacgcgcaggccccaccggccgccatcgccgcaatagcccgcgatggcctggacatccgccccggtcagcaccagcacctcgcgcagggcggagcgggcgatcatctccaattgccggcccaacagcggcgtgccgccgatatcggtcagggacggcggcgggacggcatggtccgtatcgcccgcaagaatgaccacctgggccaaagtccgccccctctcatcgccaatgccgccaagccggacaccatagggggcaggaccccggtggcgcaatcaccagcatcccgcccggtaccgccgcaccctgctggacagcttgagcggcaccgatgtgtcctgaggtaggaccatgaggataagtgggcgcgtgagagaggcgagaacgcggccctgacgtttttcgcctgggacctgggtccgcttccgccagcacaaaaaggaatcccccccacgatcactcatggagggtcaagcacgtcacttcgtgatcctgcgattggaaaaccaacttaccgtggtttccctaccgactcccaatcccagtttacatactccggaagggtgttcaacaataaaaggacaacttaagaggtggcggccatgaacaccggcttggtctttggactggatttggggataggcagttgcggctgggcggccctacgcctgtcgggggaggaagagggcgccgtgttgggcatgggaacccgcaccttcgacgtgcccgaaacagccaagacgcgcaccccgaccaaccaactacgccgacagcaccggggaatgcgccgcgttctgaatcgccgccgccagcgtatgaacgatgtccgtgatctctttcaaagggctggactgctaccggaggctcataaacacgccttggcggtccccggctccgacccctggacactgcggcatcaaggattggatcggcccctggtgggatgggaactggcggtggcgttgggtcatatcgccaagcatcgcggtttccagtccaacagcaaacgggaccgagggcggaacacgccggacgacacgtccaaaatgctgggcgccatcgaggagacgcggtcgcgtctggcgcgttggcggtctgtggccgagatggccgcccatgatcccgaattctcatcccgcaaacgcaatcgtgatggcgactattcccgctccctgctgcgccgtgacctggtggacgaagtgcgcgttctattccaggcccaacggcggctgggcaacaccctggccacgccggcgttggaggaagatttcatcggcaccgccttcttccagcgcccccttcaagacagcgaggacaaggtggggccatgcccatttgaagcgggggaacgccggaccgcccgtcacgccccgtcctttgagctattccgcctcctatcccggttggcggccttgcgtgttcgcgaaggcaaagccgagcgccccctgacgccggcggaggtcggcatggccgttgccgatttcggttccagccgcagcctgtccttcaaacgattacggacgctgctggaacttcccgcgtcagccgggttcgacggtgtccccgtggccgaagagaccaagcgcgacgtcgtcgcgcgaagtggtgaggcgacgccgggcgcgtatgtttggcgaaccaaggtattgggtgaaaccgggtgggcatcgctatggcacacaccatcaaccctcgaccggctgagcgaaataatcaccttccgggaagatatggatcgtatcgcgtcgggaatcgcggagttggatttgccgccgctaatccatgacaccatcctggacgcggtgaaggacggacagttcgccagcttcaagggcgccggccacatctcagccaaggcatgccgcgcgatggccccccatctggtccagggaatggtttactccgccgcggccgccgctgccggatacacccacaccgaccgggcggagggagatctggacgacatcgccaaccccatcgcccgcaaggcggtgacagaggcgttgaagcaagtacgcgctctggtcgaggaatacggccgacctgaatacatccatgtggagttggcgcgcgaggtgggcaagagcgcggaggagcgcgaccagatcagccgtggcatcgaaaagcgcaacaatgccaaggaaaaactgagggagcgcttccgcgaggacacaggacgggaaccgcatggtgacgacatgctgcgctatgagttgtggctggaacagggcaccttctgcgtgtacagcaaccagcccatccccctgacggcgctgatcagtggcgacaacgccatccaagtggaccacatccttccctggagccggtttggcgatgattccttcgtcaacaagactttgtgctacgccaaagccaatcaggataagaagggacgcaccccacacgaatggttggtccgcgatctgagggatgacgcgcgttgggaaacgctgcggcgggcggtggaaggcgccaaggggatgaaaggcgtcaaaaagcggaactacctgctgaaggatgccgaagccgtcgagcagaaattcaggacccgcaacctgagcgacacgcgttacgccagccgggtcttgctccatcttctgaagcaggcatacggacagcgggggcgcgacaccatcctcgcacgccccgggccgttgacggaccggctgcgccgggcttggggggtgcaggcgctgaaaaaacggcttgatgacggcacccggctggatgatgaccgccatcacgccctggacgccctgatcgtggcggcgaccagccaaagcgccttgcaacgcctgacccgggcgttccaggacgcggaggtgaggggagaccaccgtgacttttacggcttcccgcccccctggcccggcttcatcgaagaggccaagaatcactatacccggatcgtcgtgtcccgggccgagcgccaccgcgcacgcggagaggcccacggcgccaccatccgccaagtggttgaggaggaggaaggcgcggtcgtctatgaacgccgcgccgtcgcggatctgactctgaaggacttggagcggctgaaagaccctgaacggaatggggccatcgtcgaggcactgcgcgcctggatagatgccggcaagccagtggacgcaccgccccgttcccccaaaggcgacatgctgggcaaggtccggttacgcaccaagaagaatgtcgacgtgcccgtgcggggcggggcggcagaccggggggaaatcgcccggctggatgtcttccgcaaattgaaccggcgggacgcgtgggaatattacctggtgccggtctatccccaccagatcttcggcccggaaggcgatgctgggccgccgatgcgggccatcctggccaacaaggatgagggtgtctggccaatcatggacccggccgccggctacgagttcctctggagcctgaacccattctcatgggtggagatcgaaaaggccgacggcaccttcatcgacggctactaccgatccgtggatcggtccgtggcggcgatcgccgtttcaccgcaccaatcgaaactcgcgatgaccagaggcataggggtaaagtcgctcacgactttccgaaaattcgccgtcgaccgcctgggccgacggttcgaggtgacgcgggaggtgcggacatggcgtggcggggcgtgcacataagccgggccgcgcgcctgtcgctggccgatggacaaatggtggtcgcgcaggaagacggcacggtccgcctgccgctggaggatatcgcctgggtggtattggacacgccccaggcgacactaagcgcggcgctgctgtccgcctgcatggaggcgggtgtggtggtgatcgccaccgacgacaggcacatgcccaacggcctttgcctgtccttccatggccatttccgccaggcggccgtggcggaacgccaggtggggctgagccaacctctaaaaaagcgcctatggcaagccctggcccaacgcaaaatcctgaaccaagcggcggttttggcggcaacgggccgcagcaacggggtggcatccgacccagtggcggcgatggcggcactggtgcggtccggcgatcccgacaatgtcgaggcgcgggcggcccgtgcctattggggccgccttttcaccgatttccgacgtgaggatgatgaggaccgtcgtaacaagctactgaactacggctacgccgtggcgcgcgcggccatcgcccgcgccctggtcgcggcgggcctgatcccggcattcggattgcaccacgccagcatcggcaacgccttcaacttggccgacgacctgatagagcccttccggcccctggtcgatcgcttggtcttcaaccatcagggtgacagggccggggacgccgcacccttgggcgtggacgaccgccgggccatgaccggcgtgttgttggagacggccggcgtgggcggcgacagcctgacactgttggccgccaccgaccgcgcggtgtggtcgctgcttcgggcgatggaaagcggcagcgccgcgctgctggagctaccggaggtcatcgtctgaaaccagttccgcccttgcgtcgggaaccatcatgaaaaccggggacgtgcgcatcttgtggttattcgtcttcttcgacctgccggtgggcacccgcaaggaacggcgcgacgcgtcgcgatttcgccatttcctgaaggacgacgggtatatgatgctacagttttccgtctatgcccgtgtgtgccggggggaggaggcggtggacaagcatctggtccgcgtcacccggaacctacccgcccaaggcagtgtacgggccttgcaagtgaccgaccggcagtacggccggatgaaattgttgctgggggaggccggaaaaaatgagcgcgtggcaccacgtcagcttgtcctgctctgatttcggccccggcaaagggcggaaatcagagcagtcacaagcgcttgtcgcaaagggagcctacctgatgggagtcggtagggaaaccacggccctgccacgctgccccgatgatccactagaagcctacctgatgggagtcggtagggaaaccacggccatggcggcgaccgtgggcgggtactggtgagcctacctgatgggagtcggtagggaaaccacggcggatcgcagccgtatcagccgccgtgctcaagcctacctgatgggagtcggtagggaaaccacggccaagctacagacgcacaccctggtgggtgaagcctacctgatgggagtcggtagggaaaccacggcagctcggagagtggtaccggctctggctaaagcctacctgatgggagtcggtagggaaaccacggcgcgaatctggaacgcacccccatcccactgagcctacctgatgggagtcggtagggaaaccacggcctttagcgaagaagaagcacaagaggttcgagcctacctgatgggagtcggtagggaaaccacggcgtactggaatgcgagccgccttgctggcgcagcctacctgatgggagtcggtagggaaaccacggcgaggcttcgtcgtcgtcctcatcgcgctccagcctacctgatgggagtcggtagggaaaccacggctttgggaaccaccggcagcaacgtggcggcagcctacctgatgggagtcggtagggaaaccacggcccgaggccggaacgcccacggtgaccaagcagcctacctgatgggagtcggtagggaaaccacggcccaaggccgccagcacttcgagggttacgtagcctacctgatgggagtcggtagggaaaccacggcggccagggccagctgtttgtaaaacgtgtcagcctacctgatgggagtcggtagggaaaccacggcatcggcgattagggctgtgatttcgtcgtcagcctacctgatgggagtcggtagggaaaccacggcggcgtggctgagcgagctggcgggtctgctagcctacctgatgggagtcggtagggaaaccacggcccaactggcgaccgctcaacagcaactggtagcctacctgatgggagtcggtagggaaaccacggctccgacattcaccggcacaccggcggcgccagcctacctgatgggagtcggtagggaaaccacggccgacctgcggcgcctcaaccgcattggcttagcctacctgatgggagtcggtagggaaaccacggcggcgggactgtccaccactttcggatctcgagcctacctgatgggagtcggtagggaaaccacggccgggccgtccagctcgatcactgccatgacagcctacctgatgggagtcggtagggaaaccacggccaggacccggaggcctttgcactcagtgccagcctacctgatgggagtcggcagggaaaccacgcgccagggcggaaatggtggccctttccctgaacccctacccccgcgccatcgccgccaccagcagggtggccgtggccgggttgcaggcgaagggcaggtcggccagggtggccaggcggatcagcgccttcacgtccacgtcgtgcggcagggtgcccaggggatcgacgaagaagatcatgaggtccaggccgccctcgacgatcatggcgccgatctgctggtcgccgcccaacgggccgctgcgcaggcgggtcatgtccaggccgtcgatcacctccgccacgcgggtgccggtggaggaggtcgcgtagatcttggcctgccgcaggaaatcggcatgggccagggcccagtccaccatcgcctgcttcttgccgtcatgggcgatcagcccgatggcgcggcggccgtcttcccgcatggttcaaacccctgatttcaggacgccgcgaccttggcctcgacctcttcgccgcgtgacagcagatccagagcctcctggatcagatagcgcatggccgcctccgcccctgcggggtcgcccgccaggatggcgtcggccacgaccttatggtcggccacgctggccaggcgcacgcccttgtattggttggtgcgccgaatgctgaaccgcagggccgtgtcgatcagttcccgcagctgcaggtaaaagcggttgccgctggccttgaggatggcgacatggaagttgatgtcggtggtcagcgggtcatcgtccccccgctcggccgcgtacatgcggtcgatggcgaccttgatggcggccttctcattcggcgtggcgcgggcggcggccagctgggcggccagcggttccaccgccaggcgcatctcggtgaattcggccagtagcggcagggagaacttgcgttccaggatccagcgcagcacgtcgggatccagcaggctccagctttcctccggctccacccaggtgccctggcggggccgggcgcggagcaggcccttggcggtcagcatcttcaccgcctcacgcagcacgctgcggctggcgccgtagtgcttgcaaagctcagcctcgatgggaaagggcttttccgcgctgtaggtaccggtaacaatcgcggcgcccagatcctggacgatgccgaatgtcagattctggccgcgaaacttggcaatcatcccgtcccccaccctggttccacttatcagcttatatccccgccgtggccaatttaaacccactatccaccagaccgcgcacgccggcggcgcccacatcaaagacgaacagggtgccggcatggggatcggcggcgacttccgcgtcggtcatgccctcccgggcggtggtgacgaacagcagggtcaggtccggcccgccgaaggcgacgcaactgacccgcgccgtgggcacgggcaggacgccggcgaccgtcccgtccggggcgtaccgcacgacctgggacgccccccactgcgcgctccacagatggcccgtcgcgtcgatgttggcgccatcggggtaggccccctcctccgtcgtgacgaagacgcgctcattggagggcgtgccggtggcggtgtcatagtcgaaggcgcgaatctggcgggtggtgctgtcggtgtagtacaggatcgcgccgtccgggctccagcacaggctgttggaaatcagggcgccgtgcaccaggggcgtggcccgctcccgcccatccaggcggtagagcgatcccgccagcgaccgcgcctcacgcgccgcctcatcctccaccatcgtgcccgcccagaagcggccctgacgatccacccggccgtcgttgaagcggacaccggcgggcagatcctgtcgcgccagccaatccacggcgccggtgcggggggtgaagaaggcgaagccgctttcgaacgccaccaccagccggtccgcgtcgccctcgatcaggccgaaggagcagacgcgttccggggcggcgaacgtctcaatcgtccggctggcccaatccaggcggtggagacggcattcatggatgtccgtccaccacagcgactggtcgcgttcatcccaggtgacgccttcgcccagggtgttgcccagggcgaaggcggcgatcaggggggcgtcgaggacgggggaacgggtgtcggtcatcttaccaccaggtgatgtagagggcggacaggaccaccagcaccaccaaggccgcgatgttgaagccggtggtggtggagtagtcgatgcccttcagcttgaccttgatctggccggggatggcggccggggccgcgagcgagaccagcaccgcgccggccaggcacaccaggaagaccacacccacgcgatccatgaagggcagttcgggcagccagaccttgaaggccaacgacagcacggcggagccgatggcggccgtcagcgcgccggcggcgctggcgcgcggccagaacatgccgagcaggaagatgacgcagatacccggcgtgaagaagccggtgaattcctggatgtactggaaggcctggtcgaagttgcccagcagcggcttggccacgatgatgccgatcagcacggcgaccacactgacgacgcggcccaccgccaccagatggtgctggctggcgtccgtcttgatatgggcatagaggtcgagcgtgaagatggtcgccacgctgttgatcttggacgccagcgacgcgacgatggccgccaccaacgcggcgaacaccaggcccttcagccccacgggcagcatcttcatcagttcgggataggcctggtccggcaccggcaatcctgggatcagcatgacggcggccaggcccggcaggacgatgatgacgggcatcagcagcttcaggaaggcggcgaagaccacgccgcgctgcgcctcgcgcaccgacttggcggccagcgcgcgctggatgatgtactggttgaagccccagtaggacacgttcatgacccacaggccgcccaccaggacggagatgccgggcaggtccttatagaaggggctgtccttggtcaggatcagcttgaacttctccggcaccgtcacagacagctggtggaagccggccagcacgccctggccatcggcgatcttatccagggccaggtagctgatgatcaggccacccatgaccaacaggccgacctggacgatatcggtcagcgccaccgccttcagcccgccgaacagggagtaggcgcaggcgaacaggcccagcgcgatcagcgcatacatctgatcgacacccgccaccgcgtgcacggcgatggagcccagccacaggatggaggcgaggttgacgaagacgtagacgcccagccagaacacggccagcgtcaggcgcacgctgggcccgtaccgctgctccaggaactggggcatggtgtagatctggttttccaggaagatgggcaggaagtacttgccgacgatgatcagggtcagcgccgccatccattcatagcaggagatggcgaggccgatggcgtagccggaaccggccatgccgatgatctgttcggcggagatattggccgcgatcagggaggcgccgatggcccaccagggcaaggaacggccggccaggaaataatccttggcgttcttctcatgcccgaccttttcccgcgacacccactgggccagcaggaaaatgaacacggcgtagaccgccagcaccgcgatatcgatcgtcgccaaacccatcggcgtaaccccccatatgttatacgttcggcctcggatcgtgaccgatccaaggccccctcagtcgccgggcgccggcgtccgccgtcccccaagtttgccagggccgcgaagcggcccaagggcttcctcgtttcgagggtccgttgccgctccccgcgaaaccccggcggcgggcacttgtaccagagtcaggccagcttcagcgccccacgcacggcggccactaggccggccgcgcgctcggccatctgccccaaatccacccctggcttgtaaagatccccgcccgagccgaagccggtgacgccggcatccacccagggctgcaggttggcggcggtgacgccgcccacggcgtagacggcgacgtccggcggcagcacggccttcagcgccttcacatggcccggcgcatggctggaggccgggaacagcttcaggtaccgggacccggcgccgatggcggcgaaggcctccgtcccggtggagaagccgggcatggacaccatgtccagcgccacggtgcgggcgatgacggaaacgtccacgttgggcgacacgatcagctggccgccaacggcgtgcaccgcgtccaccttgtccggggtcagcaccgtgccggcgcccaccaggcaatcatcgccaaaggtctgcaccaaacgctcgatgctctgcagcggttccggcgagttcagcggcacctcgatggcgcggatcccggcgtcgtgcagggtgcggcccacggccaccacctcatcaggcgtcaccccgcgcaggatggccaccacgggcatgtgcttcaaccaggcttcagtcatgacgtcattcctcaaaggcgacggaaataggccagcaggccggcggtcgactgctcggcgccatccagcgccagggaagccacgccgtgactggccaatgccagggtatagagggtgttcagggccggcgcgccgaccagcacgacccgcgccggtgcggcccggcccagcgccttgtgccgggccaacgtggcagccacatcgccgccgatgaccaggccggacaggaagcccagggcatccttggccgtcaggacgccagccatctgccgcgcgcgcgtttcaaacagcaggtgcaggatgtcggccccagccgtcgccacccgggccaagccctcgcggaagccggcatcgggcgtaccgtcccagggctgggcgccacgcgccagcgtgctgtgcttggacaacagggcgtagatctcgcccgacagggcggtggtgaagccggtgatgcggccatcggacaggtccacccacttcgaatgggtgccgggcaggcacagcagatggtcgcccgtggcgagatccggatgggtgatcagggcacccagcacctgggtttcctccccgcgcatgacgtcgggcgccccctgcaggttggtgcccttcacgcccggcgcgatgtagacagcgcgcccccccccactttcaaaaggcaaatcgatggcgtgcagatgccccgcgatctccgccgcccccgccggcgccgcgacgtagggcacctccgcccagcccagggtggagcccaccatgccgcagagcagcaggggcaagcggccatgggcggcgtcccagtcggccagcaggccgcgcaccgtgtccgggaaaccgcccgccggcacggcggcggcgccgggaccgccgcgcgtgtccagcacggcgccatccgcatcgaccagcgacaggcgcaggttgctggtgccccaatcgccggcgatgaagaccgcgtttgccatcaatgcgattcccgtgtcacgcggtcgccgctggcgcccaccaggaagtccagatcgcagcccttgtccgcctgcatcacatgttgcacgtgcaggcggtagtagccgcgcgccggcaggggggcggccggctgggcgtccagttcggcacggcggcgggccagttcggcatcatccaccagcagggccaggcggcgggccgggccgttcagctcgatctcatcgcccgagcgcaccagggccagcgggccgccggcggtggattcaggggccacgtgcagcaccacggtgccgaaggccgtgccgctcatgcgggcgtcggaaatgcgcaccatgtccttgacccccttggccagcagcttgggcggcaggggcatattgcccacttccggcatgccgggatagcccttggggccgcagccgcgcaacaccagaagggaggtctcgtccacctccaggtccggatcgtcgatacgggccttgaaatcctcgatggtgtcgaacaccacggcgcggccgcgatgggtcagcagttcgggcgaggcggcgttgggcttcatcacggcaccatcgggcgccaggttgccgcgcagcacccagatgcccgagacgggcttcaccgggttggtcctggggcggatgacatcgtcgttgtagacctcgccctcggccacgatctggccaatggtcaggccgcccacggtcatggcgtccaggttcagcttgtccttgatcttggtcatcaggcccggcagcgcgccggcgtagtggaagtcctccatcaggtactggcccgagggctgcaggtccaccagcaaggggatgtcggcgctcaagctgtcgaaatcctccagcgacagatccacgcccacgcggccggcgagcgccagcagatgcaccacggcgttggtggacccgccgatggcggcgtgcacgcggatggcgttctcgaaggcggcgcgggtcaggatgtgcgacggcttcacatcgtccttgaccatggcgacgatgcggcggcccgtctcatgcgccatggcgcggcggcgggcgtccatggccggcagcgtgccgttgaagggcagcgacaggcccatggcctcgatcaggcaggccatggtggacgcggtacccatggtcatgcaggtgccgggcgagcgggacatgccggcctccgcccccatgaagtccttcagcgtcatctcaccggcgcgcaccgcctcgctgaacttccacacgtcggtaccggaaccgatgtccttgccccggtacttgccgttcagcatggggccggaggagatgaccatggtcggcaggtcgacactggcggcacccatgatctggccgggggtggtcttgtcgcagccgcccagcagcaccacgccgtcgatggggttgccacggatcgattcctcgacctccatggccagcaggttgcggaacagcatggcggtggggcgcatctgcgtctcgcccagcgacatggcggggaattccaccggcaggccgccagcctcccacacgccgcgcttcacatggtccgccacctcgcgcaggtgggaattgcacggcgtcagttccgaccaggtgttgcagatgccgatgacggggcggccgtcgaacacgtcgccgggcaggccctgattcttcatccagctgcggtggatgaacccgtcgcggtccagctttccatagctgtgcgcgctgcgaaacttccgcttaccgtcgtcggccatcgtcctaccgtccacctcggggccgggcgggcccctgatcgcctgagaggggggatggccggaag

SEQ ID NO: 4285 - DNA, 23051 bp, synthetic construct
  misc_feature 1..23051: note = Synthetic
  source 1..23051: mol_type = other DNA
gcactgatctgcctgcccaccatcatcatcgccggccgcgccgccctgaaggcggtgccgccctcgatccgcgaggccgccttgggcctgggcgcgtcgaagcagcaggtggtgaccgaccatgtgctgccgctggccatgcccggcatcatgaccggcaccatcctgggcatggcccatgccctgggcgagaccgcaccgcttctgatgatcggcatggtcgccttcatcgtcgatatcccggccacgccgctggacccgtcggcggtgctgccggtccaggtctatctgtgggccgacagcccggaacgcgccttcgtcgagcgaacctcggcggcgatcctggtgctcttggtgttcctgggcgccatgaacctggcggccatcatgctccgcaagaaattcgaacgccgctggtaggacccaaacgatgacccatctcccgtcccgccttgccaaggtttccgcccgtgacgtcaatgtccattacggcgagaaacacgcattgaagcatgtcgatctcgacatccgcgccaacgaggtcaccgccttgatcgggccttcgggctgcggcaagtcgaccttcctgcgctgcatcaaccgcatgaacgaccagatcgagaacgcccacgtctcgggcgcgctgaccctggacggccaggacatctacgacaagggcatcgacgtggtgcagttgcgcgcccgcgtcggcatggtgttccaaaagcccaaccccttccccaaatcgatcttcgacaacgtcgcctatggcccgcgcatccacggcctggcccgcgatcaggccgagttggacgagatcgtcatgaccagcctggaaaaggccggcctgctgaccgaggtccgcgaccgcctggacgagcccggcaccggcctgtcgggcggccagcagcagcgtctgtgcatcgcgcgcgccatcgccgtcagcccggaactgatcttgatggacgagccctgctcggccctggacccgatcgccaccgccaaggtcgaggaactgatcgacgaattgcgtgagaattacaccatcgtcatcgtcacccactcgatgcagcaggccgcccgcgtgtcgcagcgcaccgccttcttccatctgggcgaactggtcgaggtggccgacaccgagcagattttcaccaatccccagcatccgctgacccagggctacatcaccggccgcttcgggtaaggacacgcgcatcatgaccgaacataccgtcaaatccttcgacgacgagttgacccacctttccaacaccatctcgcgcatgggcgggctggcggaagcgcaactggccggcgccctgcaggcactggccaaccgcgacagcgacctggcggtgcgcatcgccgcctcggacgcccaggtcgatgtgctggaacaagacgtccagcatttcaccgtccgcctgctggccctgcgccagccggtggcggccgatttgcgccacatcgtcgccgccttgaagatcgcgtccgagttggaacgcatcgccgactatgccgccaacgtggccaagcgctcgctggtcttgaaccagcagccggcggtcaagccggtcggcgcggtgatcaatctgggccggctggttcagaccatcttgaaggacatcatggacgcctatgtcgagcaggacgtggccaaggcgatcggggtgtggaaccgcgacgaggaggtcgatgacctctataccggcctgttccgcgagctgatcacctacatgatggaagacccgcgcaccatcaccgcttgcacccacctgatgttcatggccaagaatatcgagcgcatcggcgatcacgccaccaacatcgccgaaaccctgcatttcctggtggtcggcacgccgctgaagggtgcccgccccaaaggtccgtccgtcgaggcccaatgatgaccaagccgctgattctgatcgtcgaggacgaggccgccctggccaccatgctgcgctacaacctggaaaaggacggctatcgcgtctgcgaggccggcgacggcgaggaagcgctggcggtggcgtcggaaaggaaacccgacctggcactgctggactggatgctgcccagcctgtcgggcatcgaggtgtgccgccagttccgccgcaaggcggcgacgcgcgacatgccgatcatcatgctgaccgcgcgcggcgaggaaggcgacaagatccgcggtctcaataccggggccgacgattacatgaccaagccgttctcgatccccgaactgatggcccgggtccgcgccctgttgcgccgtgcccagccggtggcggaaaagggcagcctggccttcgccgacatccgcatggatttggcggcccaccgcgtcacccggggcgaccgggccatccatctgggcccgaccgagttccgcctgctgcaattcttcatgggccatcccggcacggtgttcagccgcgaggaattgctgaactcggtgtggggccccgacatctatgtcgagccgcgcacggtggacgtccatatccgccgcctgcgcaaggcgctgaacggcgaaaccggggccgagcccgatctgatccgcacggtgcgcgccgccggctattcgctggatatggacgagagcgcttagacccgatgcaggtggtcgaggatcttcttgtcttcctcgacgatgtgccgataaagccagacgttcaagaaccgctcgatatcgaccgggctgcgctcgttctggcccagggccagttcctcgcggaactcgcgcacttcgtccaaaagactttgatgcaggcgctcgtggacatgcaccgccggaatgtggatgttgcgcatcacccgttcttcgtgggcgaaatggtcggaaacctgctcgatcaactggtccaacccgtccagcagcgcatccttggtcaggccggcattgatggcggcgaacaaggcttcggcggagttgatcagggcatgatgctggcggtcgatcgagaccacgtcgacgcttagtgcttctttccagctcatcgagaatccaccctgtgcacacccaggatagttttagagcaatcttaattgatcatgcaacaccctcggggcatcgctgccggcggcacgccaaatccgaggaaccgatgaccgactgggccgaaacctacgaccaatcatgggctgcccgcgaggcggtctttgccgccttgctggaacaagaagacagcctggcccgggtcctggcccgcttcgacgatttcgagcgcgcccatcgattgctgaccaaggacggcgaggtccgctatttcgccaagccacaggcccccgatccgatcggcgcgatgaaccccaccacgccgcaggcgttccacggccagatgctggcggcatcggactatttcgagttccgccgcgaccgcttgctggccgacctgtcccagaccgccgattgcgtgatcgagctgggcagcggctatggccgccaagtgttcgccatgtggctggccggggccaatgcccaggcccggtacgtggcggctgaaccctcggccatcggccggcggctgacacagcgcctggccgccctggaaccacgcctgaagctggaatgccacccgttcgacttccgcagcgccaccttgccggccgtcgcccccgatcagcgggtcctgctgttttcgtcgtgggcgtcgatgtatgcagcgcccctggaccgttccctgttccgggccatcgccgcccatcccggtccggtgacctgcgtgttcattgaaccgttcgggttccaggtcaacccgcacgcgccgttcgccgcccagcaacgggggcagatggaagcccaaggcatgaacaccgatttcttcgaggccttgcgtgaagaaggcgccgctgccgggctggaactggtcagcgtcgcccccgacctgttcggccgcaccgacgagaccttgcaactggcctcggtcatcatcgccgagaaggcgggtcaggacgcctgcgccgaactgtaattggccaggatcatgtcctcgttcagcaattcgcggaaatagacgctttccaactcgcccaggatgctgctggccaatcccagattttcgtcggacaaggcccgttccaggtcgatgaccttgtcacgggtggcggcatgcttggcctggtggacggccgcaccgggaaagcccaaccgggtcatcatctcaccctcgacgtcgaaatggccttcgaccttggcgacgaaatcgcgcgccatcgccagggcggcccgcaccgacttggcatgcaccgcttcggacaggtcccccatcaggtagaacatgtcgcgatgtgcctcatcaagggcggcaaccccgacattcagaccgtccatccaaggtaggcgatgcaaggcgacctccggcacaccctcaactattcgattataggcccagccgggggctcgggcgcaatcgggtaaacgcccttattggggctatgtcggatggttgcgtcccccaccccggctcggtcatcatggccccatgctgctcaaccttgtccacctgctgcccgacccgtccggagccctgatctgccccaaggaacggctggtggcgttcgccgatccgtgccgggacggcgacaaggccaagacgatcggcgacaccatcaagcgggtggcggcattgctgcgccagcggcgcccggcccgggtggtgtggatgggccacgccctgccgaccctggtcgaggccaccggcacccacaaggacgacctgatccgtttgatcgacggaaccgagtggtggtggatatcggatcaggcagtgccgcccgacctgcccggccagtgcggagcggaactgaaagcgggcggactgacgttcctggccagcccgaccagcggccgcttgcccggcgaggtcaatgccggcctgtcgccgcaagcctcgtgcgatggcgccacatattcttgctatgtgctggacggccgccgcctgattctgccggccttcggcccgcgcccggatggcgggtgcgacgtgatgagcccgccgatccagtcgttgttccgccgcccgttccaggtgctgatgctggcgggcgggcgaatcctgacccggccgcgatcgcgcctggacggcgccaaaccggcgacgagcggcggcggcggcaggcgattgtcgctgttcggagattccgagccatgagtgaacgtccggtcctggtctggctgcgccgcgatctgcgcctggccgatcaccccgccttccaggccgccgccgcccgaggcccggtcatcgccgtcgccatcgacgatccgtccgccccctgggcgccggggggcgccagccgatggtggcgccatcacgccttggacgaactgcgccgcaacctgggcggcgccctggtggtgcgccgcggcgacaccgtcttgcaactggcccggctggccgccgaatgccaggccaaggcggtgtgctggacccgccacccggaaccgcacgaacaggcggccgaggcggccctggccgccgccctggacggcagcggcaccgaaccggtcgcctgccccggcgacatgctgtttgcgctgggcgcggtcaccggcacccaggggcagccgctgaaggttttcaccgccttctggcggtccgcccttcgattgccggcgccgccggcgccgcggccgacgcccgccttgcgtcatccgtccagcctgccgcccggcgacgatttgccgccgctgcccagtccgcgctggtgggacggcctggcccgcacctggctgccgggggaagtccaggcccaggcccgcctgaatgatttcctgtcgaaccggctggatggctatgcaagcctgcgcgaccggcccgatcgcgacgggacctcgggcctgtcgccccatctggccttcggcgagatctcgccccggcaggtatggcacgccatccaggcccgcgccgccagcccgggggccgagactttgctgaaacaactggtgtggcgcgagttcagccgtcatctgctggcccgccatcccgacctgcccgaccggccgctcgacctccgtttcgcccgctttccgtggcgcgaatcggcctccgatttcgccgcctggagcatgggccgcaccttcatccccatcgtcgatgccggcatgcgccaattgtgggccaccggctggatgcacaatcgggtccggatgatcgtggcctcggtcctggtcaaaagcctgatgatcccgtggcagcagggccaggcctggttctgggacacgctggtcgatgccgacctggccaacaacgccgcctcgtggcagtgggtggccggtagcggcgccgatgccgccccctatttccgcatcttcaacccgatcctgcagggcgagaaattcgacccggccggcgattatgtgcggaactgggtgccagagctggccgatttgccggccaagctgatccatcggccgtggctggccggtcgcccggccccgatcgtcgatctggccgccgcgcgcgagcgggccttggccgcctatcgccggatttagttcccctattcgccggcagccaggcggtccagccggtcgcgatccagccggaagcaattggtggacacttccgtcaccacaccctggcgcttgaagtcggccaccgcccggctggcggtttcggtggtcagcgacaagatggcgccaacatcctcgcgcccaagcaggcggatcggctcttcgccggtcaggttggccagatgcaggaacagacgggccagccgctggcgggcggtgccggtgttcaggtcggtcagccattcgtcggccagcttcaaggattgcgaccatttggccatcaattgacggtgcaggcgcggcgtctcgcggttcagccgctcgaccacctcgcgcggcaggcggcagaccagggccggctgcagcacctgggccgaatgctcataggcgccgccggccagaacctccagcccggccaccgaccccgatcccagcaggcgcacgatgcgctggccgccgtccggcatgtattgcatcagcttgatcagccccgagcggatggtataggcggcgacgccgtcgtcgccggcctgatacagaaagccgccggcttcgatcagcacctcctcgatgggaacgtggatcagttggaaatcggcctcttgcaggtcggcgaacagcaccaggtcgcgaatgccgcaggtcttgcactcggccttgcccagccaggcggcatcgatctgcccgcgcttcattcccggctctcccgcttgatctgttgtatcagccgctcgattccatccagaaagcgcgagcgatcctgccgggtgaagccagccgggccgccggtcaccgcgccggtctcacgcaaatccttcatcaggtcccgcatcgccacctgcatgccgatggaattgtcgtcgaacacccgcccgcgcggatcgatggccttggccgccttggccagcgcgcgggccgccagcggaatgtcggcggtcaccaccacgtcgccctgttcggcccggtcggcgatgacgtcgtcggcggcgtcggccccttcgggcaccaccacctgctcgaccagccaatggtcgatccggtgccagcggttggacacgatcaacaccggcagccggtggcgatcggccacccgcagcacctcgtccttgaccgggcaggcatcgccgtcgatgagaattcgcatggtccccacaccatagacgcatggcggctcggtgacaaatgtcactgaagcgcaagcaaatatgcgttaaacctgatgtcgggacaggaggaccaggacatcaccatgaacgcgcacatcgaccccagcaacgtgcccgtgcgtccgcgcacccagggcgaggttcccttttaccgcgagaagggccaggcggtcccgcgcgccgtcaagggggtgttccgaagcttgaaatggtgggccggcatcgtcttgctggcttggtggtatctgggtccgttcctgcgctgggaccgcggtcccgacgcccccggccaggccatcttgctggatatggccggacggcgggcctatttcttcgacatcgaaatctggccgcaggaagtctattacgtcaccggcctgttgctgatcgccgccgtcagcctgttcctgatgagcgcgctggccggccgcgtgtggtgcggtttcctgtgctggcagaccgtctataccgacctgttccagaatatcgaaaagtgggtgatgggcgaccgtaccgcccgtatcagcctggcccgcgccccgatgagcgccgaaaaggcggccaagaccgccatcgtggtggggtcgtggttcgtcatttcgctgttcaccggcctggccgcgaccttgtggttcggcgacgccttccagcagattcgcgacttcttcaccctggatgccgatccggcggtctatctgttcaccgccatcatcggcggcttctgcttcctgctggccgggttcgcccgcgagcgggtgtgcgtctatatgtgcccctattcgcgtttccagtcggcgatgctggacgagcattcgctggtggtgtcctacgagacctggcgcggcgaaccgcgcgccccggccccggccgacctcaatttcaccggccgcggccattgcgtcgattgcaagatgtgtgtccagacctgcccgaccggcgtcgatatccgctggggcaaccaactggcctgcatcggctgcggcatgtgcatcgacgcctgcgaccaggtgatggaaaagttcggactgcccaagggcctgatcagctatgattccagcgcccgcctgcatgcccgcgagcacaagaccgaagcccccggcttcaaggtgatccggccgcgcaccctgatctatggcggcctgctggccatcgtcgccgctgtcatgctgaccagcctgctgacccgcgagaccaccaccgtcaacatcttgcatgagcgcacgcctttgttcatccagatgtccgacgggtcggtgcgcaacgcctatgtctacaaggtgctgaacatgatccgcgaggaccgcgtctacaccctgcgggccgagggtctgcccggcctgaccctggaacgggtcggcggcaccggcaagggccaggaactggagctggcggtcgacaaggacaccgtcgggaccttccgcctgttcgccacggtgccggaatcggcactgaccggcaaaagcgccaccatcaccttcgtcctgaccgagaaggacaaggccggcaagccgatcaggaatgaatcgctgttcgcgggaccggggcggtaacgcccagagcggatcgtaagaccgggggtaatgtcccggtcttgccgcggccggcttttttcaccacactgctaggccaaccaacaaaggaggaccgtcgcgatggccaccatcacgctgaagggcaaccccgtcaacaccaatggctccctgccggccatcgggtccaaggcgcctgatttcaagctgaccaagaccgacctgggcgattgctcgctggccgatttcgccggcaagaccgtcgttttgtcgatcttccccagcgtcgatacgccgacctgcgcgaccagcgtgcgcaagttcaacgccgaaatcgacaagctgggcaacgccgtggtcatctgcgcctcggccgatctgccgttcgcccataagcgcttctgcggcgccgagggtcttgagcgcgtggtgtcggcgtccgacatgcgtgacaaggcgttcggcgagcgctttggaatcaagatcgtcgatggcccgctggccggcctgctggcccgcgcggtggttgtgatcggcgccgacggcatcgtcaagcacaccgaactggtgggcgaaatcgccgacgaacccaattacgccgccgcaatcaaggccgtcaccggctgaggcccaaaaaggaatccccccggtccttgcgggccgggggtaatccttcgattggataaccaatggtaatccaacttaccgtggttctcctaccgactcccaagcacagcttttcattgcacccctcataagtcaagatgcattcacgcactcgacttatggaggtgttcgtggatgtatctgcacgccagctcggcatcgacctgggaattggaacctgcggctgggccttgctggccgaggacagcctgatcgcgctgggcacgcgcaccttcgacgtgcccgaaaccgacaaggaacgcatccccaccaatcagatccgtcgccaggcccggggcatgcgccgggtgatcgaccgcagacggcagcgcatgaacgctgttcgccgcctgctggccgaccatggccttctggccgatggcggcaagcttggcctggccaccgtccgattggacccgtggcaggcgcgcgccgaggggctggaccggttgttgtcggcaggcgagttggcggtcgccttggggcatatcgccaagcaccgcggctttcgctcgaactcgaaacgcgaccggggcgccaacgcacccaaggaatcgagtgccatgctgggcgccatcgcccagaccggcgagcggcttcaacactggcggaccgtcggcgagatgttctggaaagacgagttctaccagacccggcgccgcaatcgcgacggcgactattcccgcacggttcagcgcttggacctcgagaccgaggtgcaccgattgctggccgcccagcgtcgattgggaaatccgctcgccaccttcgacctcgagcaatccttcatcgacgtcgccttcttccagcgccccctggccgattccgacgacaaggtcggcccctgcccgttcgagccgtccgaaaagcgggccgcccgccactcgccgtcgttcgaacgattccgcttactgtcccggctggcagcgctgcggttatcgtccggggccggagaacgcccgctgtccgatgccgaattcgccgccgcctgcgccgatttcggccgccttcagggattttccttcaaacgcctgcgccagcacttgaagcttgatccgtccatccgcttcgccggcatagcgccggacgaggaaggcaagcgcgacgtggtggcccgctcgggcgaggcgacgccgggcagcgccgccctgcgccactgcctgggggacacggtgtgggacaacatgctgggcaccaggccggccttgctggacgccatcgccgccatcctgaccttccgcgacgatgccgaccgcatcgccgagggattggccgggctgggaatcgaggagccgatcctggacgccctgatggatggcgttcgcaacggaagcttcggtaaattcaagggccccggccacatttcggccaaggcctgccgggcactactgccccatctggcccggggccgggtctattccgatgcctgcgccgatgccggctacgaccattcccgccagaccgagaccaatctggacgacatccgcaacccggtggcccgcaaggccctgggcgaggccttgaagcagatcaagatcatcatccacacccatggccgcccgaccgccatccatgtggaaatggcccgcgacatcggcaagtccgccgatgaacgcgacgagatcaagaagggcatcgacaagcgcaacagcgagaaggaccgcgcccgccaacagttccacgaaatggtcggcacccccgccgcaggcgccgaggacctgctgcggttcgaactgtggaaggaacagaacggctggtgcctttacaccggccgggaaatcccgatcgacgcgctggtctcttccgataaccgcatccaggtcgatcacatcctgccgtggagccgttcgggcgacgattcctacatcaacaagaccctgtgcttcaccgaggccaaccagcacaagaaggggatgaccccgtgggagtggctgcacgacgaccctgaacgctgggaaaagttcgcccgcaccgtcgaaggctgcaagaccatgaaggggcgcaagaagcgcaacctgctgctgcgcgattccagccggctggaaaaggaattccgctcgcgcaacctgaacgacacccgctatgcctgccggctgctgctgggcattctgaagcacacctatcccgatatcgtcgtagccgcccgccccggcccgctgaccgaccgtctgcgtcgcgcctggggactgcaatccctgaaaaagcacgaagacggcacccgcaaggacgacgatcgccatcacgccctggacgcggcggtggtcgccgccaccagccaatcgatgctgcagcgattgaccaccttgttccagaaggccgagcgcgaggggggccgccgcgacttcgtcggcctggaaccgccatggccgggatttcgcgccgatctcgaggccaagctggaaggcgtcgtggtgtcgcgcgccgaacgccgtcgagcccgtggcgccggccacaaggacaccatccgcgccatcggcgaaggcgatgccggtccggtggtgtacgagcgcaagccggtcgcggcattgaccgaaaaggacctggaccgcgtcaaggaccccgagcgcaacaaggtcctgatcgagaacctgcggcaatggattgccgccggcaaacccaaggaccccgacaaggcccccagatcgcccaagggcgatccgatgaccaaggtcaaactggtgaccaccgacgatgtgcggatcctggtccgcggcggcaccgccgaccgcggcgacatggcccgcgtcgatgtgttccgtcaggccgatcccaagggccgttggcgctttttcctggtaccggtctatccccatcaggtgttcgaccccaccgactggccgcagccgcccaaccgggcggtggtcgcctacaaacccgagaaggaatggacggtcatgggaccagaccacgaattcctgtggagcctgtacccgttctcatggatcgccgtcgagaaagccgacgggacgcggatcgaggggtacttccggggaatgcaccgttcgaccggggccatatcgatttccccacaccacagcaaatcccttgcatcaacgggcatcggcgccaagaccctggcatccttccgcaagttcgccatggaccgcatgggcaatttgagcgaaatcgaacgcgaggtgcggacatggcatggcgtggcctgcacataagccggccggcccggctgtccctggccgacggccagatcgccatcgaacaggaagacggcatcgtccgcctggcgctcgaggacttggcctgggtggtgctcgacaccccccaggccagcctgaccgccgccctactgtcggcctgcatggaggcgggcgtcgcgctgatcaccaccgacgccacccacatgcccaacggcatggccctgtcgttccacgcccatcaccgccaggcgcagatggcgtggcggcagatcgcggtgtcggccccgttcaagaagcgctgctggcaggcgatcatccaggccaagatcgcccatcaggcggcggtgttggccggtcgcgaccctgacgggtcagacacgctggcagaaatggcccgccatgtcggatcgggcgatcccggcaatgtcgaggcccgcgtcgcccgcttctattggcagcacctgttccccgattttcgccgcgaggccgccgccgaccgccgcaatgccatgctgaattacggctatgccatcctgcgctcggccctggcgcgctccctggtggccagcggcttgctgccggccttcggtctgcaccacgcctcggccaccaatcccttcaatctggccgacgacctgatcgagccgttccgcccgctggtcgatagactggtcgtgggtttggccaccccaccctgggaccgcccgctgaccatcgacgaccgccgcgccctggccggcgtactgctggaaagcacctgtatcgacggcgacgccgtcaccgccttggtggcctgcgaacgcgtggcagccagcctggtccgcgccatcgacaccaaatcgcccgacgccttggccctgccgcaggcaccgccatgaaaaccgaggaggttcgcctgatgtggctgttcgtcttcttcgacctgccggtggggaccaaggatcagcgccgcgccgccacccgctttcgcaatttcctcaaggatgacggctatctgatgctgcaattttcggtgtatgctcggatttgccgcggcgaggaagccatcgacaaacatttggcccgggtccgcaagaatttgccgcgaaccggtagcatccgcgcccttcaagtcaccgaccgccaatatggccgcatgtatctcatgctgggagacgccccgaaaaatgaaaccgtcgcccaacgccagctggttctcctctgatttcggccccacaaagggggcggaaatcagaggattttcagagccttgccgtgaaggtagcctaccatcagggagtcggtaggggaaccacggccagccgccatacgagccgaaaaggagaaaaagcctaccatcagggagtcggtaggggaaccacggcttgatggtgatagtgacggtgccggattcgagcctaccatcagggagtcggtaggggaaccacggccctgcagatgatcggcccgctcgtccccggagcctaccatcagggagtcggtaggggaaccacggctgccttgcctatgacaagcgaaaaccccgcagcctaccatcagggagtcggtaggggaaccacggctcatcgcagagcggtgcgatgtccgcccacagcctaccatcagggagtcggtaggggaaccacggctgcttcggccgcagactgcaggcactgccgagcctaccatcagggagtcggtaggggaaccacggcgccgcctgaggagcggcgacgagtgccttgagcctaccatcagggagtcggtaggggaaccacggccgggccggggggaggcccccaaccatacgggtggatttttagggttaaataaacatatttggtgtaaggacattacccgacgacacgacgttcggggcagaccttccatgttgattcgcaccattcgcggcaagttcaccgccattggccttgccgttctgggcgtggccacgctgatgacggcaaacagcctgtggaccgccgagaagatggaggtcggcgtcgaggaattgtcagacgcagcatcggcactgcgcacccagatgaccgccgacatgatgcacgacgccctgcgggccgatgccttcgccgcactgtccatggccgaaatcggcgacgccgccgaccagaaacatctgcgcgaagaccttgccacgcatatcgagcaattcaccaaaagcatcgaagccaacaagtcgatgcacctgcccgacgacatcaaggccgcgctgagcagcgccgacaaaccgctggccgcctatgcccaacaggtccgccgcaccgtcgatctggcctttaccgaccgcaaggcggcgctggcctcggtcggcgagttgcaaaagtcgttcgacgaccttgccaccgcgatggaagccatttccgacaagatcgaggcccacgccaaggacatccatgatggcgccgacgccgcggccaaccgggccttcgccctgggcctggcaacggcaggattcaccgcactgatcctggcggtggtcggcctgttcacccgtaactcgatcctgtcgcccttgacccgcatcaccgcctcgatgaaagccctggccggcggcgacctggaacgcccgatcgccgaccttcaacggaccgacgaagtcggcaacatggcccaggcggtcgaggtgttccgcaacaacgccatcgaggtgcgtaaactgcaggccgagcaggccgagcagaagcgccaggcccaggccgcccgtcatgccgccatgaagcagatggccgacgccttcgaatccagcgtcggcaaggtggtgcagaccgtcacctcggccgccaccgaattgcaggcggcctcgcagcaactggccgcctcggccaacgaaaccagtgcccaggccaccaccgtcgcctcggcggcgcagcaggcctccagcaacgcccagacggtggccgccgccaccgagcagctgtcggcctcgatcgccgaaatcgcccagcaggtcgagcgttcgcaggcggtcgccacccgcgccgagaccgaggcggaacaagccaccggccagatccgccatttgtccgacgccgtcggccagatcaacgagatcgtcaacctgatcaacgccatcgcccaccagaccaacctgttggccctgaacgccaccatcgaggccgcgcgcgccggcgatgccggcaagggcttcgcggtggtcgccaacgaggtcaagggactggccagccagacggcgcgcgccaccggcgagatcgccaaccacatcaaggccgtgcaggaaggcaccgcgtccgcggtgcacgccgtcgacagcatcgcctcggtcatcggcgagatgaacgagatcggcagttcggtcgccgccgccgtgcaggaacaaagcgccgccaccggcgagatcgcccgtaacatcgaacaaaccgccgaaggcacgcacgaggtgtcgtcgaacatcggcaccgtcgaacaggccgcccgcgacaccggcggtgccgccgagcagattcacacctcggcgtccgacctgtcccaacaggccgagtatctgcgcgccgaggtccggcgcttcctcgaccaggtccgctcggaccaggacgaaatcaccttgatggaatggaatgccgattacgataccggcgaccaggccgtcgatgcccagcaccacgccttcttcgaccacgtcaacaagaccttcgcggcgatgatgggcggtgattcctctggggtgaccggtgccgccatcgccgacatcgtggtcgagatgggcgaacatttccgcgaggaagaggcgctgatgagccgccagggctatcctgccatcgaccaccaccgcgattcgcatcgccgtttcctggaacaggccggcgccctgaaggccgacatggaagccggcaaggacggggccgtcaaccggaccttcgaatatctcgcggcgtggacccgggaacatttcgccaaggacgaccacgacctggcgctgttcctgcgccaagccaaggcggcatagatcatgctgcgataggatcgcagcatgatctcggaagatacgccggtcaggtgatcccgaaacgcgacaggcattcggcgagatcgtcgccgaattgcggccccttgcggatcagcgccgcgcgcggcggcaaaccggccagcttgggatgtccccaggcgtagctggtgaacacggcgaacggaattccctgggtcaccggcatcgccgacagggcgcagcccagatcgacgccggaaaggctgcccagctccatcgaggcgaccaccatgtcgggcttggtgtgcaccaccatttccagcgcttcgaacggattgcgcaccaccgaggtgcgatagccgcaggcggccagctcgcgttcgacgatccggctcatggccttttcgggcaccaccagcatgacctcgatattcttttggacgatcgggccgaaatcgatgtcgacggcgcgcttggccggcaaggcgcgagccaccgccggcatgtcggcaccggaatcgtcgccgtcggccagcttgtcgatgcggtcgatatagacctgaatggcgtcaaggtcgccgtcgcccagaaccttcagatcggccagatattcgtcaaggcggtgggtcaccagcttgatcagcggcacgttcagggcttgggcattgctgcgcaggctgctggcgtcgcgcttcaaggtggccaggccttcttcggcggtcacgcttttcgagcgcaagttccccaagagaacctgcaaggcgctggcagtatcgcgcagttcctcaaggaactcagcgatgacgcggcgttcattttcgttatcgacggcatcaaaagcggacattcactcccccgaactcgaacgaatcccagggatcttctataacacggccaaggcccgggtgtcctgccccagaattcaccatgccgcagtccggaaaacgcgggccacgcccgctcggctcagccgcacgcggccttgcaattgggcttacccctttcggcctggatcatgtcggccagggtatagcggtcgagcgaggtgaagaacgcatcgagcccttcggaaaaagcgtgacgggcgacacacgaggaatcgagaaggcaagcctcgtccggcgcgtcgcgcatgcaacgggccaaggcgaaatcgtcctcgacctgacggaccagttggccgatccgaatcgaggccgcatcgacccgaagacgcacaccgccatatttgccgcgcaccgtctcgagatagccggcgcggcccaactgatgaaccaccttggtcagatggttcttcgagatcgcatgttcggcggcgatgtcgttgatggtggtcagtgccccgggccgaaggcccacgtgaaccagaacccgcaaggcatagtcggtatgcaatgtcagacgcataatcccgccattcgctttcccccgcgttcacagccgcgcgatcttctattagttgaggtgtgcggtcaatgccaagatcggcatgccacccatgcggtagaacgattccagcatccatagaacctttctttgtggtgcgtgcagggatacaacagaagaagttgccagtgctgggggacggtggtgtccaaagtcgtgccgtatctctggtccgcgtgtgtcgcgttgatgggctttttgtcggcggccagcgcccccgcgcgcgagctgcgcgtcgccgacacccatccccaggcctatcccacggtgcaggcgctggagcatatggggcggcttttggccgagcgctcgaacgggcgcctgaccctgaaaatctttcactcgcgcgttttgggggaagaggtcgaaaccatccagcaaaccttggccggcgcgctggagatgacccgggtcaacctgacgcccttgaacgccaccattccggaaaccatcgtcgcctcgctgccgttcctgttcacctcggccgcgcatatgcatcgggtggtcgatggccccgtgggagccgagatcggccgcgccttcgaggcgcatggcttcgtcctgctggcttattacgattccggggccaggtccttttatacccacgacaagccgatccagcgcccggccgacctcaagggcttgcgcatccgcgtccagcaatcgccgctggccgaggcgatggtggcggccttgggggccaggccgacgccgttggcctatggccaggtggcggtggccttgaagacccggctgatcgacggcgccgagaacaatctgccatcctaccatgacgccggccactatctggcggcggggcattacgccctgaccgaacatgtgatggcgcccgaggtcttgatgatgtccaagcgggtctgggaccagttgccggccgccgaccgcgccctgattcgccaggccgccgccgattcggtccccgagatgcgccggttgtgggccgagcgcgaaaagatcgcggcccgggccttggccgatgccggcatcgtcccggtcgcggtggacaaggcgcctttccaggccgccatgcggccggtctatgaccgctttgcggcaacgcccgccttgaaggacctggtgcgccgcatccaggcgaccagataggcggcgccatgggaaaacccctcgccatcagccactggatcaggttcttgccgatcagctggcgcatcccgctggtggtggggctcaatgccgtggtggtgatcgccatcgccctgctggcgtggcaaggtgcggcactggtgggcgccgacattgatgagctgcgtctggtccagggccgcatccaccagctgaccgcgatagacgcccagtccggccgactgcaaagccagatccgccaatacctcaacacgccttcggacgaagcgctgaaggacatcatccgccgttcggaagatttgttcgccgccctggccgatcccaccctggcccaatccgtcggtccatccgagctgacgcaaatcaccgacgcggctcggcggttcgtcgccggctttcagcgcctgaaagcgatcaacgcggaaatcgctcgcatctacgaatccgacatcgtgcagtcggccaaggagctgtcggggctttattcgatcctgaacgcctcggtgcggtcgcggcccggcagcctgctggaaccggccctggtcaagtcgcacgagcatttcgtcgaagccctgatcgccgtcaacaccttctacttcaccggcgatcccgcccaaggccgcccggccagggccgcgctgggccgggtggccgaaacggtgccgatcctggtcgagctggccgccaccgacctgcagcgcgattcgctgcaggtgatcggccggcgtctcgccaccatcgacgccgccacccaggccatcgccgacacctatggcctgcgcgcggctaccctggccaacgaggtcgattccaaccaggcgacgatggcactggtggtcgaccgcgtcgtcgcccagggacacgaccgagaggtcatgctgcaaagccagtcgaaagggctgctggtccgcgttggcctggcgggtgcgatcttgggcctgattttgctggtggtgggctcgatcgccagttggagtatcggccaatccatccgtcagcccttgcagcgtctgcgccaacgcatggaggccggagcgcgcggcgactggagcggcgagatcgaaggcgccgacctgcccgacgaattggcggcgatggcccgcaccgtcgaggtctttcggcgcgacgccctggccaaggcccgcctggagaccgaacaagcacgtgaccttgcccgcgaggccgaggccaagcgccgcaccctgcaagatcttctggtccagatcgaggtccacgagcacggcgcccccttcgcccggccgctggtcccggccgccgtcagcggcgagaccgccgagatcgccgcggtcttcaaccgcgtgctgtcgaaattccaccacgccacccgcgatcgcgacagtgccatccgtgaactgacccttgccaaggaagcggccgaggccgccaaccaggccaagtcggcgttcctggcggcgatgagccacgagatccgcacgccgatgaatggcgtcgtcggcatgctggaagtgctgacccattcgccgctgtcgcccgaccaggccgaattggtggcgaccgtgcgccagtcggccctggctttgctgtcgatcatcgacgacgtgctggattactcgaagatcgaggccgggcggctggaactggagacccgcgcggtgtcgccggcccaggtgatcgacggcgtcatccagaccctgaacggagccgccgccaagaagggtttggtgctggaagccttcgccgacccggcccttccggcgcagatgctggccgacccggccaggctgtcgcagatcctgttcaatctggtcggcaacgccatcaagttcaccgagcagggcctggtccgggtcttcgcggtccgcaccgaccacgcccagggccgcgtcggcctgtgcatccgtgtcgtcgataccggcatcggcattcccgacgacgttcaaccgtctctgttccggcccttcacccaaggggaatgttcgagcacccggcgattcggcggcaccggcctgggcctgtcgatcacccgtcggttggtcgacctgatgggcgggcggatcgccttgttcagcaatcagggccagggatcgaccttcgtcatcgatctcgatttcccggtggtcgtcaccgacgaccaggctccgccgcccccgatcgacctgatgggggtcagggtgttggtggtggcccgtgacgccgccgaacggaccatgatcgcccgcgccgccgaggaagccggcgccgccgtggtgcgggtgtcggaaatggccggcgccctggccgcctcggccaaggcggccaacacccgggcgccgttcggggtggcggtgatgaccctggaaggcagcgatctgggcgaactggccagcctggcgaataccccgctgctgctgatccgcgacagcttcgattcccccgacgattcggtgctggagcgtcttccccgctgccggggcttcctgggccggccgatcgatccgcacgcggtgacggcggcgatcgccacggtcaccgactgccacccgatcggcgccgccacggcgccgcccgaacccgcggccttcgccccgccgcccgacaccggactgtcgattctggtggccgaggaccacccggtcaaccagcaggtcatccttcgccagctgcgcattctgggccatcatccggagatggtcgcagacggcgccgccgcccttgaaatgtggcgcagtcgcaagttcgacctgatcatcactgactgccacatgccggtgatggacggcctgcaactgaccgccgagatccgcgccgaagagctcaagcacggcggtcgcatccccatcctggcactgacggccaacgccctgggcggcgaggcagaacgctgcatcgccagcggtatggacgggttcttgaccaaaccggtggacatggcgcaattgcgccaggccctggcccttctcagcgcggccggttcgcccaatccggcggagccgcaaatatgaagccgtcgcgtctgtcgctgggacttgccaaggccaaaggctggcttggccattcgcggctggtattggccatcctggcaccgatggtggccctggtggtcttctcggtgatgatggtcaacgaccgcctgcaggattatcgccgcaattcggacctgctgaaggtggcccaactggcccgttcgtcgcgggcgctgacccgcgaactggaagccgagcgcagcctgtccacccaggccatgagcggcctgtccaccgcgtcggttcccgcactgatcgagcagcgccagcgcgtcaacgagcgcctggccgagtatcaggggctgacgcagcactcggcgacgggagctggcgccgcctcggagacaaggctgccgaccgagttgatcgaccgggcgcgcgccgccgtcgatggccatggcgatttgcgcaccgtcatcgagaattattcggtactcgtcgccgcggcaacccgggcggccgagaattccgtaccgctggaactgaccaacctgatcgccgcctatatggacctggg

SEQ ID NO: 4286 - DNA, 20209 bp, synthetic construct
  source 1..20209: mol_type = other DNA
  misc_feature 1..20209: note = Synthetic
gccgcaatcaaatcctgatccaccggcccgaacgcatgcggcggcaattgcgccacaaatggcctccccggatgctcatgaaacgcaaactcaaagcgctctgccgcccgattgaaaataatctgccggcgcgccggattgcgatccgccgcatccaccacaaacgcaatttcccccgccacgctgaacgccaaccggcgcgacagcacatccaaatgactgccataaaaaatctgcaacgccaccgcttcggacaaaatcagcggcaccagcacaatcaacaacgtccgcccaaacaaactccgcggcagcacccgccgtaaaaaccgctccggatcaacccgctcggtgcgcagccgcaccctcaggcccccggtttcaaaatataaccccgcccccgcaccgtctgcaaaaagcgcggctcacgcggatcaatttcaatcttgcgccgcaaccgcgtcacctgcacatcgatcgcccgttccccggtctcatccatgcccaataattccgccagcgcctcgcgcgacaaaatctgatgcgggcgcgccgccaacgccgcgagcaaccccgcctccgcgccggtcaaccgcacccgcccgcgcggcgtcaccaactcgccgcgcgccgcatcaaactgcgccgcccccagctgcaccggccccaccaacacactcggcgccacccgcctgcgcaacaacgcccgcaaacggagcaacaattcgcgcggatcaaacggcttggccaaataatcatccgcccccgcctcaaaccccgcgatccgatcctccggcgccccgcgcgccgtcagcaataatatcggcaatgacggcgcccgatccgcgcgcaaccgctcggtcagctcaagcccggtctcattctccatcatcacatccaacaccagcacatccggatcaatgctgcgcaacaaatcccgcgcctgcgccgcactcgcggccaccgtcaccataaacccgtgctcggtcaaataccgcgccatcaatttgcgcagccgctcatcatcatccaccagcaacacatgcccctgctcgggcatgatcggctggattgccatcagcgctgaccctgcgtgccttctcgacgcttaccatcccggcgcgccaattcccggcgctccaaatagtcccgcgccggcggcttcatcaatcctagcaacacccgccgaaacccctcgaccgccggcccgccggcctcgcgaaacgccgccacaaaccgctcgcgctgcgcctcgaataattgccgctccagcgccacccccgccgcggtcaaattcagcaaacgctggcgccgatccacccgccccggctcctggctcacataaccctgcgcgatcaatggccccaacacccgcgccaaactctgcttggcaatccccaaaatctccaataattcgcccaccggcatccccggattgcgcccgatgaaatgcaacgtgcgatgatgcgcccgccccatatccaaccccgctagaatcgcatccggcgccgcgactagatcgcgctgggcaaaaaacagcatgtcctgcgccaaacgcaactcttcctcgcgcaaaaacaacagcccggcgggcaaaccggcttgagcagatttatcttgcatggcatccttactcctctaatgatccgattatcaacaattcgcctcctgtgataagacagcttttacgacctttaacacctcgaaatcaatcacaaggccgcccacccgtaacgaatgcccaacaatgaagcccaaccatgaggaacttccgatgagcttgatccccttcgatgaccgcgatggcaccatttggtgggatggcgcgctaatcccctggcgggacgccaagctgcatgtcctctcccacggcctgcattatgcctcggcggtctttgaaggcgaacgcgcttattcgggcaatattttccgcctgcgcgaacacaccaaccggctgatcaattccggcaaaatcctcggctttgacatcccctataccgccgatgaaatcgatgaagcctgcaacgccgtgctcaaagccaataatctgacggacgcctatatccgcccgctggcttggcgcggctccgaacagctcgccgtctccgcccaaaaaaccaaaatccatctcgccatcgccgcctggccctggcccaatttattcggtgcggatcggatgaaaggtgtgcgcctcggcatggcccaatggcgccggccagacccgcgcaccgcccccaccgcctcgaaagcggcaggcctctatatgatcggcacgctctccaaacacgccgccgaagccgaaggcttcgatgacgcgctgatgctcaccctcgaaggccatatcgccgaagccaccggcgccaatatcttcatgaccatcgatggcgcgctgcacacccccaccccggaaagcttcctcgatgggatcacccgccgcaccgtcatggcactcgcgcgcgcgcgtcaaatccccgtgatcgaacggcgcatcccgcttgaggatctcagccgcgccaatgaagtgttcctcgccggcaccgccgccgaagtcaccccggtgcgcgccatcggcacccacagcttcacccccggtgccatcaccgaaaccctgatcgcggattacaccgccctgatccacatgtcgcccgaggaagttgcccggcgcgccgcatgagcgcgcctcttaccaaccaagagcgcgcggcgtgagcgcgcctcttatcaacaaagagcgcgccgcatgagcgcgccacttatcaacaaagagtgcgccgcatgagcgcgcctcttaccaaccaagagcgcgcggcgtgagcgcgcctcttatcaaccaagagtgcgcggcatgagcgcgcctcttatcaaccaagagtgcgcggcatgagcgcgccacttatcaacaaagactgcgccgcttgaggcgcgcccggcgatgaccgttccgcattttaccgaccacgcggccaatgagcgcaccttcctcgcctgggtgcgcaccgccatcgccgtgatggccttcggcttcctggtcgaacgcttcgatatttttctcaaaatcgccggccaatcgctgcataaatcgattaatctctccggtcaggtcacctccgccctggtcggcgtcggcctgatcatcgccggcgcactgatggtcgccgccgccatgatccgcttcgcccgcaaccgggccgccatcgagagtgacgcgcccaccccaccgcaatccgcccggctcgacctcgcgctcgccaccctcatttcgctcctcggaatcggcctcgccgcctatctcggcctgaccatgctgcacggcacccatccatagccatccgcgccctctcagcagcgcgacgatcttgcgtaacattgccccgttccgcaattttacaccgaattaatcccccagcaagaaccaatcttttgtttttaatttttggctaaaattcgcacatcagcaatgcaaaaacgccttgcggaacccggcatcgtcataaatactactgtaacaatgtcagcgcggggcgttttgcgttaattctaacgaatgaaagtaatctggggatgactggacttggctgtcaaaaactaagcatacgcgttttcttggcgatcacctgctcgttactgataacggcgcacgcagcggcacaaacatcaacacaaccgattaccatcccgcttgatatcatcaccgaggccgcaggtggccaaagctttgatcgtctgggcatcaatgtcggcgtcaatggcgcaaccccggaagaatatattttcgacactggctccaccgccttcaacatcgatgtcggctccagccctaacggccagccctggttcccgatcatccccggcgtgccgatcacgcccaccgtgcccgcgatgaatctctacggtaacggcacctatggcaatctgggtgccaacagcaccatcggctcgatccaattctataattccggcagcggctcccaagccgccagtttcgctaacaatcagggcatcccggtcctgatcaacaccggcaatgtcgcaacgacagcctcactcgccggcgacaccgcaggcgcgcaagtcggttactatctccccgccatcggctatggcctgaccttcaacgagatcaataataacgtctttagtctccccgccagcgatttcgttggcgaaatcccaatgtattatgacgcgacctggcaagccaacctgaacgccggcatcggcccggaagatggcggcggctataatctgttcggcattttcggtgccggcccgttccaaagcaacagcgtgctcggcaacctcaccaccaccggctatgtggtgtccgccaattccgagctgaacggcccgcaaagctgcaccgcctgcggcaatgtcatcctcaatctcaacgccgccgtgcgcgcccaattcatcagcctagtcccctggaacgccgcctccaccagcaccttcccgctcagcaatgccccggtcgatgccaaccagttcgacctgaatttctcctacacgctcgatctatctgaacgatcaaggtctgctcaccacccaaaccgccgccggcaatgtcaatcaatatggcgatgaagtccccggcgtgaaactcaccatgaccggcaccggcgcgggcgatcaaccaacctccatcctcaccggcaatgattcctccggcgattacagcaacgtcaccacccccggccccgatggcttcaccagtcaaggccaggccctctacggcatctcgttcttcttcaataattcggtgatgtatgatctacaaaaccaagaaaccggctacacccccttctacgtgaccgacacgccgatctcgaccaataatggcggctacaccatctcctctgccatggcagcccaagggatcgccggcgtgatttccggcaccggcccgctcagcatcaccaccggcggctcagcccagctcaccggcaccaatctctataccggggcaaccaacatcgcccaaggcggctggctcggcctcgccgggcccggctccatcgccgcctcctccggcgtcaatgataatggcatgtttgacatctcgcgcgtcagcgccatggcccaaatccaatccctcaccggcaccggcaccgtcgccctcggcgcgaacacgctcgaactcaccaatgccagcggcgccttctccggcaccctcgctgatggcggcctgatcggcggcagcggtggcagcctgatcatcgccggcggcgccgaaaccctctccggtgccaacagcttcaccggcagcaccggcatcagccccggcgcgcaactcgccctcaccggctcgctcgctggctcggtgatcgatgcgggcctgctcaccggcaccggcagcatcggcaacggcctcgtcgtcgccaataccggcatgatcgcccccggcgccgctcccggccagttccaaaccctgtcagtatcaggcaattttctgcaaagtgccggcagcacctatgtcgcctatttcaaccccgcccagcccggtcaatccagcaaaatcgtcgtctccggcgtcgccgatctcggccaaggcgcgatcctcgatgcgatcccggtcggccagatccaaccctacaccctgtcgcgcttcgcggtgctggacgcccaaggcggcatccaaggcaactacacattgctgaacagcgcactcaccgcctcgctcggcctcgaactggtcgatccaccgcagagcctctatctgcaaatcgtccaacgccgcagcctcgccagcttcgccaccacccgcaaccaggccgccaccctcgccgggctgaacagcacgcccagcactaacgccaccttcatcgccgtcaccaatctcatgaccggcgcgcaaatccaagccgccgccaacgaactctccggtgacatccacccgagcatcctctcagccaccctcaatgatgcgggcatcgtgcgcaacgcggtcgatcagcgcgctttctcaatgctcaatccagcggggttggatcccaccttccccaacgccgccaccggccaaatgacccaacccggtcaacacgccatcgtgttctggggcgaaggcctcggcgcgggcacccatttcagcagcgatggcaatgccggcaccctcaccgacgccctcggcggcttcgtcgtcggcgctgacgccgccctcaacccgcaaatccgcgcgggcctgttcgccggctacagcaacgcctccttctccctgcccagccgcgccgcctccggctccagcgatgacgcttatgtcggcctctatggcggtcgccgcctgggtcgcgtcctgatcagcctcggcgccacctacggccagaattacctctccaccacccgcaacgtcgccctccccggcgtcaatgaagccgaaaccagccgctacgacgcctcaaccgcccaaatctacggtcaggtcggctaccccctcaccaccatgatcaaagcccaccgcgtcaacctgctgcccttcgcccagctcgcctatatcaatctctccagcgccgccttccaagaatccggtggcagcgccgccctgcacggctatggcagcaccctgtccatgggcatcagcacaatcggcgcccgcgccgagaccaacttcatgctcaaaggccgcgccatcaccgccttcgccaaactcggctggcaacatgcctacggcaccgtcaaccccaccgaggccctcagctttaccgcaggccaacccttcaccgtccaaggtgtgagcaccggtcgcgacgccgccatcacccaactcggcctcgccgtccgcctcacccccaaaatctccgccaacatcgcctataacggcagcttcgccagccgcgtcaccagcaacggtgtcaacgccggcctcaactggaacttctaacttttctccggggcgcggtttcccaccgcgcccccagtcgggccgcaacacgcgtgctcccggcctaaccaacggcgacgcaggacacaatcaataacaactgtcgcttctcaatattccataattataaaccatcacgcacaagaaatccccctgcctcattgccaaggcaggggtgattcgtcagtggaatgaaccactttaccgtggtttccctattgatttcccaggattgttttcgcgcatcaaacagttattgtcaagttagaatgcacgcccaatcaggaaaccactccatgctcattttcggaatcgacgccggaatcgcctcaatcggctgggccgtcctcaccatcgatgacaacaccgccaaaatcatcgcgtgcggcacccgcatgttcgacgctcccgaaaccgacaaagagcgcaaacccaccaacgccatccgccgtgagaaacgcgggatgcgccgcgtcttccgccgccgtcgtcagcgtatgaacgccattcgtaaacttcttgccgaatccagccttcttcccaacgccgacaaatccgccctcgccctcaacctcaatccctggcccctccgccaacaggcgctggatcgccgcctcaccaatcccgaattcgccaccatcctcggccatatcgcccgccatcgcggcttccgctccaacgccaaatcggaccgctccgccaacgccgccgatgaaacctccaaaatgctaaaagcgatcgccaccacccgcgaccgcctcggccaatatcgcaccatcggtgagatgttcgcgaccgaccccgctttcaccaccaccaaacgcaatcgcggcggcggcttttctcattcaattttgcgtgatgaccaagaagccgaaatccgtaaaatcttcagcacccaacgccgcctcggcaaccaggtcgccaccgaatctctcgaagcaactttcatcgaaatcgccttttcccaacgcccgttgcaggattccgatcacctcgtcggcgcgtgtcccttcatccccaccgaacgccgcgccgcccgccgcgcctacagcttcgaactcttccgcctcctcgccaaactcaacaccatcaccatcgaaacacccgccgcacccgaccgccgcttgtcgcgtgacgaaatcgccaatgtagccaacgattttggcgcacaaaaaaccatcacctggaaatcgcttcgcaaaacacttgcgctcccgcccacatcccgctttgccggcatcggtcctgacgatgaaaaacacgacatcgtcgcccgcaccggtgccgccgccgaaggcacctacgccatccgccaatgcctcggcgacgccgggtggaaatccctcctcacccaacccgcaaccctcgatcacctcgccgccatcctctccttccgcgccgatctcacctccatcacccaagccatcgcaagcctgcccttcgaacctatcctcatcgaaaccctctgcgatgccgttcacaacggaaaattcaacaatttcagccgcgcaggccatatctccgccaccgccgcccgcgctctgatcccccacctcgccaccggcttggtctattccgaagcctgctccgccgccgggttcgaccatgcagcccgccccgaaatctccctcgacgacgtcagaaacccggtcgctcgcaaagccgtcaccgaaatcatcaagcaggtcaaagtcattgcccatgaattcggccaccctgaccgcatccatctcgaactcgcccgtgacgtcggcaagtccgccgacgaacgtgacgaaatcacccggggcatcgaaaagcgcaacagagaacgcgacaaaaaccgcaacgagctccaagagctgctccatcgtgaccatgtcagccccgatgacatgctccgctatgagctttggaaggagcagaatggtcgctgcctctatactgaccgcgaaatctccccgcccgacctgctcgccaccgccaacgccgtgcaaatcgaccatatcctcccctggagccgcttcggcgatgacagcttcaataacaaaaccctctgcctcaccagcgccaacgccgataagcgcggacgcaccccgttcgaatggttctccgccgataaaacaccccacgactgggaactcttccaagcccgcgtcgaatcctgcaaatccatgaaaaacttcaaaaaacgcggccattatctccgccgcaacgccgccgaaatcgaagaacgcttccgcgcccgcaaccttggcgacacccgctacgccacccgcctcgccctcgacctgctggcccgcaaattctaccccggcgcgcaaacccgccacgtcctcgcccgtccgggcgccctcaccgccaaactccgccaaggctggggactcgaatccctgaaaaaatcaagcgacggccaacgccaaaacgatgaccgccaccatgcgctcgatgccatcgtggtcgccgcctgtaccgaatccatgctgaaccgcctcacccgcgccttccaagaggccgaacgccgcggcctcggtcgtgacttccgcgctctggatcaaccctgggacggatttcgcaccgatgtccaaaccgccttcgccgccatcaccgtctcccgcgccgaacgccaccgcgcgcgcggcgaagcccacgccgcaaccatcaagcaggtccgcgagcgcaacggcaaaccaatcgtctttgaccgcaaacccgtcgataaactcactttggccgatctcgccaacgtcaaagacccggaacgcaacgccgccatcatcgaatcgctccgcgcctggatcgaacaaggcaaacccaaaaattcgccccccctctcgccaaagggcgaccccatcagcaaaatccgcctcgcaaccaaagacaaacccgccgtgctggtccgcgccggcaccgccgaccgtggcgatatggcccgcatcgatgtgttcgtaaaaccagacgccaaaaaccgcccccgcttctacctaatccccatctacccccaccaaatcgccacactcgcggccccaccaaatcaagcggtggacaacggcaaagatgagccggactggaccacgattgacgccagctttcacttcaaattcagcatctacagcaatagcctgctggaaatcaccaaacccgatggcgaaatcatctgtggctatttcaaaggactgaatcgctccgtagccgccatcacattggccgagcaccagaacccactcgccgttaaacagggcatcggcacccgcacgctgctcagcttccgcaaattcaacatcgatcgtctgggccgcatcgccgaaatcaaacaggaaacccgcacatggcatggcgtggcctgcacctaagccaacccgcccgcctcactttggcggacaatcaatgcgtgatcacccaggaccaaggcgaaacccgcctgcctttggaagacatcgcctggatcatgctcgatacccaacaagcaagcctcaccgccgccctgctagccgcctgcatggaggcggggatcgcgctcatcatcaccgacgcccgccaccaccccaacggcatggcgctcccctttcaccgccatcaccgccaagccgaaatcgccgccatccaaatcgccgccaccgaatcgctccgcaaccgcctctggcaaaccatcatccgtgcaaaaatcaccaatcaggcggccttgctcagcatgctcggcagccaagccgccccgctctacgcgatggccgagcgcgtcacccccggtgatccggaaaacatcgaagcccgcgccgcccgccattattggcagcacctcttcgccgattttacccgccaaaacgaagccgatttacgcaacgccatgctcaattacggctacgccatcatgcgcgccgccatcgcccgcgcccttgtcgccgccgggctactccccgccatcggtctgcatcacgcgagcgccctcaaccccttcaacctcgccgatgacctgctggaacccttccgccccatcgtcgatgccatggtctggcgcctgtccaatcaaggcccaaccagccaaggcccaaccagccaaggcccaaccaaccacggcccaaccaaccagggcgccttaaccatcgaacatcgccgcgccctcgcaagtgtgctcctagaacccacccgactagccgaaaccaccatcaccgccctgctcgccaccgaacaatcagcaacctcgctcgcccaggcgctcgacgccaaatccgccaaaatccttcgcctgcccgaaccaatcttgactccatcatgaaccaccccccgcaatacccgtgacccgccaatgcaacacgaggagatccgattcgtgtggctattcatctttttcgacctaccggtcggcaccaaagccgaccgccgcgccgcgaatcgcttccgccaattcctcaaggacgatggctatatgatgctccaattctcagtttacgcccgcatctgccggggtgacgacggcgccaccaaacatatcaaccgcgccaccgccaacctccccgccaccggcagcgtccgcgccctccaagtcaccgaccgccaatatgcccgcatgcgcctactgctcggcaccgccaaaccaaccgaatcgatcggcgccgtccaactggtgctgctatgagccgcacaaaaaaatccccgccatcagcggggattttctctttgcaatcaaccagatacagccgaggcatcttagcagggggaaatcagtagggaaaccacggctgcactacgaaactcctgcgggtttctaggatcttagcagggggaaatcagtagggaaaccacggccagcaacagagaatgcggcgcgatttttaaatcttagcagggggaaatcagtagggaaaccacggcggggcttatatcgacggcaccggtgcgaagatcttagcagggggaaatcagtagggaaaccacggcttactagactagcgttgacaccattggcgcatcttagcagggggaaatcagtagggaaaccacggcgacacatcgctctgaggttcgaccaatcgaatcttagcagggggaaatcagtagggaaaccacggctataatttcagccaggcggtgggcgcgattatcttagcagggggaaatcagtagggaaaccacggcctgctgcaaatggatgttcaggcaattcggatcttagcagggggaaatcagtagggaaaccacggcgcaatccaaccgctctacacgcaaaccggaatcttagcagggggaaatcagtagggaaaccacggcatttgccagcgggggcaccacggcgattgatcttagcagggggaaatcagtagggaaaccacggcaataacgcctccctgttgttggtcacccaaatcttagcagggggaaatcagtagggaaaccacggccccgcttgaatgatcgggcatgaggggggcatcttagcagggggaaatcagtagggaaaccacggccaatttaacgccgccctacatcgtggctcaatcttagcagggggaaatcagtagggaaaccacggccgatcacgccgacgcggaccacgagcatccatcttagcagggggaaatcagtagggaaaccacggccgggtgcatggagtgccttgcgcgattctaatcttagcagggggaaatcagtagggaaaccacggcgcgtggttccggggcgcgcatcgcagcttaatcttagcagggggaaatcagtagggaaaccacggcttaaaagacatatcagcccggcctgtcattatcttagcagggggaaatcagtagggaaaccactaaccgagatcagtagcgaatcgctggaaacaggcataaactaattgggggagtctttattttagcccgcgccaatccgccactgccacccgatcaacaataataaaccaagcaagaaatcaacgtcttgctcccccaaccaccccatcccacacccaaacgcgcatcacccaccgccaccaacaaccggactaacattcaaccgaaaatccaaatcacccggacaacccaaccccatcgccccgagcaacgccggaataatatccccatcgcgctccatcgccgcctcatactcaattgccatcaccggacccagctgcgcccaaaaagcccgaatcgcctgtttatcgaaccaccaatcacccagcagcggaaaatcagcagccgccatcaatggcccggcaaccgaatggcgggcaatccccgcaacccagctcctgcgccaagccgcatcctcccgaaacaccaccagcggcacaatccgccccacctcagcgcccaacacccgccgcagcgcccccaattctgccgcattccgcagaaaactgaacgcctcggcactgaataaaacactgcgtccagccgcccgcgcccgcgctaaaaattcctgcacatggcacgcaaggcccgccagccgcgcttcatgcggcggcgcaaccgccccaacatagcgcgacatcgtcatcgcctcggcgcgcaacacatcatgcaccagccgataacaattcgcatccgccgccccctcccgcgtctcaatatacggctcaatacccgctcgccgcagccactcccgccgctccagcataaaacgctgaaacgatgtcgtgcccgtcttatgcgtccccaaatgaataaatattctctccatcacaccacctttccgcgccgccccaccccgccacgcaccaaccatccgcccgccgatcccaccatggcattttcccctttcgcagccaccccctgttatgccatgttagcgaaatggagcaggtcactaaccccctcgcgctttgtctcgccgaccgcttcaccgcgatcgcgcacatgctccgcaaaaccctcggcgcccccgactacgcccgcttcgacctttcgctcaagtgggccatctggcaccgtatttcgctcctctcccgccgtttccgttctctctccctgaacccacgccccatccgcgagcggaaacccggcgcgaaagctcaaaccaagcccgaatcagcacaagcaccaacctctccaaccggagcgaaaaggcgcgaaattccggggcaaaatggctggctgctgcaaaccttccccggccaccacatcccctatgtgcgcggccatctgatccgcttcctcgaagaccccgacttgtcgctcctccacgccgcaaatccccgaatcggtcgcgtgctacgcccaatctgccacatgctcgcgatcccgctccccgcttacctcaaattaccgcgcaagccccgcaaaccggagcaaaaaccggcgcgcaaaccagcgcggcggagcgaaaaaccggagccgtcattttacgagtacatgctggcgaaatacccgcccgcaccgccacgccccacgctgcccggccatatttacgcaccccccgcccgcgcaaaaatcaacttcgagcgttaggcggagaatattgcccaaatcgttccggattaaaaacaaaataggagcaaaaatcagcgcttggcggtagcgcgcatcatcccgcgccggagcaaaataacgccgagcaggatcaacagatcaatcgccaccagcaccgccgggctaagccgtgccgtggaaaaattagccgcgagcaccaagcgcggattaaacccggagtgcagcgcgtaccatcccgcctccaccagcgccgtcagcaccacacatatcgccgccagcccggccatcacccaccaggagcgccgccaatccggcttaagcagccgccacaaaccgagccagccgaacagccccgccggcaccagcgcaatgccgacatcgactttctgggtcagaaaaaaatgccagaatgacaggatcgcaattggaaaaatcaaccggtgcaacaatttccagcgccgccccaaccgcataatcgccgcatcggtggacgtcacggcgagggcgatgaagcccaaagtcgcaatcgtacccaaaatcaaataaaataccgtgaacatttgattaacaacaaaacccaacccccaaccttcatcccccgcatataaaataatatgcacaatcgtataaaatgccgccgccaaccctaacatccgccgcacctgcaccacgcgcggccaattaaacaggctgcgggcgggcgtcaccgcaagacacaggagcaaaaaccggatcgcccaaaatccagtctccaacatcgcatgatgcaagggccgcccgcccagccgcccgacttgcgcctgccaaacaacgaacaacgccggcagcaccacgcaaaccaaggtcgccgttttgaaccacgaaaaccgccccgccggatcgcgccagggggctgcaaaaatcttggcccggcgccggggcttgctctcacgcacagcaaccatgccgcacctagcccgaagcgccgaggagctgtgctaacatcgcgggtggcagcgtaatctgcgaatagcccggcggcggttcaaacgcccccgccggctgcgccgcatcctgcaccgacaaagcggtaattcgcatcgccccctgccggtcatgcccctgcccagcgagcaacacgccatgccgggtcaaacacacgctccccgccgccccgcgcttcaacaccaaatagcgcgcacattcatgcccggcgatttgcgcattgccgagccgggtgaactgggccccatccccggtcaaaacccgatccagcaccgccccaacccccggcaccgccaccaccgcatgcatctgatcgagcacaatgatcgcattgcgcgatcgcatattcagcaaaatcaccgtccccgccgccgcaccatccaggctgcgcgcccgcgcaacctccgcccccgcactatagcgcacccgccaggtggtactcggcttgcccggctggctcagccgataggtgccggcaatgtcatggtccggcaaaaacatcggcaccgccccccacgccggccccgccgcgatccagatcaacgccccgatccatgcgccccagcgatatgtcatatccgctccatctccggctccctctgctgcgacaaccgccgcaaagtcataatttccgcctcaagcgctgacaccgatggcgcagccaaccaacgcgcgggccgctccaccgccactgccaactgggcccgatacgccgcccgcgccagttccagcgccccgaagcgcgccaaatggctggtcagaaattgcgtatccagcaacaaaaatcctcccagccgcagccgcgccaccaaatgcaccaaagccaatttcgacgcatcacgctccagcgataccatactctcgccaaaaaacgccccgccaatcgccagcccgtacaatccccccaccaaccgcgtgccgtcccacacctcaatcgagtgcgcatgccccatcgtggccaaggtgcaaaagagccgctcaatctcgcgattaatccacgtctctggccgctccggtcgggcctgcgcacaaagcccaatcaactgggggaaatccgcatccgccgtcacccgcaaccccgtccgccgcgccgtgcgggcgagccgccgggttaaatgaaacccatcaagcggcaaaaccccgcgctgctcgggatcgagaaaatgcagcttggtcgagtcccgcgtctccgccatcggaaaaaatcccaggcgataggcccgcagcaacgtctcaggatcgatggtatagaaacgcgcggacatgcccgcactgtcgcgcttatttcacgcggcttcaactagcgctgcatgacattgcggtaagcgcgccgccgcccgatcatagagcacccggtcaagcgccgtccgccgctccaacgccgcttgcacagcctccccacgcagcccccggcgcatcgggcgaaaaaacccacccgcggtgcgatgattatccgccgttacattggcccgcagcgtttcgcgtggcaacgccaaacccaactgcgcggcaaaatgcgccacactctcctccatccgttcggtaatccccaccgcatccagccggtccaacgctgcgcgcgcgcaatcgagggctgccaaggggtccgccaccagcgggtcaaccgcggccccggttgcataaagcccggtcagccgccttgtataaacattatcgatcaaatcgcgcatcagcggatcatcaccatcaagaaattcctcaagcgacaaacgatgcgcctgggccaccgcaaaactcaaatccgggtcgatccgtgcggggtccacgctgcgccaataaaaatacagggactccaaccgatcacacggatcgcgcaggagcgaaataatccgccgcgccggatcatcccgggtgagcaacgctaaatcataatgaccccacaccaacggatagggcgcaagcgtctccacccgcgcgaacaaatgtggcgccagatcacgatgagggtcggcattgatttgccttggatgaaattgctgggtcaaccagcgcgtcaacgcaatgccgccgcatttctcaaaatgcaggaatcccaacggcggcccctcccacagcgtgaataaattcccccccaaagccggcgggtcaggcggaaaaaagtccggttcagtcacccgggcggcgattagtagatgatctgacaatttaccaatcagcgcccgcgaactcggcaccgccaacaagccgcgtaaaatcggcggtatcggacgctcgcgggcggcgaaaccctctacaaaggctgcgcgctcgcccgccattggccaacggccaatggtcaggcgcagcaaagtgcttgcgctcaattggccgagaccccgaattgccaattcacgaaaccgtgatatgtaattagaaacaaacacaaaaatagatttgggcgatcaacgcgcgtaaatcaacaaatattaagttactcggcgttacataatctcaataactggataagccgaaacgatcctgccatgatccctttcatcagcgggggcttgccgttgcacaccgagattgcgacaagctaaggttcaatttgattgttttagggagatcccgctttgcatatcgcaattatcggcggtggctatgttggcctcgtgtccggggcgtgctttgccgaattcggcgttgatgtgatcattgccgagaccgacccgaccaagcttgattgcctatcacgcggcgaaattccgatttacgaacctggtctggacggccttgtggcgcgcaatgcggctgctggacgcttgcggttcaccggctcggttgccgaagcggtggcgcgggcggaggcggtgttcattgccgtgggcacgccaacccggcgcggcgatggccatgccgatttgacctatgtgtttgccgccgccgagcaaattctcgcagcactcgatcatccgaccgtgctggtcaccaaatcgaccgtgccggttggcacgggtcgcaagcttgccgccctggcccgtgcgcggcgtccggacttggcgatcgaaattgcctcgaacccggaatttttacgcgaaggcagtgcgattggcgatttcatgcgccctgaccgggtgatcgtcggtgcggagaccccgcgcgccgaggcggtgctgcgcgctctctatcggcccttgaatttgatcgaaacgccgattttggtcaccgggctggaaacggcggaactgaccaaatatgccgccaacgcatttttggcgatgaaagtcacctttatcaatgaaatggccgatctctgcgagagtttgggcggcgatgtgcatgatttggcccgcggtatcgggctggatgggcggattggccggaaatttctgcatccagggccgggttttggcggctcctgctttccgaaagacacgctggcgctggcacggattgccgaggaggccggtgcgccctcacgcctgaccgaaaccgttgttgcggtgaatgatgcccgcaaatccgggctggcgggccgggtgatcgccgccgccggtgggtcggtgcaaggcttgcgcattgccgtgctgggtctggccttcaagccggagaccgatgatttacgtgaaaccccggcgatcccgctgattaacgggctgtgcgaggagggtgcgcgcgtgattgcctatgatcccgccgcgatggacggcgcgcgggcattgctgccggcggcggtgatttttgccgaggacgcgccaaaagcgctggagggcgctgatattttggtgatcgcgacggagtggaatgcgtttcgcgcgctggcccctgaacgcattgcggcctcgatgcgcgggcggattattatcgatttgcgcaatattttcgaccccgacgccatccgcgccgctggattgatctatcacggcatcggacggggaacagcgcgctcttccgctcctaacaaggctgaggcataagcagcgccatgaacgaaattgcccccaacccgagttcagcgctgatcgatctggatgacgtgaccgacaccaaaccaccggcgtcgcgcagctcaattccaatgattggcaattatcccgattacgccaatcctgatttggtggaggcgattccgctgagcgcgcgcacgatcctcgatgtcggctgcggcggcggggcggtgggggctgcctatcggcaacgcaatccgcgcgcgcgaattttgggcattgagagcgatcccatatcaggcgcgcgtgccgccgaacggctcgatgcggtgcagatcggcgatgtcgaagccacaccgatgccatttgatctgcccaacgggttggattgtttgatttatggcgatgcgctcgaacatatgcgcgacccgtggagcttgttgcgcagccaggccgcctttttgaacgatgacggcgcggtggtgatgtgctttcccaatgttgagcatttcagcatcgtgtttcggctgctgaatggcagtttcgattatgatcccgaagggctgctggaccggacccatttgcgctggttcaccccgcgcatgatggcgcgcgccgtgagcgatgccgggctggcgctgtgcgatattcgcccgcgcccaaccgacccaaccggggcgacccgctttgtcgaggcgatgcgacccgccttggcggcgctgggcatcgatcctggtgactatttgaaccgcgccgccccggtgcagttcatcctgcgcgccaaaaaagcgccgcgaccgcgcctcgtggtcaatgcctcgatgctgccgccgatcggcggtgtgtcggatgtgcgggtggtcgagccaatccgcgcaatttccaccgatgcctcggtgctcgcgagtattcgcaccgaaccggatttcgcgaccttattgcccgaagcgccgcatatcgcggtgctgcatcgtccgttgctgctgggcgatgccgggatcgggcgggtgcgcgccttgatcgaacggggtttcctggtggtcaccgaattcgatgatcatccggtgttcatggag

SEQ ID NO: 4287 - DNA, 20055 bp, synthetic construct
  source 1..20055: mol_type = other DNA
  misc_feature 1..20055: note = Synthetic
tggccagttggcgcgacgggcgttttcccgacgacgaggaaagcttgcgcaagctgccggggatcggcgattacaccgccgccgccatcaccgccatcgcctttggcaagcgcgccgtggtcatggacggcaatgtggaacgggtcatcgcccggctgttcgcggttcccgacccgctgcccggcgtcaagccccatctgaaagccttggccggtcaactgaccccggatttccgccccggcgattatgcccaggcggtgatggatctgggtgccaccatctgcacgccgcgcaatccggcctgtgtcctgtgcccgtggctgaacgcctgtgaaggcaaccgccaaggcatcgccgccacgctgccggccaagctggccaagccggaacgccccacccgccacggcaccgcgttttgggccacccgcaaggatggcgccgtgctgatccgtcgccggccgccgcagggtctgctgggcggcatgatggaaatcccctcgacaccctggcgggaaagcccgtgggacggggccgaattggtggcccaacaaccgctgcccggccaatggcgccccctgcccggcttggtccgccacactttcacccattttcacctggagcttaagctggtggcggccaagaccgccggcgccgccattgcccacggattgtgggttccgctggaccaattgggcgaccacgccctgccgtcggtcatgggcaaggtgatccgccacgccctggccaaggcctattgaaggatgacaatcatgcgccttgcccttgccgccgccctgaccctgggcttggccagcaatgccctggccgccgatgcttcggcgcccggcgaaaggctgcttctggtaccgccgaccgattggcagccggtgcaattaagccacagtgaaaagatggtggtgacaagattgtacccgccgggccaggacgaaaagaactggaccgaaatcgtcaccgtgcagatttacccgaaatcatcgcaatcggcccgccagttcgccgaaagcatcatccaatacacccgcgacgcctgcgtcgccgccgggcccggcccggtgaccgaaaagcccatcaacggctatccctcggccagcgtgccggtggcctgttcggccggcaggaattccggcatgggcggtttcgtgctggccaccgccattcagggcaaggacgccctttacgtggtgcagcggcagtggcgcggccccgccatcccgcaaggcggtgagccggcctttccgcccggcatgttgcaacgctggagtatcttcgcccatagcgtcggcctgtgcgacacccgcgacagccgtcacccctgtccctagggggacaggggtgacggctgttatgcctgtggcgcgcccggaacgggcggctcagctaagtcaactccaccttggggaagtccacctcggtgccggcggccaggttgaagtaattggtgaagatgttcagcgacacgtggccgatgatctcgacaatgtcggcattgtcatagccggcggcacggatggcggcgaagtccgattcccccaaccggccccgcttggtcaccagggcgcgggcgaacaccaaagcggcggccaccttggcatcggcgcttttacccagcaggttgtccttggcctcggcatcaccgatgcccaatgacttgccgatggcggcgtgggcggaagcgcaataagtgcaggcgttgatgccggccaccgccagggcgatatgttccctgagcttgcggtccagcccgcccttgcccaaatttccggcaaagctcagataagcttccaggcttgtcggcgaattggccatggcgcgaaagatgttgggcacaccgccaaagctccgcttgacggtttcaagcacggacttggcggcagtcgaggcgttgtccggatcgatcaggggaaggttggccatctgttactctcctgtgtgatgactggggaacttgcgatggcccaaagactgtcatactataggcaacattatgtccgataaagattgcatatcgtccacagaaaccgccgaagaccgatgtgcgaccctgtcggtcgaccgcttggccggcattttggggcgcttgcgcatggtggcgcgggtgttccgggtcgcccccctgcccgaaaaactggatttcgacccctgcgcccatctgcatgttctgcgatcggggcaggtcctggtcgaagtcgctggaatgtcaaagaccgtcacgtccccggcggccatcttgctgccccaggcggaaagccacgccatcaccccggtggacggcccctgcgacctggcctcggcccggatcgatctgggcggcatcgccaatcccctggcccaggccctgcctgccatccaaagcctggacctgcaaaacgattcccatggtccgcaattgaaagcggtgctggatatcttgctggacgaggcgcaacaagcccattgcggccatcaggtggtgatggaccgtctggcggaagcggctttggtgctgatcttgcgccaatccatggaagacgcccaaggcatcggcttgctggccggtttggcccatccgcaattggccgtggccctgaccgccatgcacgaccaccccggcaccgcctggacactggaaagcctggccgaaaccgccgggctgtcacgcagcgtgtttgccgacaccttccatcaggtggtggggctgcccccgggacaatatctgtccgcttggcgcatggccctggcgcgcaccgccctggaacgcggagattccatcaagcgggtggcgcgcgatgtcggttacgccagtccggcggcgctgtcacgcgcgttctcccgccatttcggcagcaacgcccggaccgtgatcaaggctgaacgctaaccgccgcactttggtcgaaagccaagctgaggcgctggaaatgtccgtccaacccgccattccccgacttggccgcctgttccaaacgcgatgcggcatcggcaaggcggacatagcccaaattggccgcggcccctttcaaggtatgggcggcggtgaccaccgccgcgtcccccccggattgcaacgccgtttcgatgtcgccccgataatgcggcaatctgtcgcggaacgactggcacaaacgttgatagctttcctcgcccagggcatcggacaaatccgccaccaccgcctggtccagcaagggcaattcggccgcccccccgtcttccgccgcctcacactcgggacagccgcgcaaagcccgggcttcgaccagacattcggtccagcgcgccaagatggcggccaatcgacggcggtcgatgggcttggccagaaagtcgttcattccggcgtccaaacaggcctgacggtcgctttccatggcattggcggtcatggcgatgatggcgacgttcgacttgggtggggtcatggctcggatcgtccgggtggcggacaagccgtccaccaccggcatctgcatgtccatcaagatcaggtcgtaatccccatggcgcagcaattccacggcttcggcaccattgtcggcgacatcggcacgatgccccaacttggccagcaaccccaccgccacttgctggttgatcgcattgtcctcggcgaccaggacccgaagcgccggcccttgcggcacttcgtcttcgctgctgagggccgccggttcggcacggcctccccccaaacccagcaaggatttcagaaccgacagcagcgagctttggcgcgcaggcttcatcatcacggcgttgatccccaattgtcgcgccgaacgatcgatgtcggcggaatgcgccgacgacgccagcaggatcggcaaggtggcgaagtccgggtcggcgcgcagcaacgccgccatgtccagaccggtcacccccggcatcagatggtccagcaccagcaactgaaaggggggctgcgccgatttcagggcggcaaagccggactgggcatcgacggcacaatccacatcggcaccccaggcctggaattgacgctggaagatttccgcgttcaccggattgtcatcgatcaccagaatacgcgccccctgcaggggacggatctgggtcatataggggatcggcacggtggagcgggccatcggcacccggaaccagaaggtgctgccctgcccctcggcgctgctgaacccgatttcgccgcccatcaaggtgacgatgcgtttgcagatggccaaacccagccccgaaccaccatatcggcgggcggtcgaggattcggcctggacgaaggttccgaacagcttggcttgcgccgcggggggaatgccgatgccgctgtcagtgacgtccacccgcagccaagccttgtcgtcgggggcgttttccaccgccacttccaagacgataccgcccttatcggtgaacttcacggcgttgccggccagattcagcagaacctgacggatccgcccggcatcggccacgaacacgccttccgcctcgggggggatgaagcaggacaagtccacatccttgtcgcgcaggcgcggtcccaggatgtccaccacgccctcgaccaggggggcgatctcgaacgaactttcctcgaattccagccgcccggcttccatcttcgagaagtccaggatgtcgttgatgatggtcagcaggctttccgccgacagccggaccgtattggcgaaatggcgctggtccgaattaagcttggtgtccaacagcaacgaagtcatgccgatgatgccgttcatcggcgtgcggatctcgtggctcatggtggccagaaactcggatttggcctgattggcggtttcggcctcggtcctggccccatccagatccagcaccatgcgctgcaactggttggaactgttcagaatttgtcgcgccaccatggcgccgagcgccaggaccgccagcaccgtgatgaccgccagggccgcccccagcaacaggtaatgctgtttttggtcaaggatctgccggtccagcgttttcagccgctggtcggcacgcaggaacaaacggccgctttgcttgcgcagcagaaccgcctgagccgaaaactcgctgagttgcgattgcagttcctcgtggcgatgaatgtcttccgcatcgcccatgccccccatgtgcaaacgaaccagggcgttgatcttgttgatccgttggtccagatcgaacagacggccgcgcatggcctcgatgtcgggcaggaaatcgtggtcggcggcaccgggggtgaaggcgtgctggcgtgaaaattccggctggccgcccaggcccaaaaccatcacttcttccaccgtaccaccggtttccagcacatccagggcatgccccagggccagaacccggtccttggcctcgtcgcgcatccgttccagccccagcgtgctttgtaccgccgccatgcgatagacggccgcttccatgccggccacgtcttgcaggatttcgccgacgatgttcagccgtgccgtttcattgtcggtgaaccggtccgcctcgtcgatcagatgggcgaacagcaggtacaacccgaccagcgccaagaaccccaccaggaagctggccagcaacatgcccatgcgggccaaaggctgcagcccttggggacgaagacccgatgctatttgcaaatgctcacccccgaacggggatcggtgtggcagaacaacgtgtccttgccgattttgccgacggtgttgcccttgccgtcgctgtgcaggatgaccttgtccttgcccatcttacccactgttccggtgggagtttgcttcagcaccgaggtttcccccccgtccttgacgatggtggtgcccgacccgggaggagaaacgacgatcacaggtttgtcatccgcccccgccacgaccggaaacagcagaaccccaaagaaagcggccagcgaacgcatgtcgcgaactccgaaacaaggctttcgccattcaagcactggtggcgtgaaaagtccatgcggacgctctttgttccgcctatactccggccatgtccgcgccgcctgccccttcccgcatcctgctgccgcatgcccccaccctggtggtggcgttgcgcggcgccgtcttgctggacaccgacggcgagttccaccacctggatttggcggccgccagccggcgggccaaagctgaatgccccttggtctgccatgccccggccagtgccgcgcggctgggcctggacgatttcacctgcctggacgtgctggaattgttcgccttcgtgcgcccggcacgcttttgcctgcccaccgtgcggggcttggccgaggccttggggctggtccgccccgccgatctggaagaccaggcggaagccctgatccgcatcacccgcgtgctgttgcaggaactggccgaacgcaccttggccgacacggcggcccgcgcttccgacaccaaatccgccgcctgggccatggcacgggccggttggggctggggcaattcggtgctggcggccttgggggtcaccggcgacaacgcccgggggtccggccttcgggtgtgggaacgcctgcccgaatggtcggaacacacgcccgaaccgcccagcggcagcattccggtcgaccccaccgaagcccgccaacgactggaccgcctgctgggcagcgattccgaacaacgtccggcccaggccgattacgcctcggccgccgccgccgcctttcagccgcgtcagatggaaggcgaaccgcatctggtgttggccgaggccggcaccggtaccggcaagaccctgggctacatcgccccggcatcggtgtgggcggaaaagaacggggcaccggtgtggttgtccacctatacccgcaacctgcagcgccagttggataccgaactggaccggctgtatcccgatcccggcaccaagtcgcgcaaggtggtggtgcgcaaggggcgcgagaattatctgtgtctgctgaacctggaagaacaggtgtcgcgcaaccgggtacaagaggcggtggcctcgggcctgatggcgcgctgggccttggcgacgcgcgatggcgacatggtgggcggcgacttccccgcctggctgggcgaccttttgggccgcgcccgcaccctgggtctggccgaccgacgcggcgagtgcatcttctccgcctgcccgcattattccaaatgcttcatcgaacgcgcaatccgcaaggcgcggcgcgccgacatcgtcatcgccaaccacgcgctggtgatgatccaggcggccatgggcggaatggatgacggcgccacccccacccgttatgtgttcgacgagggccaccacgtcttcgacgccgccgacggcgccttttccgcccatctgtcgggattggaaggcatcgaggtgcggcgctggctgctgggcgccgaggaacagggcaccaaatcccgcgcccgcggcctgaagcgccgggccgaagacctgttgggtctggccgccgaggcaccggccgccctggacggcgccctgaccggcgcccatgccctgccggccaccggctggcagaaccgtctggccgacggcgcccccatcaacgccgccgaacgtttcctggccctggtgcgccagcaggtctatgcccgcacccaaggtgccgacagcccctatagcctggaaaccgaatgccagccgccggtggacggcttgctggaagccgccgccgaactggcgcaagccctgggcaagctaggggcgccgctgcagaccctggccaaagtgttggcgcaagccctggatgacgacgccgccgagctggaaaccgccacacgctcgcgcatcgagggcttggtgcggtccatcgagcgtcgggcgcttctgcccatcgccggctggaaatccatgctggaggaattgatcgaaagcgccccgaatcccttacgcccccaaagcggggctggcggggcggccgctttgggggcggataaatacgttgactggttttcggtggaacggatcgaaggccgcgacttcgatgtcggcatgcatcgccattgggtcgaccccactttgcccttcgccaagacagtggcggaacccgcccatgggctgctgatcacctcggccaccctgcgcgacggcgacaacgacatgggatgggccgccgccgaacggcgcagcggtgccgtgcatttgcccaatccgcccatccgcgccgccatggcctcgcccttcgattatccggcgcagaccaaggttctggtggtctccgacgtgcgcaaggacgatttgaaccaggtggcggcggcctatcgggaattgttcctggcggcgggcggcggcggcttgggcctgttcaccgccatctcgcggttaaaagcggtgcacaaacgcatcgccgaggccatggaccacgccaacctgccgctttacgcccagcatgtggacaatctggacaccggcaccttggtggacatcttccgcgccgaggaagaatcctgcctgttgggcaccgatgcggtacgcgacggggtggacgtgccggggcgcagcttgcgcctgatcgtcttcgaccgggtgccgtggccgcgccccgacatcttgcacaagcaccgccgcaatgcgttcggcggcaaatcctatgacgacatgctggcgcggctgcggctgaaacaggcctttggccggctggtgcgccgggccggcgaccacggggtgttcgtgctgctggacccgatgatgccgtcccgcctgcattcggcctttccccccggcgtcgccgtgcagaaaatcggcttggccgaggcggtcaccctgacccgcgatttcctgaaggacgccccgtgatccaggtcatcacccccgacccgcccggtccgtaccagcaaacccacgaagcccacatgaacgtggtcagccatttcctcggctgggtcatgggggtgattccgctgttcatgctggtcaccatgctggccaaacacggcatgccccagcatgacggcgattggttcgccctggggctttacgcggtgatgggcattccggtgggctggctttacgccgccaccttgtggcggcacagccggggcattcccgccgggttcaagatcaaggaacacgaggattcgttcgaagtttatttcttcaccggcgacaaacgctgctggagccacgaattccaatattccgacgttctgggcagcggcaccgaccgtttccatgtgggcaccggcaccgtgcgcatggcctatgtgcggaccaccggacaactggggttcaagaaacgccagcccatcggcctgtggtcatggtgcgacctgcgtcgcctgcaccccatctatatcgacgtcatcgccgccgacatcgcccgggtcctcagccggcacggccatcccctgccccaaccggaaacccagccctgaaaaaggaattccccccacccggcaaagccggatggagggtctaaggcacgtcgtttcgtgcatcctgcgattggaaaaccaacttaccgtggcttccctaccgactcccgcaaccacagatgacagctcatggggaagctgtcaagaccacccgctccccgtggggtcatgcccgtgctcggcacgaatatcctgacgacaagcggactagcgttatccttggccgcataggcggtagggaagccacggcaacagctcgtgctctaagcgtgcacattcggactacacatgccgaagtatcattgcaatgaaaaccctttgcacatagatttgcaataacagctcgtataaatggaaacacatgcatcagaagccccgcccccaacccactcgtcacccgaaaccacctcggaaacgaaccaagccccagccggataatcgccaacgccccaaggtggacctcaacgcgatcctctacctcatcagttcgttgattgcgctagcggcaaagctttactaacccgcttggattggccgtccaaacacttccaaggcaattgccagcacagaccaccatcggtagcatactgcccatgaaaattcccaactttcacgtagggtgatccatgggcggcaatctgtatctgggtatcgatctgggcatcgcttcgtgcggctgggcgctttgtaccgatgacgaaatcatcggcatgggcacccggaccttcgacgcccccgaaaccgccaaagaaaacacgccgaccaatcagttacggcgacaggcgcgtggcatgcgccgggtcatcgaccgtcgccgccagcgcatgaacgacatccgtgacctgctgcaccgccatggattgttggatacggacggcaagcacgccttggcctcttgcgccgacgccccgtggcgggcccgggccgaggggttggaacgcaaactgacgccccacgaactggccctcgccctggggcacatggccaagcatcgcggcttcaagtccaattccaagcgagatcgtggcaacgacccggaagccggcaagatgctgaccgccgtggccaagacccaggaaagactggaagggcgcaccatcggccagatgttctggcaggacccggaattccaagcccgcaaacgcaaccgcgacggcgattacagccgcaccgtgctgcgcgacgacctgatcagcgaaacccgcctgctactgcgcgcccagcgccgattgggcagcacattcgccagtcaggaactggaagaccagttcatcggattggccttcacccaaggggaattacgggattcctgggatatggtcggcaaatgtccattcgagccgacggaaatgcgcgccgccaaacatgctccgtcgtttgaacgtttccgcctgttacagcgtctggcgcatctggaagtgggcggacgccggctcggcgccgatgatatctcggcggccatgaaggatttcggccatcagcaaggcatgaccttcaagcggctgcgcaagctgttgaaccttccgcccgatcaacactttgccggcatcaacgccgatgaagagggcaaacgcgatgtcgccacccgcaccggcggcgccatgcccggcagccatgccctttacacggctctgggagaagccggctggcaatccctgaacaaaaccccagccatcctagacgagattgccgccgtcctggcctttcgtgaatccgacgacagcatccgccgccacttgcaggaactgggattagaaccactgatcctgaccgccctgctggacggagtcaccaaaggcatcttcgccaaattcaagggcgccggccatatctcggccaaggcggcacgggccatcaacccgcatctggcccaaggcatgacctatgacaaagcctgtgagcaggtgggatacgaccacgcccgtcgggcggaaggcgacatcgacaccatccgcaaccccatcgccaagaaagccctgctggaaggcatgaagcaggtcaacgcggtgatcgaagcccatcgccgccaatatggaatccccacccacatccatgtcgaactggcgcgcgaggtcggaaaaagccaggaagaacgccaggaaattaccgctggcatcgaaaagcgcaacagccggaaggacgcattacgcgcccagttccgtaccgatatcggccgcgactgcgccaatgccgaggaattgctgcgtttcgaattatggaaggaacaaaataaccgctgtctttacagcgacacctatatcacgacggaagaggtctgcgacggtagcatcacacaggtggaccatatcctgcccctaagccgctccagcgacgattcttatgcaaacaagaccctgtgccggaccaaggccaaccaggataaaggcagcaagacaccgtttgaatggctgggcggtgacagcgccacctgggacagactttccttgggcgtgaacggctgcttggggatgaagggctataaaaagcgcgtttacctgctgaaggatgcgtcgatcctggaaagccggttcgtcaaccgcaacctcaacgacacccgctatgcctgccgtctgctgctgcatgcgctgaaaggccgctatccttcgatcaaagagcagaacatccgcgctcgccccggcccgctgaccgaccggctgcgtcgagcctggggcattcagggattgaagaaagaccctaacggcaaacgcatcgaagacgaccgtcatcacggccttgacgccctgatcatcgcctatatcgaccaatcgcggctgcaacggctgaccgaattgttcaagaaggccgaacaggaaggatctccccgtgaattcgccgctctggaaccaccgtgggatggctttcgtcgcgatgcgattcaagcctgggaaaccatcaccgtttcccgcgccgaacggcgccgggcgcggggcgccggccatgccgccaccatccgccaagtggcggaacgcgacggtgaaaaggtggtttatgaacgaaaatcggtcgaggcactgaccgaaaaagacctggaccgggtcaaggatgccgaacgcaaccaccgcgtcatcgagtccttgcgcacctggatcaaggccggcaagcccaagggcagcgcgccccttgaccatcagggccagcccatccgtaaagtgcgccttgccaccaacaagaaagtggacgtggaagtccgtgacggcgccgccgaccgaggagaaatggcccgcgtcgatgtgttccgcaaggccaacaaaaagggcaagtgggagtacttcctggtgccggtctatccgcatgaagtggcgacactggacgcgccgcccaaccgggccatcgtcgccaacaaagcggaaagcgagtggacagtcatcgatgacggcttcaccttcctgtggagcctgtacccgctgtcttgggtccgggctgtgaaaccggatggcgtggtgatcgaaggttattaccgaggcaccgatcgttcgaccggggctgtcgccatttccccccaccacaccaagaccgagatgacccgcgggatcggggtcaagacattggccgaattccgcaaattcgccatcgaccgtttgggcaatttgactgaaatccaacaggagaagcgcacatggcatggcgaggtgtgcatctaagtcaaaaagcccgcctgtctttggccgatggtcagatggtggtggaacaagccgacggcaccgtccgtctggccctggaagacttggcctggctggttctggataccccccaggccagcctgaccgccaacctgctctcggcctgtatggaagccggcttggtggtggtgaccaccgatgccagccatctgcccaacggcatcttgctgccctttcacggccaccaccgtcaggccggcatggcggaaaagcaggtggcgatgagcgcgccactgaaaaagcggctgtggcaggccatcgtcaaagccaagatcaccaaccaggccgccatcttggacaagaccggacgtgacggcggcaagctggtggcggaaatggcccgccatgtgggatcgggcgatcccgacaacgtcgaagcccgcgccgcccgtcagtactggtcgtgcctgttcaacgatttccgccgcgacgacgaccaggaccggcgcaacaaattgctgaattacggctatgcggtcctccgcgccgtcatcgcccgcgccttggtggccagcggattgttgcccgccttcggcctgcaccatgccagcatcggcaacgctttcaatctggccgacgacatcatcgaacccttccgccccttcgttgacctgctggcccaggcccaagccccggccaaggacgacgagctgagcctggaagaccgccgcgccatggtcgccattctgttggccgatgtgtccctgggtcgagacaccatgacgctgtcggcggcggtcgagcaggtggccgcgtcgctggtccgcgccatcaccagcgccgatgccgccgaactgatcttgcccaccgtgcaatcatgaaaagccaagaggttcgcatcatgtggctgttcgtgtttttcgatctgccggtgggaaccaaggtgcaacgccgtgccgccacccggtttcggaatttcctgaaagacgacggctatatgatgctgcaatattccgtctatgcccgcgtctgccggggcgaagacgcggtggacaagcacatggccagaatctgcaagcaattgcccgccaagggcagtatccgcgccctgcaagtgacggaaaaacaatatgcccgcatgcgcctgttactgggcgacgcccagaaaaacgagaaaatcgcccccacgcaattgcttctcctctgatttcggcgctgaaaaaggcgcggaaaccagaggagtttcaagaaattgccggattgcgagcctaccatcggggagtcggtagggaaaccacggccaacatgggggacaccatggccggcgctgcagcctaccatcggggagtcggtagggaaaccacggctctgaggaggtggtgctccccagacccgtgagcctaccatcggggagtcggtagggaaaccacggcgctgagtacgaccggacggcacaacccgggagcctaccatcggggagtcggtagggaaaccacggccggatcatgacgccgcgccgccatctgtcgaagcctaccatcggggagtcggtagggaaaccacggccccaacacccccaacggcgtcaccggacagcagcctaccatcggggagtcggtagggaaaccacggcgcgtcgatggcggcaccgacagcgcccttgagcctaccatcggggagtcggtagggaaaccacggctgctcctgatagcagctgggctgaattataagcctaccatcggggagtcggtagggaaaccacggccgatacgctggggtcaagcaaaacgtgaagagcctaccatcggggagtcggtagggaaaccacggcgattcagtccaccacacgctggatttcggcagcctaccatcggggagtcggtagggaaaccacggcgacaccagggcgctctatgacctgttgatgagcctaccatcggggagtcggtagggaaaccacggcttgaagcctgatgctgttgcattcctcgctaagcctaccatcggggagtcggtagggaaaccacggccgagtctcgcggttcgagaatgcctatgcaagcctaccatcggggagtcggtagggaaaccacggcggcaacaaggtactcaagcaattcgagggcagcctaccatcggggagtcggtagggaaaccacggctgagggggcggcgaaggacagccgtgccgtagcctaccatcggggagtcggtagggaaaccacggctccaccggagcgttcgtcgactttgaggccagcctaccatcggggagtcggtagggaaaccacggccctgatcgattccgtccgcaccaaggatcgagcctaccatcggggagtcggtagggaaaccacggcggggcagggccttggcgaaatagaagccctgggcttcgtccaccccttgggccttcaggaaatccagctgttcgcggctttccaccccttcgacattgacccttgttcccaaagaatggcccaaggacacgatggcggtgaccacggcggcgttgtcggggtgctgaccgatgtcgacgacgaaagagcggtcgatcttcagcttgtccaccgggaaacgcttcaggtagttcaaggacgaatagccggtgccgaaatcgtcgatggcgatgcgcacccccatgtcgcgcaattggcgcagcacgtccaccgtggcttccacgttctgcatggcgatgccttcggtgatttccaattgcaggcagctggggtcgaagccggtctggtccaagatgtcggcgaccatggccaacaatgccgtatggttcttgaactgcaccggcgacagattgacggcgatcttcaagggcggcaggccggcgcgggcccagtcacggccctgcaggcaggaccggtgcaggatccagcgacccagcggcacgatcaggtcggtgcgttcggcgatggggatgaagtccaccggactgacccagccgcgttcgggatggttccaccggatcaaggcctcgcagcccaccacttcaccggttcgcatctcgatcagcggctggtagtgcatttccagctgatcggtgcccaaggccaggcgcaaatcatgttcgaccaccttgcgggcctggatttccgcgtccatggcggcgacgtagaaatggtagttgttgcggccctcggccttggaccggaacatggccagatcggcgtttttcagcagatgttccgaatcaacggcgtcgtcgggaaaaatggtgatgccgatcgaggtcgaggtgttgacctcgtgctcttccaatccgaacggttcggccaccgaggcgatgatggattcggccaccgtgctggcgccgtccgggtcgtccagattggtcagcaccacggcgaattcgtcgccgcccaggcgcgccacggtgtcggattcacgcacgcaacgcagcaggcgtttggccaccgccttcaacagcaggtcgcccacatggtggcccaaggtgtcgttgatgtccttgaacttgtccagatccaggaacagcagcgccaccttgtgacccagccgcttggcctgggccagggcgctgcgcaggcgttcttggaacaacacgcggttgggcagcccggtcagcgaatcgtgatgggccagatggtggatgcgggcggcggccagcttgcgttcggtgacgtcgcgtccgaccatcaccaagccgcgccggctgccgtcgtcttcgaacagcggaatcttgatgacgtcgaacaccttggcgccgccgtcgcgggtcggcagttccttttcataggccaccgttttcttgtcggaccacgcccgttcgtcggtcagcgagccggtcagcaggaattccccgaaaccgctgctcatatgcgccaggtccgacgatgtccgcccgtggtaatccacgtgatccagcccggccagttccagatagaacttgttggccaccagccaacgccccttgccgtcgcggaaacacaccagatcgggcatggcgttgatcagggtggacagccattccttttgcttgcgcatttcggcctcggcggccttgcgctcggtgatgtcgtgggcgatggcgacgaacaggcgctggccgcccagttccatggcgttcagcgacaattccaacggaaaggtcgagccgatcttgcgacggccttcgacctcggcacggatgtccaggaaacgctcggtatccaaagcgccgccctgcaccaccagttccggaatcagctgcgccaccgacttgccgacgatttcataggggtcgtagccgaaaatgcgaatggcggccgggttgtaggtgccgatggcgccgtcctcgccgaaggtgacgatggcgtcggcggtgttgtcgacgatggcgcggttgtgcagttccgacagacgatagttttccgccagcgcctgcatggtcttggcctgctggcgcagcagcgcctcgcggtggctcatggtggtgacgtcgaacacctggatcaggcagtcgcggccgccgccccgtaccgccaccggcttgaccgcgacgatctgctgcatgggctcgggcttgccgggcactcggccttcatggttcagcggaaacaggcgtttgttgatggacgacgacaaaatggcggaaagcccgctgtgcaacgcctcgtcgatggcggaaatcacccgcgccccagccaggtggggatacaattcttccagacgccggccctgggcggtttcggcttggatccccgacgccttggacatccaggcgttccacagcaccaccttgccgtcgtgccccagcagcacgatgccgatctcgccggcatcggtcaaagttcgcagcacctgatccggaacgatgccgggcatcgatcagccccccagctgcgcggtcacataggcctggacggcatcgatgaaatgccgggccgaggaaatgtccatgacgaaagccagatagccatgcacgtccttggcacgcaccgaaaaatccacgtgcaggaacatgaccatctccgattccccttccggacgcggaccacggtccaagatactgcggccacgaccgcgaatatagcacggcagcgagctttccacccccatgcccaactggttggccaaagaccccaggcaggcgttgagaatgatgttgcccacttccatcagggcttcttgttccagttcggtcagctggtccaccggcaggtcgtcgcccagcatctggcggaccagatgcaggctgcgccgttcggggaagatcaacaagatgtcgccggcgaaggggccctggaaatgctggcgcaccgccaccgattcgccgccgccggtttcctcgtccaaccgcaaggcggcgcgatccggggtcaggaagtggaccagcggcaccgacagccgcacttcctcgtcgaccaattgcgacagcgcgccggccgcctggccgatggcgatattgatgatttcggtgaccgcgtcacgttggacgtcatccagaaagtcggtcattcgtcatccatgctcaggaaagccatcagcacgtcgccgcggaccggcttggacaggaagcccacgcccaaagaatcggcctggtcccgtaccgggtcctgaatgttggcggtcaacaaggtgatcaccgactggggatagacttccttcaagcgcttcgccgcttccaatcctcccatccccggcatgttgacgtccaagatgacgaaatccggcaagacgcgggaataaacctcgagcgcttcttcaccggtggcggcctcgacgatctcccaacccgggcggtcggtttcgatcatccggcgcgtcatcatccgcgccacacggctgtcatccaccagcaataccgttttcttcaccgtcaccgcccattcctcgcgccatcgacatccctaagaaatctatgcttgacgccgcgccttgccgcaagcctaaagtcccttgggaaaaacacaggaaggatcaaccatgctcagccatcacgccggattggtctatgtcatggtgctggtttcggcctcggatggcgagatgaccgacgccgaactgaagaccattggcgaaatcgtcggcttcctgccggttttttccgattacgacccgtcgctgctgatcaagaccacggcggcctgcgccgaattgctggattccgacgacgggatgaaccgggccttggacttcatcaaggcggcggtgccgaccaatttgcgggaaaccgcctatgccctggcctgcgacgtggccgcctcggacggcgaaggccacccggaaacccgccgcctgatggaaatgctgcgccatcgcctggatctggaccgcctgagcgccgccgccatcgaacgcggcgccagcgcccgtttcgtccgcccgcttttcccatgatcggcatacttgcaaaaacatccggcaaaagctaatttccggtcccttgctgatggcaaggcagtgccggcgtagctcagttggtagagcagggctttcgtaaagccaaggtcgggggttcgagtccctccgccggcaccataaatcagcaataaaaacaaacggttagccaagcgcattgacaagcgcaggccgctgttttgcaattcgcagtgatttcgcagttggcttgcggcgcaagcacaactgcaagctgtggggcgcaaaatggcacgcgaggccaagcaggaataccgctaccacgaggacggagcgatcgcgctctatcgtcgccccaacagcgccatgtggtatgcgcgctgcaaattggacgacggcgtcgccctgaacccgttcagcaccggcaccgacgatgagcgggaagccgtcaaggtcgccaagaagcgcatgctctatgccgaggtggatcgcgaacgcgggatcgagcccggcggcaagaccttcgccttcatcgccgagcaatggctgaagcgcaaacgggtcgaggtcgagaaaggcatttccaccaagatcaaggtggatgcctacgaagccatcgtccgccgcttccacatcccctatttcggcaagaccaagatcaccgagatcacccccaggaaactgaccgcctacgaggattggcgcgcgacagaggaggccccgtccattcggac

SEQ ID NO: 4288 - DNA, 18597 bp, synthetic construct
  source 1..18597: mol_type = other DNA
  misc_feature 1..18597: note = Synthetic
agcggacgcgcccggtgtccttgccctcggtctgacggcgctcggccgctacggggccgtagcggcgatgcagggcgtcggcgagaaggtcggagacgtgcttcgcatcggcgcgcagcgccgcggcgtcctccaggaggagggcgagatgggcgggtggcagacgggatgcctggccggcatccatgctgcgcagatcggtcagggtggttcggttgctcatcgaggggtctccggaaggcgggggatgcgtcaggggatcgaggcgaggccgacggcccagcagagggcgaggaagccgccggcgagggcggcgccgccggcggcggtgcgcgcgagatcgcgcacatgctgcaggcgacgcagacggagggcgcggtgtgtcatgcggcctcccgcgcgatggcgtcggtcggcggcagcgggccctgctcggcggagtggcgacgttcatcgcggtcacgatcgccatcgggatcccgcagcagcgcgctgcgccgggcaatctcgagccagacgtcgaaccggacgacgaccaacggcatcgtgcggtcctggatcagcaccagcgcgtctttgttctcgatccagcgcagcagggtcttgaagccggcgccgtcgccgcgcgccttgacctcggctttcaccggagcagcgccgcgcacatagagatcgacgtcggcgtcgttgccgcggtagccgagcgccccggacagcggcacgcgttcggcgtggatgccggacttgcgatggacgtcgacgatggcccgctcgcggcgcaggcccttgtcgcgggaggccttacccatgggcgcggcccttgcggatggagcccaagccggcgagcagccgttcatcaacgggccgcccactgaagcgcgccgcctcagcgaccgctgcccagtagcgggcggggatcccccgtcggcgccaggcgcgcaccgtgaccgcctcgacatcgagcagggccgcgagctcagcggcgctgggccacagggcgatcacgtcggcgaagctcttgggcggcgggagcgccggcgacagcgccgggcgtgccggttcggcgggccgtttgcggagggcgatgcggtcgggcatgccggacagatacgctccgtcgcggcacgcaaacaagactgtttgtatatgcagaaacctgctacacaatcgcgaagaaagcgctacatattgcagcgccatggaatccaccgcagaccgcctccgccgctttcgcgaagccaagggcattgattcaggggccgaattggcccgcctggccggcgtcccggaggcgacctatcgcgcctatgagagcggccgccgcccgctcacggcgcgggcggcgcgcgagctcgccgtgcccctcggcatcacctggcagatgctgctgttcggcaaggaggcgggcgacgcgggcatcgccatcaacaccccggaggaagccgcggcggtgctcggtcagcgggtgcggcgcaaggctgcgccaccccggccgcccaccacctacaccggcccggccgcggccgaggtgatcagcatgggcggcgacaattgggcactgctgccggtctacgacgcccgcgcttccgccggccctggccacgagatcgaccgcgaggcggtcgtctatcgcattgccttccgggaggagtgggtccgtacggtcaccaccgcgccgctcgaccagctggcggtgatcagcgtcgacggggattcgatggagccgaccctgcgcaccggcgacacggtgctggtcgactttcggcagaaccagcctggggacaaggacgggatctacgtcatccgcaccggcaacggcctgcaggtgaagcgggtgcaggtagaactggggcggccgccgcggctcagcgtgctgtcggacaacgccgcctatcagccgcagcgcggcctgagcgctgaggacgtccatgtcatcgggcgggtgatctggctcgggcggcaggtcggcgcgtaggtggctgccgagcccgtggacaacgacgccgtcgctagcgttgacttggcacaagcagtcgcgcggctgcccaggggattccggatgatcgatgagggttagccgacggagccttgtcgccagcctgcctggcctgctcgcggcgtgtgcgtcgtccgtggcgccgcagccgtcgccgcgcccgtcagcgtcacaggcggaggccgccccgcctgtcgcgccggagccgccacctgcggccctgccggcggctgagccggactaccgccggatctatggggcgatcaccacggaccgcttttggatcccggcggtgaacctccggcgcatcgatccgcggttcctccgtcgcgaggtcgtctatccgcgcgatgacgagccgggcaccatcgtcgtcgacacgaccgcccgctacgcctacctggccctcgagggccgccaggcgatgcgctacggcatcgccgttggccgcgacgaggccttcaatctcactggcgaagcctttgtcgagcgcaaggccgcctggccgaactggcgcccgacgcccgacatggtccggcgcgatccgcagcgctacggcccgttccgcgatggcgtgccgggcggcggccgcaacccgctcggggcgcgggcgctctacctctaccaggacggcgtcgacacctattaccgcctgcatggcacggtcgagccctggaccatcggcaccatggcctcggcgggctgcgtccggctgatcaaccaggacatcatcgacctgtaccagcgcgtcccgatcggggcgcgggttgtgatccagccgctggacgtctcggtcgcctgagccgggtgggccagccggccgaagcacggcgtagcgctacaaatcagcactccccggcgcgatcaacgattcgtattgtcgcgccatgcagcgcgacgaccgtcccatcaacgcccacctcccaccccatctccgcgagatctgcgacctcctcgcgcgcggcctgctgcggctgcgcagccgcgctgccgaggaagacgtccgcgcggccgggggcgagagcgtggttcgcctacactccgtccccggccagcgccttcgtgcgaaccccaggagagagggagacgcatgacccgcgcgaagccgaacaccaccacgacgacgacagtaaccgccatcccgaagccggacgtgccggggcgcctcgccgcgctgcccggcctgccgatcggcgagttgaaggagcagtggcgcagcctcttcggcacggagccgccgccctacaaccggcgcttcctggagagccgcctcgcataccgcatccaggagctcgcctatggcggcctgaagcctgagacgctggcgaggctcgaggctttgggcgagcagttcgacggcaggaatatcaccctgcgccgtatccgctacgagcagcggccgatcgccggcacgcggttgatccgcgaataccagggcgtcgagcacgtcgtcaccgtcacgcgcgacggctacgaataccagggccgcccctaccagtcgctctccgccatcgcgcgcgccatcaccggcacgcgctggaacggctgggtgttcttcggcttgcggaagcccggcgcatgacccgccgcgacaccgccatgccggcgaaaatccgtaagctccgctgcgccgtctacacccgcaaatccaccgacgaggggctggagaaggagttcaactcgctcgacgcgcagcgggccgcgtgcgaggccttcatcacgtcgcagcgctccgagggctgggtgctggtgcacgatcgctacgatgatggcggcgtgtcgggcggcacgctcgatcgccccgcgctgaagcgcctgctggccgacatcgaggccggcctgatcgacgtcatcgtctgttataaaattgatcgcctgtcccgctcgctgatggacttcgccaagctggtgcagaccttcgacgacaacgaggtcacgtttgttgctgtcactcagagctttaataccaccaccagcatgggccggctcacgctgaacatcctgctgagcttcgcgcagtatgaaagggagatcatcggcgagcgcatccgcgacaagatcgccgcctcgcgcgcgcggggcatgtggatgggcgggccggtgccgctcggctaccgggtcgagaaccgcaagctcgtggtggacgaggccggcgccgctacggtgcgccgcgtgttcgagggcttcgccgagatcggctccgccacgcggctgctgccggtcctccgcgccgaaggactcgtcaccaagaccggccggcccttcgacaagggggcggtctacaagctgctggtgaaccgcacctttctcggcgaggcggtgcacaaggggacgtcctatcccggcgagcacgccgccatcatctcgcgggagctttgggatcgcgtgcacgccatcatggtcgagagcccgcgcgcccgggcggcgaagaaccgcgccaccgcgccggcgttgctccgtggcctgctgttcggtccggacgggcgggcgatgtcgcccacccacacccggaagaaggggcggctctaccgctactacgtcagccaggccgtgctgcagggcggggcggacgacgcgccgctccggcgcctgccggccggggagattgaggggctggtgctggggcagatccgggcgctcctgcgccagccggaagtcgtcgtcggcacctggcgggctgcgcgggaggaggcgccggacctgaccgaggccgaagtgcgcgacgcgctcgggcggctcgatcccctctgggacgaactgttccccggcgagcaggagcgcatcgtgcggctgctggttgagcgcgtgacggtcaccgacgcgggcgcggagatccggctgaacctagaggggctcgctgtgctggcgcgggacatggtggcgcagaagccgcgggaggcgatcgcagcatgaccagcgtgacagtggtggtgccgatgaccatccggcggcgcggcgggcggaagcagatcatcgggccggatggagcgccagtgctggctcggcaggacgggccgggcgtggagaccactagcggcgatcccaccctggtgaaggcgctggcgagggcgttccgctggcggcggatgttggaggagggccgctgcgcctcgatccgcgaactcgctgcgacggaggggatagatcggtcctacgtcggccgcttattgaagctgaccctgctggcgtcagctacggtcgaggcagtgctcgacgggcaagtcgaacccgacgcaacgctagcgaaattaattggcgtacggacaacgactggcggcgacgcacacccggctccgaacgctgatcttccgaagcaagcctcctgtccgctgaggctaagaccaacgacagggtgaaaaaagggatcgccccggcgttgccgccggggcgaagaaccttcagtggaaaaccactttaccgtggcttccctaccgactcccagagcggaataaaacaatagtttgaagtctggtcaaggtgtcatcattgcggaaactatcttccttcgggagcgcgtatggtgtcggttcgtgtcctggcagtcgacctcggtattgcatcctgcggttgggcgctgatcaatgacgctggtgagaatggcggaatagtcggctggggggttcgtatctttgacgcgcccgaaacgcccaaggagcgcacgcccacgaaccaactgcggcgtcagtatcgtggacttcggcgcgtcatacggcgccgaaggcagcggatgaatgagatacgcaagctgctcgcggcacgcgccgttctgccgaacgacggaaagcagagccttgcgcggctccccttcgatccgtggagccttcgtgccgccgccctcgaccggcgccttgacggtcctgagttggcggtggtgctgggacacatcgccaaacaccgtggtttccgttcgaacagcaagcgccaatcgaatgccgcggccgaggattcgaagatgctggccgcgatcgaggcgacgcagcagcgcctgacgcagtatcgcacggtcggcgagatgttcgcccacgatcccgccttcgccgtccgcaaacgcaaccgtgacggcgactacacccgctccatcctccgtgccgatttggagcacgagatccgtgtgatcttcgagcgccagcgcgcgctcggcagcacacttgcggatgattgcctccacgatgcgtacactgcgctcgccttcacccaacgcccactggccgacagtgaggatcgcatcggattctgccctttcgagcccgaccaaaggcgcgccgcaagacgatcctacagtttcgagatgttccgattcctctcgcgcctcacggcgctgcggatcggcacagggcggaccgagcgcgcgctgacggcagaagagatcgcccgcgcctcggacggcttcggtacgcagcgaggcatgaccttcgcgcgcctacggaatattctcgagctcgccgacgccgaccgctttcccgacatcccggccaccgatgaacgcaagcgtgacgtcgtgaaccgcagcagcggcaatggctgcatgcagggctccgccgcgctccgcacggcgatcggcgatgctgcgtggaaggcgctgctggcgacgccgcagaagctcgaccgcatcgccttcatcctcagcttccgagaaaccgcggacagcatccgcgcaggcctcgacgcgcttgaactgccggacggcgtcgccgaggctgtgatggccggcctcgatcagggcgccttcggcgactttgcgggagccgggcacatttcggccgaggcgtgccgcgccatcatccccgggttgcgtgcaggcatggtgtactcggacgcctgcgccgcggccggctacgaccacgcgcagcggcccgcgacgcgcatcgaggacatcgcaaacccggtcgcccgcaaggcgatcagcgaatgcctcaagcagatccgcgccgtgatccgcgaatacggcctgccggaccgcatgcacatcgaactggcgcgcgatgtcggcaagagtgccgaggaacgcgacgaaatccggcgcggaatcgagaagcgcaacaaggagcgcgaccggctgcgcgctgccttccgcgagaccgtggggcaagacccgcgcgacggcacggaggacatgctgcgcttcgaactgtggagcgagcagcccggccgctgcctttccaccgaccgtgccatcccgccggcagcgatcctcgccggcgacaacagcgtgcaagtggaccacatcctgccgtggagccgcttcggcgacgacagcttcgtcaacaagacgctgtgcttcgctggcgccaaccaggaaaagcgcggccgcactccctatgaatggctgaaggacgacagcgcggcctgggaaggcttcgtcgcgcgcgtcgagaccatcaagtctatgaagggccgcaagaagcgcaactacgtgctgaaggatgcggcttcggtcgaggagaggttcaagtcgcgcaacctgaacgacactcgatatgccgcgcgcatcgtcatggaacatttgcgccggctctaccccgccgatgacaggcgctacgtcttcgcccgcccgggcgcgctgaccgaccggctgcgccgcgcctggggcgtgcaggaccttaagaaggtgctggaatccgatcgcgagaagcgcaaggccgatgaccgccaccacgcgctcgatgcggcgatcgtcgcagccacgagcgaatcggcgctgaaccgcctgacccgcgccttccaggaggcggaggcggcggggtcccatcgtgacttctcgggcttcgcaccgccctggcccggcttcgtcgaagagctgcgcgagaagttccgcaacatcctcgtgagccgcgccgagcgcggccgcgcgcgcggggaggcgcacgccgcgaccatccgccaggtgttgcaggaggaggacggcgcggcggtctatgagcggaaggcggtgttgggtctgacggcaggcgaccttgcccgcgtgaaggaccctgagcgcaacgcggcactgatcgaaagcctgcgcgcctggatcacggcgggcaagccgaaggatgcgccgccgctctcacccaagggcgaccccatcgccaaagtgcgactccggacgaacaagaaggtggatgtgccggtgcgcggcggtgcggccgatcgaggcgagatggtgcgggtggacgtgttccgcagacgcaaccggcgcggggagtgggaattctacctggtgccggtctatccgcaccaggtggcggataaggcaggctggccggcgccgccggatcgggcggtggcagccggtaaaccggaggaccaatggcccgtcatggatgacggctgcgagttcctttggagcctgaaccagcggtcgttcatcgaggtggagcagagggacagcacggtcatcaccggctacttcatggggctggaccgcagcacgggtgccatcaccgtggccgccccccattcgaccaaggaactcgcgcgcaatctcggcgcgcgcacacttcggcgcttcgagaaattcagggtggacaggctcggccgggtcttccttgtcgcgcaggaaagacggacatggcatggcgtggcctgcatgttagccgccccgcgcggctctccctgatcgaccggcagatgctggtggcgcaggatgacggcgaggtgcgcctcccgatcgaggatatcgcctatgtcgtgctcgacacgccgcaagcgacgctgacgacagcgctgctgtccgcatgcatggaggcgggcgttgcggtgatgactacggacgcggcacatcggccaagtggcctgatgctgcccttccaccgccaccaccggcaggcaggcgtggcaaatgtgcagaccggcgtctcggaaccgctacgcaagcggctgtggcaggcggtggtgcggagcaagatcgccaaccaagcggcggctctggattcgctcggtcgtgcaggcggggcggggctgcgcgccatggcgcggcaggtcggctctggagatgcgggcaatgtcgaggcgcgcgcggcgcgcgagtattggagggcgctgtggccggacttccgacgcgaggatgaggaggaccgccgaaacgcgctgctcaattatggctacgctgtgatccgtgctggcgtggcgcgcgcgcttgtcgcgaccggctttctaccggctttcggcattggccatgccagcgtggcgaatgccttcaacctagcggacgacatggtggaacccttccgtcctttcgtggaccgactggcttggcgggtcgcagtggacggcgcgccggggcgagcaccgatcacgctcgaggaccgccgcgccatggcgggggtgctgatgacggaggcgcggatgggcaagcagaccgtgacgctccttgtcgcggccgaggccatggcggattcgctgctgcgcgcgatggagcaccgtacgccggcggcgctggtgctgccggcggtgccgccgtgaggagcacgcatgcgggcggaggaggtacggatattgtggctgttcgtgttcttcgacctgccggtcggcaccaagcccgaacgccgcatggcgacgcgcttccgcaacttcctgaaggacgacggctacatgatgctgcagtggtcggtctatgcgcgcgtttgccgcggggaagacgcggtggacaagcacattcagcgggtgacgaagaacctgccggccaagggcagcgtgcgcgcgctgcaggtgacggaccgtcagtacaaccggatgcgtttgctgctcggggaagcgaaaaaaatcgaaaaggtcgcgccggcgcaaatggttttgctctgatttcggcccgctccttgggcgaaaaccagagcaactccagtagcttgtagagtagagaacctacctgatgggagtcggtagggaaaccacggcgcatcccgcatcatctcacttccgcagcgcctcgacccccaggttgcgccacatccagccaacatcgtaactgcccatcggatcgcccggtggccggtgcgcggcgtggttttccaagctcttgatccacgccgccaccttctcgcgccctttcggcgtcttcgccgccgcacgcggcgacttgcccccgagagccgggatcggctcatccagcacccggcggtaatgcgcgtcgagcgtctgatgcaccgcggcgtgttcctgctcgggcgtcaggcccgacggcggtggcggcggtcgctcctcggtcagcatctgatcgaggtccgtgtgctcggtcagcggcagcccgaccaggcgctccagcagcggggccagcagcgccttgccctgcgctgcacgggccgccgagttcgtctccagcgtcagccgccgtcccttcaacgagagcgtgcccagcacaagggaaccgtcctccatcgtgctgatgaaactctgcccggccggacgacggggcacggccggcgccttcgtcccgggcgccgccagccagttccagaagccggcattctcctgccggagcgacggcaccgtggcgagagcaccccgcacctgggccgccgtcaccttcggcagcagcggaaagtgcagcagcgtgaaggcgatcggatcgccctcggcattgaccaggtgcggccggtcgcggccctgcgcctgcttgagacccgcatcgagccatgcgttggtgaacatgaaggccgcttgcgcgagcatccgctccggcgtgaactccgccgccagtagtttctcgtccgcggtcaccccgagctccgcgatgagcgccgcggcttcgcggggcgccttcgtgcgaatgcggccgagggaggcgagcagcgcgtcgctggtctggtgatcgaacaccatgagcgtgccgctgatgacgctgtgttggcgcagcgggatgacccgcgtggcgatgcggtcccacggccgcagcccctgggaaccgcgcctctccatcacccgcaccggctcgcccccgcgcatgaggtcacgcagcagcatggactcgccgggcaccaggccgctcacctcgtagaggctgatcatcgagttgcagagaccggcgatgtactcgcgggtcgccacgctctccttccagccgcgccggcgcaggtagtcgtcggcgatgttgggctggcccggcgcgtcggtggcgagcagatcctcgaacgcggcaccccagagggtcgagccggcatagtcacccagcgtccgtgtgctgtcggcgacatcaatgccggcccccgcacaggccttggccgcgtgacgttcgatcagggcggcgagcgcgccccgccactcatcgcggcgcgcccaggcgatcaggccggaaatgtcgtgtggcacagccaggctgggttctccggtgttggcgcgggccatcgtccttcaggggttcgcggcccgcaagcacatggcggcattcggcgaaggttgcgcctcgggcgattggtggggcatgcgcttcaccaactccaccacctttctgccgcagaaacccgaggatttccgcggctttcagcctggctggtaaatcggccaagtcgccaggttcagagaaaccggggccggagagagccgcttccggccctcgttccggttccgcatccgccagcccgcgcgcgaaagcctcggaaaacctgcgcctcacggcgcgccgttcaggcggggagaggattcgcggcgtgcagaggtggcgtccccgagaggattcgaacctccgaccccaggattaggaatcctgtgctctatcctgctgagctacggggacccactatgatcagcataccacgcgctcagcgccgccggaaccgctccaccgcccccaccagggcggtccgcacgcccggctccagcgccgaatgccccgcatccggcaccaccgtcagccgcgcgccgggccaggccgccgccagctcgaaggcagtctcgggtgggcagaccatgtcgtagcggccctgcacgatctcggccgggattcccgccagccggccgatccgcccgagcagcccttccgcgggcaggaacagatcgtgcgcgaagtaatgcgcctcgatccgcgccagccccagcgcggtgcggtcctgcgcgaaggacgccaccgtctcgggcgagggcagcagggtcgagcacgacccctcgtactggctccaggcgcgcgccgccggcaggtgcaccgacgggtcgggatggcaaagccgcgccaggtacgaccccagcaggtcgccgcgctcgtgcggcgccaggtgctcggcgaaggccgcccaggcgtcgggaaagacgcgccgcaggccggtgaggaaccactcgacctctgccctgcggcccaggaagacgccgcgcagcacgcagcccgtcacgcgttccgggtgttcctgggcataggccagtgccagggtcgacccccaggacccgccgaacagcagccagcgctcgatgccgaggaaccggcgcagcgtctcgatatccgcgaccaggtgcggcgtggtgttgtcccgcagttcgcccagcgggcgcgaccggccggccccgcgctggtcgaagatcaccacgcgccaatgccccgggtcgaagaagcggcgatgcaccgcgcccgcgccggcgccgggaccgccatgcaggaacagcaccggctggccacgcggattgcccacctgttcccagtacatgacatgcccgcccgaaagcggcagcaggccggtctcgtagggtgcgatgtcgggaaagaggtcgccgcggggcatggccgcgatcatgtgcccaaccgcgccgggcttcgcaatgggtcggcgtcgccgcggcgattccggcgcgacgaattctggtctaagatgacggctcaatggcagagacgccgtccacctcgccgcgttccgccgccgccgggcatgtcgcctgcggcgtcggcgggcgcgagggccgccagcccgccttccgcccgccgccgcccgaacaggcgccggacctcgacctgcgtccgggcgagccggtgcgctcgaccatgtcgcgctggctgcagcaatgcccgcattgcggctatgccgcgccgtcgatcgccaaggcgcatccggcggccgcggcggcggtctcggccgcgcccttccgcgcgctgatcgccgatgccgcgcacccgccgctggcccgccgcttcctggcctgggcgcatgtgctggaggagaccggcgcgctgcacgccgccgccgaggccacgctgcaggccgcctgggtggccgacgacgccggcaagccggacctggcgcgcgcctggcggcaggaggcggtggcgctgtggcgctccgggccgccgctcgacgccgagcagacggtgcgcgttgtcgatgcgctgcgccgcgccgaggcctggggggatgcggaagcgaccgccgccgaactcgccgggctttcgccgcccgaggcggtcgggcaggtcatcgcgctggagcgcaggctggtcgccgcgcgggattccggccgccacaccgtggccagcgcgctgcccccgccctcgcgtcgcccgcacgcgacgcaccagcggcgcgacatcgccgggggcggcatcatcgcctggctgcggcggctgttcgggcgcgggtagcgcgtcggcaggttccgcggcggtccgtccccggaaggtgatcctgactggtcggagatgccgtcccgttcagcgccgggacgcctcgggcggctttcgcatgccgcgatcacgaccgggtcccgcgaggcgtcttgctcgcttgccccggcctgtcgccgcgccgcgcgggcgcccgccgtgccggttcgtccacgccgtgccgttgcgtcaaagcgctggcgtgccgcgccgcgagttgcggtgacgaccatgggggttgcctcagccttgtcgaggcgccgcatcgggcgccacgatggggaccggcagcagccgcggcctcgccgcccgcccggaacctcaccccgtgcagcacgccgccagcgatgcagcaggcccgtgcagatgccgtgccgccgcgacaccgccgtcaccgtctcgccgggctgaagcgtctccgccaccagccggaccttctcctccacgctgaagctccgtccgctctcgccaccggcgacaatcccgaaccgctccgacgccacggtgccagcaccgatgctggcaccagtgccagccgttcctctcgccatcgcctcacctccgcgatggccttcctctcagcccccagcacgccaacacacgaagggccgcggggcaacgcttacccgatctgccatgctcgcttggtccgtctggagacgacgccatcagcagcgcgccgcacaggctcactggcaccaccaacaaaagcaactgtaatactaggccgccggcaccgtgggcagcgcccgcttgggccgctgcgcggcgatgcgcgtgagcaccgtgtgcacgtcgtagggcttgccgatgatctcgaactcgtcggcgccgccatgttcggccagcgcctccgccgcatagcccgaggccagcagcacgccgatactggggcgcagcctgcgggcctcgcgcgccaggtccacgcccgtcatcccccccggcatcaccacgtccgagaacaggatgtcggcctgcgcaccttccttgagcagcgccagcgcggtcggcccgtcgggggcggccagcacggcgaagccggcatcctgcagcatgtcgaccgccacggcgcgcaccgcgggctcgtcctcgaccaccagcaccgaccagccggcgcccgaattggcctggatgcgcggcggcggcgcggtgccgcccaccgcttcctcggtggcggagccgagcggcaggtagagcgtgaccgtggtgccccgccccggcgccgactggatcgcgacatgcccgccgatctggcgcacgaagccgaagacctgcgacaggccgagccccgtcccctggcccgggcccttggtggtgaagaagggctcgaaggcgcgctcgcgcacctcgggcggcatgccggtgccggtgtcgcgcacctcgatcgccacataggggccgggctgcgcctcggtgttgccggcaagggcctgttcctgcagccaggcgcggcgcgtcagcacccgcagcttgccgccgcgcggcatggcgtcgcgcgcattgatcgcgaggttgagcagcgccgcctcgagctgcgcggcatccgcgcggcaggccggcagcttctggtcgagcgagagctccaccgtcacgctctcgtccagcgcccggcgcagcagcggcatgaagtcccgcatcagggcattggcatcgacattggtcagcgtcagcggctggcgccgcgcgaaggcgagcaggctggcattgagccgcgcgccgcgatccaccgccgtgaccgtcgccgccagaaggcgcttggtgcgttcgtccgcgcgcgacccgagatgccgttccagcgcgcgcgccgtgcccaggatggcggtcagcaggttgttgaagtcgtgcgcgacgccgccggtcagccgccccagcccctccatgcgctgggcattgcgcaggctttcctcggccacctcgcgccgtgcgatctcggcgcgcagctcggcggcgttcgccttgagccgttcgagcgattcggcgccgctgcgcaccgcgatccagatgcgccagccggcgaacagcagcgccagcccaaggccccccgccagcgccgcattgccgccgaactgcgtgcccatcgccggctgcacctgcgccagcggcgcggcgaacacgacgaacagcggcaactccccgaccctctgccaggcgaccagctgcggcgcgccgtcgccgaacgggtcggcggtgatcggccgcggatcgccctgcgcgagggcaaggcgcagcggatcgcgctgcgccagcgtgccaagcgggccgcccccctggcgcagcagcacctgcccgtcccaacgcagcagcgcgaagcggccctcggccaccgcgatccgtgcccatgcggccaggaaggtctcggccttcagcacgcccagcagggcaccgtcgggcgggcggccctcgggcgcacggccgcgcgccatcagcaggccggcaccctcgccgaagatctcgcgcggcgcggggtcgaagaccgggccgcgcagcccctcgcgcagcgcgcgcacgctgtcgatcccggagaggtccgcgagcacggcgggctcggcatggccggacagcgcgacgcgcccgtcgggtcgcaccatcaccagcgtcatgtcctccggaagctggctctcgatgcggcggaggtccccctgcagcgcggtgcgccgtgcctggatctgtgtccagttcagcgcggcggtggcgtcgtcgagccggtccagcgccatggcgcccgactgcagcacgcgcagcgcgtgttcccgcgcgatcgcggccgcgccctgcaccagccttgccgattcgtcgcgcgcatgggcccggtcgttcacggtcagcagcgccatcagcgccagcggaatggccaccgcgagcacgagcacgatcaccgcggagaccggcgccggcctggtgcgtcctgtgcggggtggcgccgtgttcaaccgagaccttcctcgacccttgcggcgccgcgcgtcaccccggagcggccctggccctggaccgcggggtcggcgcagcagcgacggcagcatcccggggcagccgggggccgtcacgccgccgcatcaatgcaacaggctgccgcatccggcgttcggcgatcaagacctcgctacggttgcgtcactccgcgggcagcgcggccaggcggcgccggcgccgcagccgccactcctgcgcgagtgccatcagggaggtcagcagcatgaaccccgccgcggcaaagaagaccaggcgcggctgcccgccatccagcagccatccgaacagcaccggaccgaccatgccgccgaggttgaagccggtcgagacgatgccgaaggccgcccccgcctggcccggcggggccgcggcgcgcaccagcatgtcgcgggagggcatgatcatccccgagaggaacccggctgccgccatcaccggcaccagcacgaggccgggcagggcgccgctgcccaccagcagcaccagcgcggccgccgaaccgaagccgccggccgccaccaacccatggttgcgggtgcggtcggcgacgatgccgccgaacagcacgccgccggcgctggcgaacaggaaggcggtcagcgccgcattcgccatggtcagcgacagcccctggccatccacccaggcggcgaccgagaagttctggatggcgccattggccagcgccagcgtgacgaagaacagcatcatcgccagcaccgccggcgagagcaccgcgcgcacgccgccccccgccgtgcctgccctggccgccgccgcccgcggtgccgccgccggcgcgcgggcgaacagcagcggcaacgccgcgatcggcccgagcagcccggccgcgatcagtgccgccgacatcccctgccaggccgcgatgccgagcacgaaggccggcgcgatcgccccgcccaggaagccggcgaaggtgtggatggagaaggcccgcccgaccctttcctcggcgatcgacgcccccaggatcgcgtagtccgccgggtggtagacgctgttcgccagccccgccatcgccgccgcggcgatcagccaggcataggtcccggtcagccccagcaggatgaaggaaagcccgcccagcatcagcgccgccgccagcatccgccgcggcccggcgcggtccaccacgaagcccatcggcgcctgggtgaagaaggagacgacattgaacgcggtcagcgccaggccgagttccacataggacacgccgaggctgtcccgcagcagcgggaacagcggcgggatcaccaggtaatgcacatggctgacgaaatgcgccgcgcagatctgcgacagcgtgcggcgttcctcggcggtccagcctgcggccatggtcaatgcgcctccgcccaggaatggccggtgccgatctcgaccgccaggggcacgcgcagcgtcgcgacggattccatgatgtccttcaccagcgcggatgtcgccgcgacctcggcctgcggcacctcgaagaccagctcgtcatgcacctgcagcagcatccgcgccctgagcccggcctcgcgcagcgcccgcggcaggcggaccatggcgcgcttgatgatctcggccgcgccgccctggaagggggcgttgatggcggcgcgctcggcgccggcgcggcgcaccgggtccttggtggcgatatcggggatccagagcttgcggccgaacggggtgcggacgaagccatgggtgcgcgcctcctccttcagccgttccatctcctgccggatgcccgggtattgcgcgaaataggcgtcgatgatggaccgcccctcggccggcgggatgccgaggcgcgaggcgaggccgaaggccgacatgccgtagatgatgccgaagttgatcatcttggcgcggcgccgcgcctccttgtccacgccgccgggcggcaggtggaagatctcggcggcggtgcgggcgtggatgtcctcgccctgctcgaaggcggcgcgcagcgtgggcacctcggccagatgcgcgagcaggcgcagttcgatctggctgtagtcggccgccagcagcacatgccccggttcggccacga

SEQ ID NO: 4289 - DNA, 17471 bp, synthetic construct
  source 1..17471: mol_type = other DNA
  misc_feature 1..17471: note = Synthetic
gcattcggccctgtggacatcctgttcaacaacgccggcatgaacatccgcaaaccgttcgaggcatacacggaggccgatttcgacgcgatcgtcggcgtgcacctgaagggcatgttcttcatggcgcaggcgctctacccggcgatggtcgcgcgcggttcgggttgcatcatcaatgtcgcgtcccagcgcgggctgaaaggcgcggtgaactccgccgtctattccgccgccaaagctgggatcatgggtctgacacgggcattggcgtgggaatcgacaccgaagggcgtgcgggtgaatgccatcgcccccggcccgatcgacaccgacctgaccgcgaccatggacgccgcggaccggcaggccttcatcgatgcgctgccgatcggccggttcggcaaaccggaggagatcgcggccaccgcgctgctgctcgccagccccgaaggtgcgttctacgtcggcgccacgctgtcgccgaacggtggggacgtgatgtattgagcctgtccaagacggccattccccgctaatccgagccgcatgccgaccgccgatcccaccaaggcagccgcgcgggcctggattggcgcggaacagcgccttggcctgcgatctgcgcgccccatcctgctgctcaatctgctcggcaccgtgctggcggtggggcaggtctatgccgtcgccgcgctgctgaccgggctttccaccgtctatatcgccatgttcgcgggtttggcgctggcgcgtgccggtttgacatatcttgccgagcgctgggcattcgacgcgggggcggcggctcggcgacggctgcggaccgatttgctgggccggctgctggcggcgggaccggcggtgctgcgcacgcggcactcggccgaactactgtccgtcgtggtggaccgggtggaggcgctggacgggttcttcggccgctacatcccggcgtcggtctacgcggccgcgggaccggccgtggttctgtgcgcggtgctgtgggccgacggctggtcggctctggtgctgctgggctgcggcctgctggtgccggtcgcgatggcggcttcgggcctcggagccgccgccgccgcgcgccggcagttcctggcgatggagcggctgcaatcgcgcttcatcgaccgtatccgcggcatcgccaccatcgtgctttacggccgggcggaggacgaggcgcggcgcctgtccgacgcggcggacgagctgcgggtgcgcaccatgcgggtgctgcgggtggcctttctgtcctcggccgccttggatttggccgctgctttggcactggtgtcgctggcgatccacttcttccaaggccccggcccgctcggcaccgcgctgttcgtgctgctgctggtgccggagtttttcgcgccgttgcgggcgttttccgcggcttaccaggaccggttgcatgccaccggcgcggcggaggcgctgctggacgtgccgccgatgcccccgcccccacctgcgcgggagatccggaccgtgacggccaaggggattagcgtggtgttcgaggatgtgcggttttcctgggacaaatcccggggcgacgcgttgaacgggctgacattccgcatcgcggcgggggagactttggtgctcgccggtccctccggcgccggcaaatcgaccgtgatcgagatgctgctggggttcatccgagcagatagcggccgggtgttgctgaatggggcggatatcgccgacgtggtgccgcaggcgctgtcgcgcttcaccgcctggatcgggcagcggccggtgctgttcgccggatcgatccgcgacaacatccgcttcgcacggccggaagcaaccgatgcggaggtcgatgacgccgcactggcggcgcaggtcgatgccttcgcccgcgatctgcccggcgggttggacacgcaggtcggcgagggaggctacggcctgtccggcgggcaggcgcaacgcgtcgccatcgcgcgggcctacttgaaggacgcgccgctgctgctgctggacgaaccgaccgcgcacctcgatcccgccaccgaggccgatgtgctggaaagcctgaaacgtctggcgatcggccggacggtgatcctggcgagccacgccgcggccgcgcgggcgttcggcgggcgccggttggatattgccggggggcgggcggtatgagcggggatttgctccgaatcctcggtctgtggcgcgggcgggcggcgtggctgctggctggcatactggtgtcggttctgggcctaatggcctcggttgggttgatggcggtcagcggcgcggctttggcggtcggcgcactgctgacggtgcctttcgcgctgaggttgctgggcgtggcgcgggtggggctgcgctatgccgaacggatggtgacgcacgcggcgatgttccgagcgctgtcggatgtgcgggtgtggtttttcaggaagttggcggcggggtcggcggggggcctcgggttccggcgggccggagatttgctggcgcggctggtgggggatgtggaggcattggacgggctttacctccgcatcctggtgcctctggccggtgcgctgttgctcctgccggtattggtgtcgctgatcgacccaccgttgctggcgttcgatgtcggggcgttgttcgtgctggcggcgttcgtgctgccgtggtcggccgcgcgcgcggcgcgggacgccggcaccgcgctgtcgcgcgcggcggcggacctgcggatccggcgctggacgcgctgaccgggctgcgggaagtccgcgcgttcgccgccgaggggcggatgctggcgctggtgcaggccaaagaagccgcgctcctgtcggcgcaacgggcgctggcggggcgcacggcgctggcgggcgcggttgcgtttctggccggtcaggcggcgattttggcggttctgacggcggcgtccgtttcgctcgtcacgttgttcctggtggtggccgccttcgaggccatcggaggcctcccccgcgccggtgcgctgcttgggcatgccgccgccgcggcacgacgggtgctggaggcagcggacgcgccggtgccggtgcccgatcccgcaatgccggcggcgatgccgtccgggacgcggttgcggttcgaaggcgtgggattccgctggctgccggaccggccggcggtgttcgacgggttgacactggacattccggctggcgcgcgcgtggcgctgctggggccttcgggggtggggaaatcgaccctggccgcgctggcgttaaaggtcgcggcgccctcgtccgggcgggtgctgctgggggagacggatatcggtttgttgccagcggctgcggttcgggcgcggatcgtgtggctatcgcaggcgactcatctgttcgacgacacgatccgcgcgaaccttctactggcggcaccggaggcgacggatgcggcgctgtgggcggcgttggaagcagcccggatcgccgatgtcgtgcgggcgctgccggacgggctggatacctgggtcggcgagggcggggcacgcttctccggcggtcaggggcgccgactggcgctggcgagggcgttgttgtcggaggcgccgatcctgatcctggacgagccatgcgccgggttggacgcggcgacggagcgggaatttttgtccgtgctgaacgatacggcggaggggcggacggttgtgctgatcacgcaccggttggtgggcgtggaacggttggaccggatattccggttgtccggggggaaggctgtggcggcggcggggtagcagcgcgcggacctgggcgatatattgtcgcccatgcgtattgtcacggtaacagccgtcggactcctgctgaccacccagccgacacaggccgcgccggtgcggtgtccggagaccgtggcggtggaccagcacgtgcatgccctgccccccggcatgaccgcgttcgacagcgaggctcggcacgcctggacgaatgcgcaattctccgaggggccgcccgaccggcaggcttggctggcgccggacagttcgcgcaccagcggtaaagttgtcacgaacctgtggaccttcgttccgtccggcgacgggatttggctgtcgtgcgggtataccgggaccagcctcgtgctgtcgtttcgactgacggacacgatcaggacgtgttccgtgaaatacgatgcgaatacttcgccattgtcagcgaccgcgatcgattgcaaataggccagtaaacagaatcccgtcaggacatgttgccataccctgacggtaatccgacggtgatttcgaaaaaccaccttgccgtggctttcctaccgatttcccgttgctactttccccataatagccttccctgtcaagcgctatcgcgggcaagaggaaatgatcatgcgtattttcggtatcgacggcgggatcgccacgatcggttgggcggtcatgagccaaaccgatgaagcaatggagatcgtcgccgcgggcacccgtactttcgacgcaccggaaacagacaagacacgcacgcccacgaacgccgtccgacgcatgcaccgcggccagcgccgcgtgatccggcggcggcgccagcgcatgagcgaactgcgcgtactgctgcatgggttggggatactcccgagcgcgcagcgggatgtattggccccgaaaaaaggcgaggcacaccgcgatccctgggcgttgcgcgccgaagggctggagcgggcgctcacgggtgcggagtttgccgccgtgctcgggcacatcgcgcggcatcgggggttccgctccaatgccaagcgggaggctggggccaacgccaacgacgagacctcgaagatgaaaaagggcatcgcggtcactaccgaacgccgcgcggcctatcgatcggtgggcgagatgttcgccagccatccagaataccgggaacgaaagcataatcgcggccttaacttcgaccggtccatcttgcgcggcgatcaggaagacgaaatccgcacgctgtttgccgcccagcgccgcctgggcaatgcggccgcgaccgacgcgtttgaagccgaatacgcccgcatcgcgttctctcagcgcccgttgcaggacagcgaacacatggtcggcccctgcctgttcgaagccggggaaaaatgcgcggcacgacggtcctacgcgttcgagatgttccgcctgctgtcccggctcgccgcgatcaaactgaccacgcgcgggccagaccagttcctgaccgccgagcagatcgcactggcgactgccgatttcggcaagcagaagaaactgacatggaagtggcttcggcgcacgctcgatttggcctccggcgttcgcttcgccggcatcgccgaaaaggatgaaggcaacgacttcgtcgcccgctccggcaacgccgccgagggcacctatacgctgcgggaacttctgggcgacgccggatggcgggtgctgatgcacaatcccgccctgcgcgaccgcgtcgccgaagttctgaccttccgtgaagaccccgaacgcatccggctcgggctgaccgaggccggggtggaacggccggttctggacgccctgatgcacggggttgaaaccggggcgttcagccagttcaccaaagccggcaacatctccgccaaggccgcgcgcaagctgctgccggcactggcacagcggaaagtctactccgaagcctgcgaagacgtcggctacaatcacgccacccaggcagaggtgaagctggaggatgtgcgcaacccgaccgcccgcaaggccgtgaccgagtatctgaaacaggtccgcgcgatgattcagacttacggcatgccggatttcatccacatcgaactcgcccgcgacattgggatcggttcggaagaacgagacaaaatcaccaagggcatcgaggaccgcaacaagcagcgcgacaagctgcggatcgaactggccgaattgctgctgcgggaaccgaacctggacgacatgatccgctacgagctgtggaaggagcaaaacggcttctgcctctataccggcgatcccattccgttcgacgtgttcgccgcccgcgacaaccggctgcaggtggaccacatcctgccgtggcaccggttcggcgacgacagcttctggaacaagacgttgtgcttcgcccatgccaatcaggcgaagaagggccgcacgccgttcgaatggttcgacgaggaaggtctgaactgggacctgtacgccgagcgggtggagcgctgcaaggagatgcgcggccgcaagaaaggcgccttctacctgcgcaaaaacgccaaggaggtggaggacaccttccgggagcgcaacctgaacgacacacgctacgcgacccgcctgctgctcgggttgttgaagcagcgctaccccggcgtcgaggtgcgggcgcggccggggcaattgacggcgaagctgcgccgcgcatggggactggacgacctgaaaaaggacgcggacggcaagcggctgaacgatgaccggcatcacgcgctggacgccatcgtcgtggccgccaccacgcaatcgatgctgcaacgcttgacgaccgcggcgcaggacgcgatccggttgggcaaaggccgcggtttcgatttcgagaacttgccgcccccggcgatcgggttccgggaggtggtgcgagaagtcgtggagaacgtcttcgtgtcccgcgccgagcggcatcgagcgcgaggggaggcgcatgcggcgacgatcaaacaggtgcgagaggtcgagggggcgtcagtcgtgttcgagcggaagggggtggagaagttaacgctcgcggatttggacctgatcccggtaccggcgccttacggaaagatcggcgatcccgggaagctacgggatgaactggtcgagacgctccgggcctggatcgaggccggaaagccgaagtccgatccgccgctgtcgcccaagggcgacgcgatccgcaaggtgcgggtggcgacgaaggacaaggtcgcggtgacggtgcgcgggggtacggcggaccgaggtgacatggcgcgggtcgatgtgttcgcgaaggcgaacaagcgggggaagcgggagttttatctggtgccgatctatccgcatcaggtggcggatcgggagaggtggccggcgccgccggatcgggcggtaattgcgtataaagacgatctggagtggaccctcatcgatcggacgttccagttcctgttcagcctatatggcaacagcctaatcgaagcctccaaaccagatggcgaagtaatttttggatatttcaagggattacaccgtggcactggcgctattgcgatatccccccatgaaaatccgcgaatcgttcgaggcgggattggggcgaaaacccttctcggcctaaggaagttgtcaattgatcgcctcggcaaacgaaccaacataatgaacgaggtccgtacatggcatggcgaggcgtgcatataacgcagccggcggggctgtcgctggcagacggccaaatcgtcgtcgggcgcgacgacggtgaggtgcggctaccgatcgaggacgtggcctgggtggtcatcgacactcctcaggtctcgctgtccacggcgttgatctcggcctgcatggacgccggcatggtgattgtcctcaccgaccgcacccacacgcccagcggcatgatcctgccgtttcaccggcaccaccggcaggcggagatcgcctcgatccagatcgcagcgtccgtgccgctgaaaaaacgcctctggcaggccatgattcaggccaagattggcaaccaggcggcggccttgaccgcctgcgggcgggattgcacgcccttgctcgcgatggcgaaactggtcggctcgggcgatcccgacaataccgaggcgcgcgccgcccgcgcctattggccgcgattgttcgccgatttcattcgcgacgatgccaacgacaagcgtaacgcgctgctgaattacggttacgcggtcgtccgctcggccgtcgcccgcgccttggtcgcctccggcctgttgcccgctttcggagtcaaccacgccagcatcaccaaccccttcaatctggccgacgacctgatcgagccgttccgcccctacgtcgatcgcgtcgtctggaaaataaccgaccagggccgcaccagcaaaggagcaaccaccgtggaagagcgccgtatcctcgcctccatcctgaccgaaccgaccgcgttcggccgcgaaaccgtcaacctgctggtcgcgtccgaactggcggcggacagtctggtgcgcgccatggagcagaatagcgctgccttgctgcaactgccacgactgcaaccctgatgccggccgagggggaccgtttcgtgtggctgttcgtctttttcgacctgcccgtcggcaccaaggtgcagcggcgcgatgcgtcccgctttcgcaacttcctgaaggacgatggcttcatgatgctgcaatattctgtttacgcgcgggtttgccgagccgaagatggcgccatgaagcacatcgcgcgagtcacgcgtgccctgcccggaaaaggcagcgttcgcgcccttcaggttaccgatcgccaatacgggcgcatgcggttgctgctgggcgaatccaacaaaaccgagtcgctcgggtcccgccagatggtcctgctgtgattttcagctcggcaagaagcgaaaaatcacagcactcccaaaggcttacgaaggagggatcctaccacagggaaatcggtagggaagccacggccgatttcagcgacatatgctcgctctttatatcctaccacagggaaatcggtagggaagccacggcccgccgccgttgcgcaggcgctcaacgagatatcctaccacagggaaatcggtagggaagccacggcgacagtccggttcgcgcgacgaggggcgatggtctcccgagcgcattgcggcgttctgctcgcccctcgccccacgaaccggagggggccagggcccccggttgctcgggaaagccggcggatgtgcggggcggaccctgcggcatttcagtggatggagatggtcggatcaggctcgaccatgacgcggaaggtggagtacctgcgcgtctcggccgccgcgaaacggcgataccttgcggccgcgcggtcaatcatgccacgtctttctccaacagccgcacctcgcgaaaggaaaccacccatgacccaggacatcgacgccctgctcggcttcgcgcccgactacgactccgccatcgcctacatgcgccaaacgcgagagtattacgcggccatcggctacacgacaccttatcgctgggcgcactacatcgatgcgccgttcaccaagctgacgaagccgctcgcgaaatcccgcgtcgcgatgatcaccaccgccgccccgttccagcccggcaagggcgatcagggccctggcgcggcgtataacggcagcgccaagttctacgcggtctattccggggatacatccacagaccacgacctccgcatttcccatatcggctacgaccgtacccacacgacagccaccgacagcaacacctggaaccccctgcccgcgctccgccgcgccgccgcggccggacgcatcggcgaggtcgcgcctcgtttccacggcgcccccaccaaccgcagccaccgcgtcaccgtcgaaaccgacgcgcctgaaatcctggcccgtgtccgcgaggataaagccgacgtcgccgtcctgatccccaattgccccgtctgccaccagaccatcagcctgaccgcgcgatatctggaggccaacggcattccgactgtcgtcatgggctgcgccaaggacatcgtcgagcacgctgccgtaccgcgcttcctgttcagcgatttccccctcggcaacagcgccggccggccgcacgatgtcgcgtcgcaggaccagacgctggaatacgcgctgcaagtgctggaatccgccgccgggccgcgcaccacgatgcagtccccgctccgctggtcggaaagcgccgactggaagctggattatcttaacctggaacggatcggaccggcggaactggccgctcgccgagcggagttcgaccgccaaaaagaactggcgcgcccgaaccgcgtcgagaaggcagcataacgatgtccgctcgcccctacgcgggagtccgcattctggacttcacccaggtcctcgccggcccctacggttcctatcagctcgcgctgctcggcgccgatgtgatcaaagtggaacggatcggtggggaggatatgcgccgcaccccgctgtctcgcgaatgggcggaccgaggcatggcgccgtcctggctggcgatcaacggcaacaagaaaagcctgacgctggacctgcaaaatccggaagccaaggacatcgtccgcaagctggcggcgaaggccgacgtggtgatggagaattttcggggcggcgtgatggatcgcctcgggctgggctacaaagcgctgtccgaaatcaacccgaagctgatttactgcgccatttcaggcttcggccaaaccggtccatattcgcatgaggccggctacgacggcaaaatccaggcactgtcgggcatcatggcgatcaccgggcacgccgaaatgggaccgacacgcgcggggttcgcggtgtgcgatgtgctgtcaggcgcgacggcggcgttcgcggtgtcatccgcgctgttccagcgcacccataccggcacggggcaattcatcgacgtttcgatgctggaggcgagcctcgcgttcctgtccacccaggtcgccgatttcaccgtcgccggccatcaccagcaccaggccggcaaccaggcgatcagccgcaaagtgacggccaacctgttccaggcgaaggattcctacctcctgctggcagtgaacgacgagaaacaataccgcaacctgatgaatgccatcggctgcacgcaggtgttcgacgacccgcgcttcgccgactggttcacccgcaaggacaacgaagccgcgctgcgggaaatcatcgaaaccgcgctacaggccgaagacgccaaaacctgggagccccgcctaaacgccgccggcgccccgtgcgccagcatctggaagatcgaggaaattatcgatcatccgcaggttgtcgcacgcggcgtcatgcagacggtagacagtccgtacggaccgttacggttgatgggttcgggtttccagatggcgcatggcggtggaaagctcgacaccgtcggtccggctctgggggcggatacgaacgcgattttggcggagatcgggtacgacgcagccgcggtcgcgggactgcgggaacggggggtggtttaaccgcctccccaacgaaaaaggccgctccgaagagcggcctttcccctaatccaagccgtaaggcttgaattacatgcccatcagcatcgcggaggtcttgtcgtccgccttgcccgtcaccttcagcttgtgagccttctggtaagaagcgatcgcggcggcggtcttcttgccggcaacgccgtcaaccttcagcttcgcgccgttcttgttcagcgcggattggatggcggcggtcttttccttggcggtcatcggagccggagccggagcggcgacgggggccggggcggcagccggagcggcggccatcttgtcgtcggcgcaagcggcgaggccggcggtcagcgccaagccaacgatcaaaccaaagcgggtcttcatcccagtcggggtcgcggtcatacgattcgtcctttccacattaccagaggcggtaagcccctccgtgatgggaaaccatccctgtgtcaatgcccggaatacagaaaacgacatagtttccgcctcttgtcgtactccggtcgcataccgcactctggccgcgaatggaggaacgaccgcatgtcacaaaacgaacattgggtcggcacatggacggccgcaccggccccggcggacggcgtggccctcgccaacctgaccctgcgtatgaacccgcgcatcagcctcggcggcggcacattccgggttcggctgtcgaatgcttatggcaccggcaagctgcggatcggggcggcgtatatcggccgccgagcgagcggggccgcggtggtgccggggtccaacaggcagatcacgttcggcggcgcgaccgaagccaccatcgccatcggcgcgattctgatcagcgatcccatccagatggaactcccggcgttggccgatgtcgccgtcagcatttatctgcccgataacattcccgcgagtttccagatcactggccgctacgcccgccagaccaattatttgtcgcccctcgggaaccacgcggcggccgagaacatgccggtcggcaagctggtggacgattggtacatcctgagcggcctggatgtcgtgaccgaggcgacgacgggcgggatcgtgacgatcggcgattccctgaccgacgggaatatttccacccatgacgcctattgccgttggccggatcaactggctcggcggctgttcgcgcggtccggaggccgcacaatggccgtgatgaaccagggcctcggcggcaaccgcatcctgcacgacgggcgcggcagttccgggctgcggcggttcgatcgcgacgtgctgtcccagcccggtgtcacgcacgcgatcatctgcctgggcatcaacgacatccgcaaccgcatgggcaaggcggacgagaacgtcaccgccgaccaaatgatcgccggcctgaagcagttggcgatcagagcgaaggcgcgcggcatcaaattctacggcgggacgttgccgccattcgagaacgagacgttcttccccggcgcctggacaccggagggcgaagccaagcggcaagcggtcaacaactggatccgctccggcggcgccttcgacgcggtcatcgatttcgaagccggggtgcgcgaccccgatcacccgacacggatgctgccgatctacgactgcggcgaccatctgcatcagagcgatgtcgggtacaaccggatgggcgatatcatccatctgtcattgttcgactgaccggcggaaacggttgtcatggcgagtgccctgcgccatttacccgccatgacaatccgcacccgcttcgcccccagccccaccggcctgctgcatatcggcggcgcccgcaccgcgctgttcaactttctgtactcccgccacgaaggcggcgccttcctgctgcgcgtcgaggataccgaccgcgagcggtccaccgacgaagccacgcgagtcatcctcgaaggcctcgattggctcggcctcgatcgcgatgagcagaccgttttccagtccacccgcgcggcgcggcatgccgatgtggcgcgcgaactgttggcggccggtaaagcctattactgctactgcaccgccgacgaactgaagcagatgcgggaactggccgccaaggaaggccgctccccccgctacgacggccgctggcgcgatcgcgacccgtcggaggcgcctgccggcatcgcaccctccattcgcctgaaagccccgcgcgagggtgaaacggtggtggaagacctcgtgcaaggtaccgttcgcgtcgccaacgccgagatggacgacatgatcatcctgcgcagcgacggcacgccgacctatctgcatgcggtggtggtggacgaccacgacatggggatcacccatgtcatccgcggcgacgaccatctgaccaacacgttccgacaggtgcagattttccaggccatgggctgggacctgccgcgcttcgcccacatcccgctgatccacggggccgacggcgccaagctgtccaagcgccacggcgccgtctccgtgctggagttccgggagcaaggcttcttgccggaagccgtctgcaactatctgctccgtctgggatggtcgcacggcgatctggaggtcgtgaaccgggacgacgcgataaagctattcgacatcgccgacgtgaatcgcggcgcctcccggatggattatgccaagctgacgaacctgaacggcatctacatccggcaggccgacgacgaccggctaacgaagctggtgctggaacggttgtcgcaccgcccgcaactggctttgggggcgaacgcggcacaccggatacgcgcgctgatgccgcagttgaaggaacgggcgaagacgatcgtcgagctcgccgacgccgctgcgttcctggcgcatccgttgccgctgccgatgcagccgaaagcgctggcgttgctgacgccggaggccaagctgctgctgcgcgatgtgggaccggctttggcagagtcggattttacgatcaccggcctcgacgccgctttgcgcgccttcgccgacgccaccggccgcaagctcgggcaggtcgcccagccgctgcgggcggcgctgacggggagcaatgtcagccccggcatcgacgcgacgctggccgctttgggccgggacgaggctttggctcggatcgaagccgcgtccaaataattattttagggcgtttgatctgcgtcaacgcacttccgaccggttgcgaccagattagttctcgagaagcaggcaagcctgtcttgccccgctcctctcttggactcctccccaaacttggcggtgccccaacgggcaccgcccttttctttggggcgctacccgacgaagccaacagcgccgagtgccgccgcggcagctaaaaccagcagtgggtgccacttggtgaaataggcagccgccgcgaccccgagcgtgatcgcgccggtctgccaatccagcgtcgtgcttttcgtgatcagcgccgcgctggccatgaccaagccaatggtgaccggcagcaacccggcctgaatggctttccgcaccggtttgtcgcgccattcgaaccacaggcccgccgtcaaataggtcaggatggaggtcggaccggcaatcgccagcgtcgaaaccagcgcaccctgcagccccgccacgcgccagccgatcaggctgacgaccatcatgttcggacccggcgccgcctgcgccagcgcgaacagggccgcgaattcgtgcccgttcatccagccgtggccgacgatttggcgttgcagatcgggcaggatcgagttggcaccgccgaacgccagcagcgacaactgcgcgaagacgaccgcgaggccgaggaccgggctcatcgcgcgaacctccacagcaccagcgtggacaagacggccatgatcggcatgacgatgaccaacggcagccgcagcacggcgatggcggcgaaggtgaccactgtcatgaagatggcgatccagcgccctttcagcggggcggcgatcttaaacgatgtcgcgatcagcatgccggccccagccgccgccaacgccatgaacgcatgcttgaccgagggcacgtctttatattggtcatagaccgcgccgagcccgatcacgatggtgaccggtgccgccatcaacccaaccaacgccgcgaccgcgccgggaatgccctgaaaccgcgatcccagcgccaccgcgacattcatgatattgccgcccggcatgaactggcagaatcccagaagctcggtgaactccgccggcgtcagccatttgcgggtttccaggatcgtgcgtcgcgcccagggcagcacgccaccgaagccgcagacgccgatggtgaaaaagccgaggaagatttccgcgacggagggtttggagcgggaggatgcgtcggacatgcctctggataccgggtcgggggggcggcggaaaggtccctcgccttggcgctcagggctatcgcatatgacctttagccaattgtgccaaccgggccaggaacgcatcgcgctgaaatttcccatgtgcggacgccggcccgcgagcgaggtgcccacgaccggtaagtcggcgatgacctggtgggtgccgaacggcatcaactggggacgatggcgggcgtttcgccgatcagacagccaagcgctcggcgcacggttgctgggcgcaggtcccgccagtcgatgtgccaggtatccgaacgcctgtcgcgttcgcgctggaaggtttcttcccgccgcgcgcgcacctggtaaaggcggccgaggctgccgccatagcgccgcagggtcttttccacccgattccagaaatcgccgtcgcagagaccgggggcgatgccgaggtccatacagatataagcgatggtccggccaaccgaacggcggcgcacctcggcagcgagttcttcggggttgggcagccggaacgcatccggatcgccggggtccagcagcgcgggatcgggacggagggtgcgcccggacggggtgcggggggccgccccggccggaggacggtggtggggttgcagcgcgacgcacggcggccaagcaaaccgcagattacagcccctggcggcgcgggcgagcagataatgttgcagcgcgagtgccctgagcatgccgcgtcgcatgcggtgcaggatggtggggagatcgtaggtgccgaagacggcggcggcggtggcgaattccggggcggcggcgcgggtggccgcagtcgcggcgaagtggcgggcgtgcgcaataaggacggcgaggacatgaagaacagccccgatgcgccccgggatggggcggggttttgcgggcgccaaggtggttggggctgctcgggtcattgagatggtggtagcagggttcgggggaacaaagcaagaattttatgatttatttcccagtacatgggtatgcaggggggatcggattgggagataatgccaaccgcatgagtcaatggctgcttcgattgatattatcctaggcgtccgaacctttgactcatagtcagcggtgccctgtcgtcatgccgacgcaggtcggcatccacgacttatggggtatggcgccgacagtcgtggatccggcaccgggcgcatgttcgatcttcgcctccgcatccgccagcgcttgatccagcgcccggatcgccgcatccctcgcaagagcctaataatgaccccgaagggcgcggacctgctccacggcctcgtcggtatagccgctcaacgccgagcgacaggactgcgcggttgaccatgacgatgaagaggtgacgaccgccataatgagagctgccgatgccccttggccatgaggcgggagtccgcttggggtgcagggtatgcattcaggtatcgctacatggctcgcgacagtcgcgcttaccgtggtcgtccccggcttggtggcggctatgaacccaacgatcgaacccaatataggcataccgcttatcgagccttcagattccaagccagttgggcatacgtcagcccaattggctttagttcggccttgacgaaccggctcgccttgccggcccattccttctcacgttcggtcatccattgcatacgaagcggtatcgtgtttcgatggtaagaacgatcgtacttgtctccatcgacgtcggaaaatgggagaata

SEQ ID NO: 4290 - DNA, 16984 bp, synthetic construct
  source 1..16984: mol_type = other DNA
  variation 1230..1303: note = note, n is a, c, g, or t
  misc_feature 1..16984: note = Synthetic
  variation 14621..14809: note = note, n is a, c, g, or t
  variation 6563..6714: note = note, n is a, c, g, or t
  variation 16119..16236: note = note, n is a, c, g, or t
  variation 15200..15318: note = note, n is a, c, g, or t
gcctcgaccgcgccaccctggcgcgagccggcgcgggcgcgcagctccgcctcgcgcagcacgccgcgcccgtcggccaggccgcgcgcctgggcggcgaagagttcgcgcccctcgccgaggaggacccggtcgaagcgtgcgtcgagccgcaccggcgcaccgccggggctggacggctcgggcggtgctgcgccggcgccgaacagcccgcgcaggtcgagcacggggccgcgcagcgcgagctgccacgcctcgcccgggccggcggggggccgcgcctcgccgctcagccggccggcgccgaggcggctttcagcgatctcgatccgctcgacgcggccctggcggagcatcgcacggccgcgggcggacagctccggcccgtccacgcggatgctgtcgaggccggtcaggcgctcctcctggaagcgcagcacggcctcggccgagccgggctggcccggcgccttcgcccagcgcagcggcgggatggcaagccgcgcgtcacgcagatcggcgcggatcgtcaccgccgaggcaccgccgcgccgccgctcggcgcgcaggtcgagcgcgacggggccttgcgcgaagccgcccgtgtcgaggccgagggccgcgatctgcgccgcgtcggccgacgccgtcgctgtctcgcgcgagaacaccgcaccggccgcgccggggcgcagatcggtctcgacgccaacgcgcagctgcatgcccgcgagcgcgccggtgccggaaatgcgtagcgattgctggtccacggtgagatcgagcgcgagcgcgtcgaggtcgcggtcgagcagcgcgcgctccaaccgcccgcccgtgacccgcgcctcggcgcgcagccgcatcgcgtcgagggggatgtcgcgcagcagcgggaacgcgagcgccagccggccttccaacttccccgccgcggtgcggaacgggaaaggccggcggtcgaacaggcgcaggcgcgggtgcttgagcacctccacgatatcggcggccgggccggccagcctgaaatcgatctccgcctggtcgggctggcccggcggcatgaagagcagccgcaccgtcccggcacgcgcctcgatgccggtggggcggccggcagcgtactcctgccggccgccggtcgcgcggatgacgatctccgccttcgagaaggcgacttcggcggcgactccgcgcacgggcgggatcggcgggagccaatggaccgtnnnnnnnnnnnnnnnnnnnnnnnnnnnnnnnnnnnnnnnnnnnnnnnnnnnnnnnnnnnnnnnnnnnnnnnnnngggcgggatcggcgggagccaatggaccgtcgcgccctcggcgcgcgccgtgccggtcaggtcggtcaggcgcggggcggtgaagtccgcgccggccacccacccgagccgccagcttccgtcgcgcgcctccccggcggtgagatgctcggccacccagcgccgcgcgttgggcgagacgctgtccggccaaagcgcgggaaggtcctgcaggcgcacgcgatccacccgcgcctcggcggcgcccgcccagcccgcggcggtgagcgcggcgtccgcctccacacgcaccaccgtctccgccgcgccggggccgccggtcaaatacagcgacgtcgggtgcaggcgcagcgcgtccggcgcgatatcgagcgcgacctccgcgcggcgcacgcgaaccggcgccaccgcgccgggcaggcgcaccagcgcgtcctcaagccgcgccttcacccgcgccgcgcgcgcgcgccagcccgacagggccgtatcggcggcaaggtccagcgcgacgcggccttcgcggagggcggcagccggcagccagccgagtgctgccgtgcggctgtgcggcgcgaggccctcgggccagtgccgggcgagggcggcgacggtcaacggctcctccagcgccagggcgagcgtgccctgccagcccccgccggcgcccccgccctcggtcgcgcccgcggccagcgcgccgtgggcgcggaccgactcgccgccgggcagggcaagccgggcgcggcgcagccggatcgcgcccgggcttgtcgagatctccgcctccagcgccgcgaaggggatggcgatcccgggcgccgggcgcagctcgccgccgccctgcgtggcgagcacgagccgcaggtcgcggggcgcgccatcgccgtcgagcgcgaactctcccaccgcctggagcgacgcgaccgcctcgatctgcgccagcgccgcgaggccgggcagcgcggcgagctcgtccgtgcgcagcgcgggcaggtcgaggcgcagcgtcgccgccgcgccggcgatccgcgcgccgaggcgcaccggcacgcgcgccacgccggccgagagcagcgcccgcccttcggcggcgaagctggcaccctcgcggcgcagctcgatcgtgacgcccgtgagcgaccagtccaggccgagcgcggcatcggccaccgcgacctcgccgtccaggatggtcacgcggcgcagcgcggcgagccgcccgacatcggccaacagcccggcgacgagggccgcgagaccggatgggggcagctcggagccgtcggccgacacgccgccatccgcgccccgtgcgagcgccacgcgcggcccgcgcagcgcgatggcgccgggcgcgagctcgccgcgcagcagcggccgcagcgcgagggacatcgcggcgtcgggcaggctcgcccgcaccccgctcgccgggtcgcgcagcgcgacgccctgcaggcggatgtcgagcggcacggcgcccccgcgccagccctcccaggcgagggacgcgcgctcgatcacgagacgcggcgcattcggcctttcgttcgcgacgcgctcgatcaggcgcgccagcgggctgactgatattggcccctcggagagccgccacgcgagcgcggccagcaccaatccggcgagcagcggcagggccagcagcagccgtcccacctgccgcagcccagcccgggcttgaccccggctcacccttgggccttccgtgcgcgatgaacgtggagcccgcgcggccaatccccgccgagggcgccttcgcgggcgaggcggccgcggcccaactgctcgcccgcctcgccgagggcgacgcggcgcagcgcgaactcgcggcccggcccgaggcgcgcgcggcgctggagcggctgagcggcgcgcccttcctcgccgaccttgcgctgcgcgaggcgccggcgctgtcgcgcctgctcgatcgcgggccggaggaggcgatggagggcgtgttcgcgttgctctccggtgccgacccggcggcctcgcgcgcggcggtggcgagcctgctccggcgggccaagcggcgcggcgcgctgatcgtcgccgcggccgacctcgccggaatgtggccgctcgacagggtcaccggcgcgctttcgcggctcgccgaagaggcgctcgacttcgcgctcgcccatctgcttctcgacgcgcatgggcgcggccggatccggctgccgaagcccccgcgggccggcagcgtcggcgagccgaagcagatcggccgcggcgccggcctcgtcgcgctcggcatgggcaagctcggcgcgcgcgagctcaactactcctcggatgtggacctgctgctgctccacgaccccgacgcgccctcctgcctcgccgaactcggcgccgccccgttcgtgcggatcgcccgcgacctcgtcaccctcatggaggaacgcacggcggagggctacgtgtttcgcacggatctgcgcctgcggccggacccggcggcgacgccgctgtgcgtggcgttgccggccgccctctcctactacgagtcgctcggccagaactgggagcgcgcggcgatgatcaaggcgcggcccgtcgcgggggaccgcgccgtgggggaggcgttcctgaaggagctgcggcctttcatctggcgcaagcatctggacttcgccgccgtcgccgacatccactccatccgccggcagatcacgcggcacaagttgaagaacgagggggcggcgcgcggggccggcgcggggatcgcggtggccgggcacgatgtgaagcttggccgcggcggcatccgcgagatcgagttcaccatccaggtgctgcagctgatctggggcgggcgcgacccgggcctgcgcgacccgaccacgctcggcgcgatggccgcgctgtgctcggccggcaagctggaccggcgggcggcggccgacctcgccgacgcctacgtgttcctccgccagatcgagcaccgcatccagatggtgcatgatcgccagacgcaccgcctgccggaatccgaggcggaactcgggcggatcgctgccatggcggggttcgacggcgtcgcctccttctccgccgcgctcgccgcgcaccagcgacgcgtcgagttccactacgcgcggcttttcgaaagcgcgccgtcgctcgccgcgccgctggccaggaaccggggcgatgcacccgggagcctggtgttcaccggcgtggaggacgacccggagacccttgccacgctcgggcgcctgggctttcgcgaggcggcgacggtcgccgcggcggtgcgcgggtggcacgcgggacgcccccgcgcgatgcgcggcgagcgcgcgcgggagctgatgacggagctggtgcccgcgctgctcgtcgccctcgggcagcaggccgagccggaggccgcgctgctgcgcttcgaccggctgctcacccggctgccggccggggtcaacttcctgtccgtgctgcaccataatccggccgtgctgaaacgcctcgccgggctgcttggtgcggcacccacgctctccgacttcctcgcctcgcgccctgcggcgctcgaggggttgctcacgggccagggctgggaggtgccgccgctgggcgcattgcccgcgctggtccgcgaggcgcgcgacctcgacgaggcgttggaagccgcgcggcgccttgtcacggaggccaatttcgaaagcgacgcggcgctgctcgatgccgtcgtggggccggatgaggcgggcgagcggcgctccgccatcgccgatgcggccatcgccgcgctgctgccggccgtgcaggccgacttcgcgcgccgcttcggcttggtcgccggcggcgggctgtgcgtcgtggcgctcggcaagctgggcgggcgcgagatgcttcccggctccgacctcgacctcatcctggtgtacgaccacgacgacacggcggaggcgagcgagggcgggcagcgcagccttgctccgtcggactacttcatccgcctcgccgcgcaggtggtggcggcgctgacggcgccgggcgcggcggggcgtgcgttcgaggtggacatgcggctgcggccctcgggcaacaaggggccgctggccgtgcgcctgcccgccttccgccgctaccacgccgaggagtcgtggacctgggagcgcatggcgcttacccgcgcgcggccggtggccggcccgccgacgctgcggcgtgcggtcgcggacgcgctggacgccgccctcgccgcgccacgcgagccggccggcgtgctcgccgacgcacgcgccatgcgcgccaggatgctgcgcgaccaccggcccgacgggccgtgggacctcaagcacatgccgggcgggctggtggaggtggagttcgtcgcccaggcgctggcggtggcgcgcgccggcaccggcgggacgaaggggccaccgccccgcggtgcgacgcgcgatgtgctcgccgggctcgccaaggccggcgcgctgggtcgggaggatgccgagctgctggtgcgtgcggaccggacgtggcggcacctcatcggccttctgcggctgacggcgggccacggcgccggcgcggaacttccggccggggtcgcggcggcgctcgcgcgtgccttgcccggcgcagcggaactggtcgaggagcagggcctgcgcggcgcggtggcggcgcgcgcggctgccgtgcgcgcgtgcttcgaacggcacctcggcgggctcgacgccgcccgctgatcgcgcgtcaccgcccgcgcggcctcgccgccgcgtcggcgacgaggttgcagcccagcaccgcgagcaggatggccagccccggccacagcgcggcgagcggggcctggaacaccagctcctgcgcgttggcgagcatgttcccccaggagggcgcgggcggcgcgatcccgaggccgaggaaggacagcacgctctcggcgaggatcgcgccgcccacggccagcgccgtggcgatggcgacgggcgggccaagctgcggcagcacgtggcgccacagcagccgcgcctcgcccacgcccagcgcgcgggccgcgcgcacgaagtcgtgcgagagcaccgagagcgcgctgccccgcaccagccgcgccacgcccacccagccgaacagcgcgagcagccccgcgatgcgcagcatgtcggccagcgcctcgccgcgtggcaggccgagcacggaagggtcgagggcggccaggatgacgagcagcggcaggccgggcagcgcgagcatgccgtcggcnnnnnnnnnnnnnnnnnnnnnnnnnnnnnnnnnnnnnnnnnnnnnnnnnnnnnnnnnnnnnnnnnnnnnnnnnnnnnnnnnnnnnnnnnnnnnnnnnnnnnnnnnnnnnnnnnnnnnnnnnnnnnnnnnnnnnnnnnnnnnnnnnnnnnnnnaggcggcgtagaggccggcggcggtgccgatcacggtggccgcgagcgccgcggcgaggccgacggcgagcgacacccgcgccccgtgcagcagccgcagcagcacgtcgcgccccagctcgtcggtgcccagcgggtgcgcggcggagggcggcgcgaagcggttgaacaggtcgggctcgaaggcgtcgtggcccagccacgccccgaccagcggcgcggcaagggcggccagcgcgagcgcgccgaggatggcgaggccggacctcacgtgatcctcggatcgagccagcgctgcgcgaggtccgccgccagcgtcgccatcatcgtcgccaccgccacgacaaggagcgcgatgagcgcgaggttgaagtcgctgcccatcaccgcgtcgtagatcagcttgcccatgccgggccgcgcgaacaccgtctccgtcaccagcgcgccggagacgagcgcgcccgcgtcgagcgcgagcacggtgagcagcggcacggcggcgttgggaagggcgtggcgcagcaccacccgcccctccgacgcgccgcgcgcccgcgccgagcggatgtgcggctcggccagggcgtgggagagcgccgccgcgctgtgccgcgcgtaggcggcgagattggcgagcgcgagggtcgcgacgggcagcacgaggaagcgccacgcgccctcctccccctccggcggcgcgccgcccgcgggcagccagcccagcgtgaccgcgaacaggatgatgagcaggatgccgatccagaacgagggcgcggcttgcgcggcgagcgccgccgcctgcaccgccggcgccgcgcggggccgcagagcggcaaccgcgccaagcgcgacaccggccaccagcgcgatcagcagcgcggcgccgaccagttccagcgaggcgagcagcgccggcccgatcagcgcggcgacgggctgcgcaaagaggcgcgagtggccgaaattcccccgcgccacctccgcggcccaggcgaggtagcgttcgtgcagcgggcgatccagcccgtgcagcgcgcgcatccgcgccgcgtcctccgccgtcagccgcgggtcgccggcgatggcgaggtcgatggggtcgcccggcatcagcccgatgaggaggaacgcgagcgcggagaggatcgcggcggtgagtgcgatctgcgcgagccgggcggcgacgaggcgcgtcacgcggagtcggggcgggtgcggacggcctcgacccggctgccggcggagtcgagcaggaacgcttcggagcacgcgggatggtgggcggggcgcaagccgggcgggccatcgcacccgtccgcggccagccccgcggcgtggaaggcgcgcaccgccgcgcggtcggcggcgcgaaaggccgagtgccaccggccgccgaccgggccaggccgcttgcgcggggcaaggaggcagtgcgcgtcgttcgcgggtccgttgccttcaccgtagccgattccggccggcgcgcgccacacgcaggcaacgccgagcgcgcccatcaccgcgtcccagaacggcgcggccgcgccgaggtcgggcacggcgatcgaggcgtggtccagcaaggcgctcatcgggcgcgccactcctccgcccacaggctcgatgggttgaggtggccggtcggccgcacgccgtcgagccacgtcggccacacatgcgcgtcctgtcggaaccagagcggcagggcgggcagctcctcggcgtagatcgcctgcaggcggtgccacatcgcccgccgccgctcgcggtccagctcctgcgggatgccctcgagcagcccgtccatctccgcgttgcggaagccggtgtagttctggccggaccagttgcgctcggcgcgggggatctcgtcggagtgcagcacgccgcgcggcacgttctccggcgcggacacccaggcgaacagcgcggcgccctggaacgtccggcggttcagcgtctggccgaacagcacgcgcggcggctcgttgcggatgcgcgcctcgacgccgaccgcgcgccacatggcctggatcacctgctgcgtcgcctcgcgcgagcggttgccggcggtggtcatcagctcgagcgacaaccgctcgccggccgcgttgcggcgcacgccgtccggccccggaatccagcccgcctcggccagcagcgcctgcgcccgcgccgcgtcgaagggccagcggcgcacctcggggtcgtggatccagtcgagcgggttgacgctgctgtgcgcgacggtctgccgcccctcgaacagctgggccacgatccgctcgcggtccagcgccatcagcagcgcctgccgcacgcgccggtcggcgagcgcgggaatgtcgaggttgaggtcgaggtgctcgtacaccaggccgggccggtgggcgacgcggaagcggttggcgtgccggcgctggaggttcgcggcctgctccacgggcaggccgagctcgcccgcgatcatgtcgagctgccccgccagcagctgcgcctccagcgccggcgtgctctcgacggtgcgcaggctgatccgccggaagtgcggcgtggccccggaccagtgcgggttgcgctccagcgtgatggcgctgccgggctgcacggcggccacgcggtacggcccgttccacagccccgggttggtcggctccgtgtcgaaggcggtgcgggtgcggtaggcgcgcgggtcggcctgccagcgcgcgcgctcgatgtgcgcgggcagcggctggaagtcgccgaggctcgcgaactcgaaggtgacgcggtcaaagcggatggtgaagctgcgcgcgtcgtcggcgaggaactcgtaggcggagcggtagaactccgcgccgccgaagccggtggccgcctcgcgccccgcctcccacgcgaagcgcaggtcgtcggtggtgagcggcgcgccgtcgccccagcgcagcccctcgcgcagccgccaggtgacgcgcagtccgggccggccctccggtgtcgtctcgcgcacggccccgccgttctcgagcgtcggcagccgctcgcacagcaggcagacgaggttccagtccgcgtcccaggcggtgacgggccggcggacgaagccaagcgcgtaggacttggcgaccatgctgtcgatgttggggtgcagcgtggaggggtattgcgttaggccgatggtcagcgtgtcgcgcggctgcgccagcgccggggcggcgccgaggagggcgaggacgatcaagataacgcgcatgccgccagcctagcccgcgccccagaaagggatcaccccccggcgttgccaccggggggtgaagaaccttcaagtggaaaaaccaccttaccgtggttaccctcccgactcccgcaatcatgtggcgcacggccacgcttcctgtcaagcggtttggctttggcattcttgcgtgggagagacgagatggcggaacgcttcctgggcgtggacctcgggatcgcatcttgcgggtgggcgctgatcgaacagggcggcgaagcggggcggatcgtcgcgtggggcgcgcgctgcttcgacgcgcccgagaccccgaaggagcgacggccgctcaacgcgctgcgacgccagttccgcggcatgcgccgcgtgatccgccggaggcgccagcggatggcggcgatccgggcgttgttcgcgtcccacggcctgctcccgacgactggctgcgacgcgctgcgcggcgagggcctcgacccctgggcgctgcgggccgacggcctcgaccgcgcgctcacgccgcgggagttcgccgtggccctcggccacatcgcccggcaccggggcttccgctccaacgccaagacgcgtcggaacgaggaagccgagacgggccgcgtcaaggccgggatcgagcgcaatcggctcggcggcggctggcgcacgctgggggagatgttcgcccgcgacgcgcggtacgcgggccagaagcgcaaccgtgacggcgaatacacccgctcggtcctgcgcgaggaccacgagcacgaggtgcgtgtgctgttcgcgcggcagcgcgtgctgggcaacgcgctcgcgacggatggactggagcaagcgttcgccggtctcgcgttcgaccagcgggatcccgacgacagcgagcacatggtgggcttctgcggcttcgagcgtgaccagcgccgcgccgcgcggcgcagctattccttcgagttgttccgcttcctctcacgcctcaccgcgctccggctgcgggacggccgcgacgagcgcgcgctgacgccagacgagatcgcgcgggccgaggacggcttcggccgccagcgcggcatgaccttcgcgcggctgcgcaaggcgctggccctgcccgaggccgtgcgcttcgccgatgtcccggccggcgaggaggcgaagcgggacgtggtcaaccgcgcgtcctcgaatggctgcgcgatgggcagccacgcgttgcgcgaggcggtgggcgaggcggcgtggcgaacgctgctcggcgcgccggagcaactcgacgcgctcgccttcgtgctcagtttccgcgaggccgcctcacgcgttcgcgcgggggtcgaggcgctggggctgcccgacggcgtcgccgaagcggtgatggaagctttcgcgcgcggcgacctcggagagtttgccggcgccggccacatctcggccaaggcatgtcgcgccgtgattcctgggctgcgccgcggcctcgtctactcggccgcctgcgcggcggccgggtacgaccacgccgcccaggcggagaccgctctcgccgacgtggcgaaccccgtggcgcggcgcgccatcggcgaggcgcttcgccaggtgcgcgccatcgtcgcggcgcacggcctgcccgaccgcatccacgtcgagctggcccgcgacgtcgggaagagccccgaggaacgcgaggaaatccggcgcgggatcgagaagcgcaacaaggagctcgaccggctgcgcgcggcgtttcgcgaaaccgtgggccgtgacccgcgcggccgcgactcgggggggcgggaggagctgctgcgcttcgagctgtggcgcgagcagaacgggcgttgcctgtacaccgacaccgccatcccgcccgacgcgatcgcggccggcgacaaccgggtgcaggtggaccacatcctgccctggagccgcttcaacgacgacagcttcgtcaacaagacgctgtgcttcgcctccgccaaccaggagaagcggcggcggacgccgcacgaatggttcggcgacgatccgcggcggtgggagaccttcgccgcggcggtcgagggctgccgcgcgatgaaaggccgcaagaagcgcaattacctgctgcgcgcggcggccgagatggaggccaaattctcctcgcgcaacctcaacgacacccgatacgcggcgcgggtcgtgctgcagcagctcaggcggctgtatgtcgaggacggcacggtgcgcgtgttctcgcggcccggccagctgaccgaccggctgcggcgggcctggggcgtgcaggatctgaagaagcagatggagccggacggtgagaagcgccggcacgacgaccgccaccacgcgctggacgcgctcatttgcgcggccaccagccaatcggccctgcaacgcctgacgcgggcgttccaggaagcggaggagcgcggctcgcaccgcgacttctccgcgtttccgccgccctggcccggcttcgtcgcggagctgcgggagaagtttccgcacatcctcgtctgccgcgcggagcgaggccgggcgcgcggcgaggcgcacggcgcgacgatccgccgcgtggttgggacgccggacggccccgcggtggtggagcgcaagcgggtcgcggatctgacgctcgccgatctcgatcgcgtgaaggacccggagcgcaacgcggcggtggtggcggccctgcgggcttggctcgacgcgggcaagccgaaggacgcgccgccgctgtcgcccaagggcgacgcgatgcgcaaggtgcaactggtcacgacgaaaaaggtggacgtggaggtgcgcggcggcgcggccgaccggggagagatggtgcgggtggacgtgttccgtaaacgctcgcccaaaggcgcgtggcagttcttcctggtgccgatctacccgcaccaggtggcggaccgcgagggctggccggagccgccgatgcgggcggtaaagggccgcttggatgaaccggaatggccgaagctcgatgccgggcatcagttcctctggtcgctgagccaacgttctttcgttgaactggtgaagcccgacggcacggaggtcggcggctacttcatgggcctcgaccggagcaccggcgcgatcaccctttccgcgccgcattcgaccaaggccttggccaggagcatcggtgcgcagacgctgcgcagcttccgcaagtttcacgtggaccgtctcggcgggcggcacgagatcgagcgcgagacccggacatggcgtggcgtggcctgcacctgacgcggccggcgcggctcagcctgcgcgcgcggcagatcgtcgtcgcgcaggagggggcggaggtcgcgctcgccgctgaggacgtggcctacatcgtcctcgacacgccccaggccacgctcaccaccgcgctgctcgccgcctgcatggagcgcggcatcgcggtggtggtgaccgacccgacgcaccaccccagcgggctgctgctgccgttccaccggcaccaccggcaggcggcggtggcggcgcttcaggtcgccgcctcggccccgctgcgcaagcggctgtggcaggcgctggtgcgcgcgaaaatcgccaaccaggccgcggcgctggacgcggtcggcgcggggggcggggagccgctgcgcgccatggccgcgctggtcggctcgggcgacccgcgcaacgtcgaggcccgggcggcgcgcgaatactggcgccggctgttcgcgcgcttccgccgcgacgacgggcaggaccggcgcaaccagttgctcaattacggttacgccgtgatgcgggccgtggtggctcgcgcactggtggcgtctggcttcctgccgtgtttcgggctgcaccacgccagcgaggccaacccgttcaacctcgccgatgaccttctggagccgttccgcccctttgtcgacgttcttgcctgggaactggcgcgcggcggcggcgaggcgttgagcgtggaagaccgacaggcgttggctggcgtcgccatgcggacggcggcgatcggcgaggagacgacgacgctgctgctggcggcggagcgcagcgccgcctcgctcatcctcgcgatcgaggggcgctcggccgctctgctgaggctgccacggcttgcggcatgaaggtcgaggaggttcggatcttgtggctgttcgtgttctttgaccttcccgtgggaaccaaggccgagcggcggatggcgacgcgctttcgcaccttcctcaagaacgacggctacatgatgctgcaatggtcggtgtatgcgcgcgtgtgtcgcggcgaggaggcggtggacaagcacgtgaagcgcgtgacgaagaacttgccgacgaagggcagcgtgcgcgccctacaggtgacggaccggcagtatgaccgaatgcggttgttgctgggcgaggtgaagaaaaccgagtcggtcgggccgacccagatggttctgctgtgatttcggcgccggagaggcgcggaaatcacagcatttccagatacctagtcgtggcgcagcctactcgatgggagtcggtaggaaaaccacggccagcgtcagcaccttgtgcccctcggcgcgagcctactcgatgggagtcggtaggaaaaccacggctggcttcggcacgggccaatgcctgttcatagcctactcgatgggagtcggtaggaaaaccacggccannnnnnnnnnnnnnnnnnnnnnnnnnnnnnnnnnnnnnnnnnnnnnnnnnnnnnnnnnnnnnnnnnnnnnnnnnnnnnnnnnnnnnnnnnnnnnnnnnnnnnnnnnnnnnnnnnnnnnnnnnnnnnnnnnnnnnnnnnnnnnnnnnnnnnnnnnnnnnnnnnnnnnnnnnnnnnnnnnnnnnnnnnnnntcatagcctactcgatgggagtcggtaggaaaaccacggccaaatctaggccacgggcgggccggactgaagcctactcgatgggagtcggtaggaaaaccacggccgcaacgccaaaaccgcccagcgcgtgcagcctactcgatgggagtcggtaggaaaaccacggcgtgaccgacgttctcctgcatcaccatgcgagcctactcgatgggagtcggtaggaaaaccacggcggcgggggcggtcctcgcggcgttcgggatagcctactcgatgggagtcggtaggaaaaccacggcggcatcggccacaaaggcggtggtggcgccagcctactcgatgggagtcggtaggaaaaccacggcgccggcccgccgcgcacgggcgnnnnnnnnnnnnnnnnnnnnnnnnnnnnnnnnnnnnnnnnnnnnnnnnnnnnnnnnnnnnnnnnnnnnnnnnnnnnnnnnnnnnnnnnnnnnnnnnnnnnnnnnnnnnnnnnnnnnnnnaaccacggcgccggcccgccgcgcacgggcgtggtcgtcagcctactcgatgggagtcggtaggaaaaccacggccagcacgatgggttcgtgggcgggcttgagagcctactcgatgggagtcggtaggaaaaccacggccatggccacggtgtcgggcaggtcgcggagagcctactcgatgggagtcggtaggaaaaccacggctccacgcgtgcgcgacccagccgccgggcaagcctactcgatgggagtcggtaggaaaaccacggcgcccgccgatccgcgcatgacgcgccccccagcctactcgatgggagtcggtaggaaaaccacggccgcgttgcgcagcggctcacgcacccaaagagcctactcgatgggagtcggtaggaaaaccacggcgtcgtccgccacgccctgcatgaagatcagagcctactcgatgggagtcggtaggaaaaccacggcgccccgcccgcccaggtggcggtagaggtcagcctactcgatgggagtcggtaggaaaaccacggccgcacctccgtggttccgtggggcgccgcgagcctactcgatgggagtcggtaggaaaaccacggcatgatgtcgaagacaatgccctgcagcatgagcctactcgatgggagtcggtaggaaaaccacggcgtcgcgccctcgtgtgcgcaggtgccggtcagcctactcgatgggagtcggtaggaaaaccacggcgacgtgcaggtgcagggcgacgtgcgcgccagcctactcgatgggagtcggtaggaaaaccacggnnnnnnnnnnnnnnnnnnnnnnnnnnnnnnnnnnnnnnnnnnnnnnnnnnnnnnnnnnnnnnnnnnnnnnnnnnnnnnnnnnnnnnnnnnnnnnnnnnnnnnnnnnnnnnnnnnnnnncgccagcctactcgatgggagtcggtaggaaaaccacggcccactgcgcggcatacgggtcgcgctcgttagcctactcgatgggagtcggtaggaaaaccacggcgacgacgcgccggcacgctcaagcgccggcagcctactcgatgggagtcggtaggaaaaccacggcagacttcgcgacgtaggtgccacgggtggtagcctactcgatgggagtcggtaggaaaaccacggccagccgtggcggcgggcgtctccgggaccgagcctactcgatgggagtcggtaggaaaaccacggccgatctcaccttcaaccgcatctacgtgtgagcctactcgatgggagtcggtaggaaaaccacggccggccggaggtccgcatcaaggcgcgcgccagcctactcgatgggagtcggtaggaaaaccacggcccgcaggccggcacggtcgcagccctctccagcctactcgatgggagtcggtaggaaaaccacggccggtgtctccgacgcagcgctcatgatgcgagcctactcgatgggagtcggtaggaaaaccacggccttgcgcagctccatctgccgatgcgggtcagcctactcgatgggagtcggtaggaaaaccacggcggcacgccgccggcaatggccttgagggcgagcctactcgatgggagtcggtaggaaaaccacggcggaatggcggtcgccgcagggcgccttgcgccctggggagaccgccat

SEQ ID NO: 4291 - DNA, 16613 bp, synthetic construct
  source 1..16613: mol_type = other DNA
  misc_feature 1..16613: note = Synthetic
ctatcagcttgcgtcgtccgaacccgaacaggtgtcggaagaattcacgacaggggcggtcgcccgcgcaacgaccctgcgctgagcatgaaaacgcggcccggattgccggcctgagcgaacgggccgcggcccgttcgtcgcctcgttcatggcgacgtccgcctattcctccgtgaccatgccgagagccaccatgtaggtggccaggatcgcctcgtgctcctgccgctcggcggtgtcctgcttgcgcagcttgatgatcgtccgcagcgccttgacgtcgaagccattcgccttggcctccgcgtagacgtcccggatatcgtcggccagcgccttcttttcctcttccaggcgctcgatgcgctggacgatggaatgcagctggctgcgggcggcgccctcggtctcgttcatgtcggtctccgtcgtggtctcttcgtctcggcttggcagcgcctagtggtctttgtgcgacgtctcgaacgcggccttctggtccgccgtggcctcagtctggtacttcgccttccaggcgttgtagggcatgccgtagacggtctcgcggctctgctccttgtccatgtcgaggccgcgcgcctcggccgcctcgcggtaccagttggacaggcagttgcggcagaagccggcgagattcatcaggtcgatattctggacgtcggtccgctcgcgcagatggccgacgaggcgccggaaagcggccgcctccagttcggtgcgcgtcttctggtcgagttcgctcatgtccgtcctcgcttgcttggtcccggttccagcatccggctcagtcatccggtttcccgccgggcgccaccgatccgtagggccgtatttcgtggagcccctccgttccggcaagggctgtcagcacgtcggccagccgtccggcccattccgcctgaccgggctcctcggcgatcaggtcctgacgtagttcgacgagcgaatgcgccagtccgcgacaggtgccgtgggtgaacatcgtgtcacccctgagcttacccgaatagggctcgttgtcgccgaccgtcagcagcggatcgtgacggaacatttcgatcatcggcacggcaagccgggggtcggtgtcccacaacatgccgatctcccaaggcctgcgcacgccgcgccaaaggggcgtaaagctgtggatcgagacgatcgcgggcggatgaccggcctcgatggctgattcgatcgcggcggtgacggcgcgatgatagggctcgtagtagtttcggatccgccgcgccttttcctgttcgtcgacgcgcgcattgcccggcaccaccgcgccgtcggacaggcgcatgaccagcgtcggatcgtcggcgccgcggttcggatcgatcagcagccgggagaaccgcgacaggaccgccggcgcaccaagctgcgcggcgagcctgcgcgtcaccccttccgcgccgatgtcataggcgatgtgacgctcgaactcctccggcggcagtccgagatcgccatactcggccggcagcgtgttgcgggcgtgatcgcacaggatcagccagccggtctcgacggatccggggaccgtctcgaaggcggcaaaaccgtcagggctgtctggcgcgccaacgttatctgtctggcgctcggcaaacgtcgtcatggggcgattctgcgtgacgggcagttcgggctgccctaggaatggcgttctcttaggcgatcgcgcagccggcggcaatgtgtcgtgatgtcatgcgcgggccgatacacaggctatgtggaatgacgcagacgctcgataccggggtccagggcctcgaagcacggaccgccgggctggcgttcggcgcgctgttgctgggcgccgtcgcgatgggcatttcgccggtcttcgtgcgtttggccgaagtcggcccctatgcaagtgccttctggcgcgtcgccctggcgctgcccgcgctctatgcctggtcggcctacgaatcgaagcgcgccggactgcatgccaacagcgggctccggttcgaccgctatgtccttctggccggcttgctcttcgccggcgacctgttcttctggcacctggcgatcgtcaacaccacggtcgccaatgcgaccttcctggcggtgctcgccccggttttcgtcgtcagcctgtcgtggctggtactcaaggaggcggtcgggactgaagtcatcgtcgggctggcttgcggtcttgccggcgccgccctgctgctcggatcgagctacaattttgccccgggcaacctgctcggcgacgcgttcggcctgatcaccgcctgcttcttcggcgcctacatcctgtcgatccgcccggcccgcaggcgccatccggccggacggctgatcttcctgtcgtcggtcgtcaccgccgccatcctgctggtggtcgcgctcctcaccgaaccgaccctgctgcccgcaaccggcaagggactgatgatgctggccgcgctggcgctgatcagccatgccggcggtcagggactgctcgcctttgcgctcgggcacctgccggccggattttcctcgctggtcatcttcctggaaggcatcgccgcggcgctcttcgcctggatggcgctcggagaaggcatgacttggttgcagcttctcggcagtgcggccattttgaccggcatctggatcgcgcggccgagaaaggcgcggcgcggccagccaggggaacaggacgggggaccgaaggaacaatgagcagcgaccaccgcgaaaccctgcgcgccctcttcgatgccgccgtcgaggccgcccaccccgatacgtgcctgcccccgcacctgcccgaaccgccggcgggcaggatcatcgtgctcgccgccggcaaggccgccggcagcatggcggctgccgccgagcgccactatctggacgacctcggtctcgcccccgaacgcctgaccgggctcgccgtcgcacgctacggctacgggcgtccgacccgggcgatccgcatggtcgaggccggtcatccggtccccgacgacgccggcgtgtcggcaagcgaggaaacgctgcggctcgccacatccgccggtcccgacgatatcgtgctggtactcttgtccggcggcggctcggcgctttggatcgcgccggccgacggcgtcacgctggccgccaagcaggcgctgacgcgtgccctcctcgcctccggcgcacgcatcggcgagatcaacacggtgcgccggcacctgtcccgcatcaagggcggacggctggccgcaaccgcctttccggcacggctgctgacgctggcgatttccgacgtcgccggcgacgacccggaggccatcgcgtccggcccgacggtcccggacccgaccagcctcgccgacgcccgcgcgatcctcgaccggttctcgatcacgccggaccccgagatcgccgcagccctgcgcaacgaggccaacgagacgccgaagcccggcgatccccgccttgccagttccgactaccggctcgtcgcgaccccggcccagtcgctcgcagccgccgcggaaaaggccggccagctgggtttcgagacggaacggcttggcagcgacctggaagacgaggcacgcgatctggccggcgaccatgccgaacgggcccgcgcgctcgccgacgaaggccgccgcatcgttctgctgtcgggcggagaggcgacggtgacgctgcacggcaaggggcgcggcggaccgaatcaggagttcgcgctggccctcgcgatcgccctgcacggccgcgacggcatctggggcctggccggcgataccgacggaacagacggtggcgccggctccgccgacgatcccgccggagcgatcgtcacgccggatacgattgcgcgggccacggaatccggcctagatcccgacgcatttctggaagacaacgattcgacgagcttttttgaacgactcggggacctgctggtgcccggccccacatacaccaacgtcaacgacctgcgcgcaatcgtcgttgacacgcgctccgactgataccaatttcgacccggagcaaagcgcttgactgaaaaaggcgccatggcaacgaagacgcatcgacgatacccgttcagcctccacccggttttcctggccaccgtgctcggcggcgcggcgctggccatgacgccggcaccggccgacgccgacttccgcatctgcaacacgacacccggccgggtcggcatcgccgtcggctacaaggatgacggtggctgggcgaccgaaggctggtggaacgtcggcccgaacagctgcgaaacgattctgcgcggcgaactggcggcccgttactactacatctacgcgatcgactacgatcatggcggcgaatgggccggcgaggccttcatgtgcacgcaggaccagatgttcacgattcgcggcatcgatgaatgcgtggaccgcggctaccagcggaccggtttcttcgaaatcgatacgcatgagcagacgagctggaccgtacagctccaggatcccgcactcggcggcgacggcaccgggggcgaatagcaccggtctatccggccttggaaccggatatcatcattctttgatgccgaactggtcgcatcaggccgtgacccggcatcgcgattcgtcatacaaaagagttcgcgaggtaataaccgggcgactcgaacgggcgcgaacgcgctaatcgtgattccggggggaacgaggacgatgcggcggcaacggtccatcaagattctggcgacgctcggaccggcgacatccgaggaagacaagatcgccgcgcttttcgacgccggcgcggacgtgttccgaatcaacatgagccacacgccgcacgacctgctgcggacgctgcacgaccgcatccgcgcggtcgaggcccggttcgcgcggccggtcggcatcctgtgcgacctccagggtccgaaactgcgcatcggcgaattcgccgacggcggggtcgacctggccaagggcgaccggatcattctcgataccgacaaggcccccggcgacacgtcgcgggtccatctgccgcatccgccggtattcgaagccaccgaacccggtcaccgcatcctgctcgatgacggacgcatccgcatccgcgtcgtcgaggccgaatccgaccggctgacctgcgaagtcgaggtcggcggcaggctgacggaccgcaagggcatcagcctgcccgacacgctgctgccgttcggcgcgatgaccgacaaggaccgggccgatctcgacgcagcgctcaatgtcggcgtcgactgggtggcgctgtccttcgtgcagcgccccgaggacctcgccgaggcccgcaagatgactcgcggccgggccgcggtgatggccaagatcgagaagcccgccgccgtcgaccgtctcgaggagatcatcgagatgtccgacggcctgatggtggcgcgcggcgacctcggcgtcgaaatgccgctggaagccgtgcccggcgtccagaagcgcatcacccgcgcctgccgccgcgccggccgacctgtcgtggtggcgacacaaatgctggaatcgatgatctcggcacccgtgccgacccgcgccgaggtctccgacgtggcgacagccgtgttcgagggcgccgacgcgatcatgctgtcggccgaatcggcggtcggcgattatcccgtcgaagcggtcgccaccatgaaccgtatcgccgagcaggtcgaaaccgattcgaacttcgccagcatcatcaacgcccagcgcgccgatcccgaaccgacggggcccgacgcgatcagcgcagcagcccgcacggtcgccgagacgctgcggctgccggcgatcgtctgctatacctcgtcgggcgcaacgggactaagagccgctcgcgagcggccggaccggccgatcatcgcactgagcccggttcctgcgaccagccgccggctggccctcgtctggggcgtgcactgcgtgcagacggaggatgcccgcgacgaggacgacatggtcgaccgggcctgccggatcgcataccaggaaggcttcgcccgacccggccagcgcatcatcatcaccgccggcgtgccgttcggtacgccgggcgcgaccaatatgctgcgcatcgcctttgtcggcgacgacaaggatgacggcgagtagagggttccgcgttccgctatcgggacggagcggctgtcactgctggagcggaatgacgttccgtgcggcggtcgccggtcccctgtcgttctggggaagattcagttcggacgccatcttttcgatttccgcgacaaccgtgtccgttgccgcgtaatgcggcatgtgcccgacgccctcgagttcgacgaggcgggcaccgggaatttcctcggcgagccggtgactgtggatgcgcggcgacaccgtgccgtcggcatctccggtgatgatcaccgtcggaatccggatttcagcgtagcgcttcgactggacagtcaggaaatcgaccagttcggcgacatcctgcgcgttggccctgaactccgcgggacgcagcaccagcgcggcgccggccctaggcacatagtcctccggcggttcctggggcgcaaaagaggaacgcactgcaggcttgacgaccatttcgccgaacggcacgaccacggtgtcggtgaaaagacgccccagccccggcagggtagcgagcgtgtaataccagttgatgccgccgggccagggatgcgaggcaggcgccagcagcgccagcccggccacgcgctcgggatattcgagcgccagcgtcaacgccagcgcgccgctccacgagtgaccgacgacgacggccctgtcgaccttgagattgtccatgacgccgatgatgtagcgcgcctgatcggacggcagtgcggcatccgggccctccgtgcgctggctccagccgtggcccggccggtcgatcgcgacgacccggtggccgtgtgacagccgctcgcccagcgcaagcatcggatcattgagattgccggacgcgccatgcaacagaacgacgggcagtgccttgcgcggccccgactgcatgaaatgcatgcgcaatccgtcgacccgggtgaaatttcccgccggcggatacatgtcgccgagccgcgcggcccgcgacgcggaataggccgccagcccgccgagcaagaccccgacaactgcaatagctgtgacaagcatacgcacgttcaaaaagccccagaccgatcccttggatctcccctcgggcccccaccggccctcgggacgcagacatccatgaacctcagatttcgcggccttctacctccggctccagtttctcgatggattcccgcgtacttccgaaatacggatgcaccgacagcacctgcctgaacgcgtcgagcgccttggccggttcgtcgagatcccggaaaatcatacccagtccgctcaatgcgccgaagtggcgcggctggagcgccagcacctgctggatgtcggccagcgacagatcgtactcgtcgatcagataataaaccgtagcccgcatgttccagccttcggcgaactcgggcttcgattcgataatcgtgtcgagatactgaagcgccagcccgtagtcctgcttcttgatcgccgagccggcgcgtacgagcaggaggtcgacggtatcgcttcccgaatggttccaggcgatcacgatccggcgctcgagcgccttcgcctcggactcgctttcggcggccgccaggctgtcgagaagggtctcgacggacggcgggccgtctgcgtcggtatcgggagtgtctgaattggcggtttccggccccggttcgtcaccagatgcatcggaatcaggaacgccagccggttcgtttgccgccggcgcgaatgtcggcaccacggcgagcacgcccgagaagccgagcgaaaggccaagcacaaggatcaggccacggaaatgttccatggcaaaaagatgggacagccgcgcgcccgggtcaacgggcgcgccacgcgcgaaggctcagccctggcgcgccttgaagcgccggtttgtcttgttgatgacgtaaatccggcccttgcggcggacaatacggttgttgcggtggcgcttgaccagcgacttgatcgaattacggactttcatggctctcgaccgctgtagtcggctgccgatcacggcgccgtttcacgaattggtgtttcggatcaaaaaagccggcgcaaggccgaccccgaattcgcggcggaccttagtggcagcgtcgtaacgtgtcaacgcgaccagccggtccggcgatggaatggtgggcgcggctgggattgaaccagcgacccctacgatgtcaacgtagtgagtttttccaatatcgccaggtttcctcgggttttttcgggcccccgagggcccgaatgcgtgaacattccgggaacaaaggggcggttaccgccaagtttccgccaagtccgttcccggcccgttcagcactttctcccttttgtctgtcgagtacagcgcaagtcgaccgggacggcagagccccgggcggtcgcctcgcggtgcgatcggcaccgaacccgaaaggagcacgatatgcgtaagttatcactggcgatcgccgccggccttctcgccatggccgtcccggcgcaggcgggaacgctcggctgcgatccggaggagccctgtgtcgtcgccgctgcccttcccgacggcagcattgtcgtcggcgtcggcgacttcaccgtcgccgatctcaagtacaatccgctgcgccgacgctacttcgccttcaacggcgcggggcggttcgacatcagggacagggcgaatcccttcgacatggtgatcgatatcgccgacaagctgggcgggctgaactatgacttcctgacaccgccggctgcgcccgagaacgtgcggcggatgggccgacaggcactaggccggacccggtaacgcgcaacaacaccgggcgcggccggccgacgattgacttccatcggccgcgcccccgcaatggcggcatgtcgaacagccgccgctttccgcccccctggactgcaaccgacatcgggtcggcattcgtcgtcgaagacaatgccgggcagcagctcggcttcttctattacgaaaaggaggccggaaggcgcagcgctgcgaagctcctgacaaaggacgaggcccgacgcatagcgcacggcctcgcacggctgccggaattgctcgccggcgcgaccgacgagtacggtctgctgcggatgatcgaggcatgcgagcgttctgccgatgccctcggtctcgaggaaatcgcctttctcatggcgatggcgaaacaagatctcggggaaggaaaatgagacgcaccgcgatgccggtcctcgcatggctgatgatcgccgcaccgccggcggcggccggcgagaccatcgcgggcatcgcacggatcgtggacgcggacacgatcgacgtcggcgagactcgagtgaggctttgggggatcgacgcaccggagctgagcgaggatctcggccgggaagcggccgcctggctctcgggcgttctggaggggaaaccggttacctgtgcggcgctctacctggaccgttacggccgcacagtggcgacctgcgccgtcgatgggccggggaacaaagcggatgtgggggagcgaatcgttcgggagggctgggcccgggactggccgcgctactccggcgggcggtaccgtgctgccgaaagccaggcggcgacatccgcaatcggaatctggtcgggaatgttcacttcggggggatgcggagagccgttgaaacctgagtccagacaagaacctgaccctggcaggaatcccccctcagccgggcggccgagggggtaatccttcgaatggaataaccactcttaccgtggtttcccaaccgactcccgagcggagattgccctcccggtgccgagacgtcaagatggatgcggatgaggcggcacaaagctctgggttgtggacatggagatccgcgaagacgtctcgctcggaattgatctcggcatcggctcgtgcgggtgggcggtgatccgacaatccggcaacaatggtgaaatcattgccctaggcgtacggaccttcgacgttccggaaaccgacgaaaaacggaccccgacaaaccagcttcggcgacagttcaggggaatgcgccgcgttctacggcgccggcgccagcggatgaacgcgatccggggtctgttcgcgaaaacaggactgattgacgaaccggggccggacgcgttggcggtcggcctcgatccctggcagctgcgcgcggacgggctcgaacgtgcgttgtcaccgatcgagcttgccgtcgcactcggtcacattgccaggcacaggggcttccggtccaacagcaaacgcgaccgcggcgccaacgcctcgaaggactcctctgcaatgctggaggcgatagacgcgacgcgcgaccgcctcggtcgctggcgaacggtcggcgagatgttcgcccgcgatccctattacgccggccgcaaacgcaaccgcgacggcgactatgcgcgctcggtgctgcgcgaggaccaggagcacgaagtgcggcgtatccttgccaggcagcgccaacttggagccttctccgacaacgccttcgaggcgcgtttcctggatctcgcgttttcgcaacgaccactggccgacagcgaggatactgtcggcgcctgcccgttcgagccggaagagaaacgggccgccaagcgggcgcggtccttcgagctgtttcgctttctggcgcggctgacggcactgcgtgtcggcggacgccctctcacggcggaggagctcaccgctgctgccgccgagttcggagggcagcgcggcatgaccttcaagcgattgaggaagacgatcggcctcgacccgggggagcgcttcgacggcctcccgccggatgacgagggccgtcgcgacgtcgtcaatcgctcttcgtcaaatggctgcatgcaggggacggccgtcctgcgcgccgccctcggggacacagcatggcgctccttgctcatggcccctgaaaagctggacaggatcgctttcgtcctgaccttccgggaggatctcggctccatccgcgcggggttggaggatgtcggcctggacccggttgttctggactctctcatgacggccgccgtgcaaggcgatttcgcagatttcaggggggccggccacgtctccgccagggtctgccgcgcggtgatcccgcatctcctgcagggaaagacatacgacaaggcgatgcgggccgcaggctaccggcacaccgaccgcgagcgaccgatcctcgctgggctctcctttcacgattccgtcaaggcgcaggtggcatgggccgccgaccggatcgccaatcccgtcgcccgcaaggccctgaccgaagcgctgaagcaggcagcggcaatcattcacgaatacgggttgccaggccgcattcatgtcgaggtcgcccgcgacgtgggcaagagcaaggacatgcgcgacgagatctcccggggcatcgagaggcgcaaccggcagaaagatcgcctgcgggaggagtactgcgaaacggtcgggcgccagccggccggcgccgacgacctgctgcgctttgaattgtggaaggagcagaacggccgctgtctctacacggaccagccgatcagccctgccgccctggttgcctccgacaactcggtgcaggtcgaccacattctgccgtggagcaggtcgggcgacgattcatacctcaacaaagcgctgtgtattgcaagcgccaatcaggaaaagaagggccgcaccccctttgagtggctgggtccggacgaggcacgctgggccgcctttgccgcgggtgtcgaatcgaaccgcgctctcaagggcctcaaaaagcgaaactatctcctcagggatgcgtcggtcctggaaacgaaattccgtccacgcaatctgaacgacacgcgctacgcctgccggctgctggccgatgcgctcgccgccttctatcccgctgacgatacgatcgaggaaccgcaggggccgcaccgcaatcgacgccgggtgttcacccgacccggtgccctgaccgaccggcttcggcgcggctggggcctccagcgcgtaaagaaagacgacgcgggcaaacggatcgccgacgatcgccaccacgcgctcgacgcgctgatcgtggcggctaccagcgagtcggcgctgcaacgcttcacccggctgttccaggacgccgaggccaaaggatcgcatcgcgatttctcgcggctcgaccctccatggccgggtttcatccaggaggcccgggagaaactggcggccgtcttcgtgtcgcgcgccgaacgtcgccgcgcgcgcggcgcggcgcacgccgcgaccgtgcgccagatctcggatcgggacggcgtccccgtcgtctacgagcggaaggccatcgcaaatctgtcggacagggacctcgaccgcatcaaggacgccgaccgcaatgcccggctggttggctccctgcgcgcctggatcgctgccggcagtccgaaggacgcaccgcccctgtcgccgaaaggcgatccgatccgcaaggttcgcgtggcgaccggcaagaagccggacgttcttgtccgggccggggccgccgatcgcggcgtgatggtacgggtggacgttttccgcaaacagacggcggacggtagccaggggttttttcttgtgccgatttacccgcaccaggtcggcgatccggcgggctggcccgcgccgccggaccgggctgtcgctggcggccgcgacgaagcggactggccggtgatcgattcgacctacgcgttcctgttcgccgtctatccactgtcctttctcgaactggtaaagccggacggggaaatcgtggaaggctatttccgcagtctggaccggagcaccggcgcgatgacgatttcaccggattggacaaaggcgcagatccggaaaggtatcggtacaagaacactcgcctctctgcgcaagttcaccgtcgaccggctcggccggcgctacgaagtgcggcgggagacccgtacatggcgtggcgcggcctgcatctgacacaaccgtcgcggcttacgctcgccgacggccagatagtcgtggagcaagacgacgacgaggtgcgcctgccgatcgaggacatcgcctggatcgtgctcgattcgccccgcgccacactgacctcatcgctcctctccgcgtgcatgtcagccggcgttgccgtggtcgtgaccgacgagacgcacacgccctgtggcattgcgctgccatttcacaatcattttcgccaacccgatgtggcgtgccggcaagtggcgatgggcacaccgtttaagaaacgtctttggcaagcgatcgtcaggcgcaagatcgccaaccaggcagatgtgcttgcgatgctcgggtgcgacggcgccgacatgatacgcgccatgagccagcatgtcggctcaggcgatccgggcaacgtcgaggcccgcgccgcgcgccggtactggagccggctttggccggaattccggcgcggagacagtgatgaccgtcgcaacaagctgctcaactatggctacgcggtggcacgcgccggcgttgcccggtcgcttgttgcctccgggctgctccccgctttcgggctctcgcaccggagcgtgacgaacgcgttcaacctcgccgacgacatcgtcgagccgttccgccctttcgtggacgcgctggcctggcggacggccgacaatggaaagccttcccgcgccgacctggcggtggtcgaccggcaagtgatggtcggcgtgctgcttgtcgaagcctggatcggcacagattccgttacgcttctaacggcagcggatcgagcggcaacgtcactcgtccgggcaatcgaagccaagttgcccgatgtacttgagttgccggcgctcaacccatgaagtcgaaggaggcccgatacttgtgggtgctcgttttctttgatttaccagttggctcaaagccggaacgtcgcgacgccacgcgtttccgaagatttctcaaggacgatgggtacatgatgttgcagctgtcggtctatgcccggatctgccggggcgcggaagccgcggagaagcaccagcaacgaatcgtcaagaacctgccgccgaagggaagcgtgcgcatgctacaagtgaccgacaggcaatacgggcgaatgaagcttttgcttggaaaacgcaagaaaaatgagaaggtcgcgccgcaacaactcgtcctgctctgatttccgcccgcggaatctggcggaaatcagagcattttcagacacttccaatcgaagcagcctaccaagggggagtcggtagggaaaccacggcccatcttcgccctgtgagaactcggctggcagcctaccaagggggagtcggtagggaaaccacggcggcggtgccgaacgaggcgaggatcgccggagcctaccaagggggagtcggtagggaaaccacggcacgttctacgaccgatgggcggccggatcaagcctaccaagggggagtcggtagggaaaccacggctggtctgtgtcgccatcggtctgatcagggagcctaccaagggggagtcggtagggaaaccacggcttgttcatgactcgatctcaggaaggccgaagcctaccaagggggagtcggtagggaaaccacggcgctatcggtgaaggtgaacgagaacaggttagcctaccaagggggagtcggtagggaaaccacggccgtcatgttccccttccagaagagggggatagcctaccaagggggagtcggtagggaaaccacggctccgtccgtccgcgtcaccatgaacttgttagcctaccaagggggagtcggtagggaaaccacagcttatgcgcaggaccagctcggccaggccgtcagcctaccaagggggagtcggtagggaaaccacggcttcaccagcaccttaccagcgacgcgttccagcctaccaagggggagtcggtagggaaaccagccccagaaccgctcccagaaaacggctcgccgcgataggaccaagagcagatcaacagatcatttcaagatgaaccgatttgtctgcgacactatccgagaggcgttcgtggcgaggcattgccccggtttcccctccccgccgggcggacgatgagctccttcgcctccgtctgctgcccggacacctgataggtggtctgcaccgcctcgaggtcgaacggctcgaagatccggcgcacctgcggcgtgtcgttgatcgacaggatgaaggtcccctcgaggcggccgagggtctcggcgagtcggttgaagtccgacgcgcgaaacatgccggtaccgtagtctgcctcgcagccgaaatagggcgggtcgagatagaacagcatgcccggccggtcgtagcgggcgagaacctgatcgtaagggagattttcgatcgcaacgccggcgaggcgttcgtggaccgcctcgagcatggcgccgagccggcgcatgtcgaaactgccgggtgcaatcggatcgacaccgtagttgcggccgacgaccttgccgccgtaagcggtgcgctgaagatagaggaaacgggccgcgcgctccaggtcggtcagcgtcgccgggtccgtcctggacagccggtcgaactcccggcggctggtgatctggtagcgcagcatctcgaggaacggcacgtagtgccgctgcaggatgcggaacagacccgccacgtcgccgctcagatcgttgacgatctccgccttggggacatgccggcggcgaaagaagataccgcccatgccgaggaagacctcggtgtagccgtcgtgggggacggcgtcgatcgcccgcacgatgcgccgggcgagattacgcttgccgcccaggtagggcgccaggggcgcggtcgccgcaatggtgcgaccgccaaacaggttgtccatatgtttaccgctcgcgtgcagcctcgcgtcccggcggggcggcgttgagcttatcttgcgtcgcgcgggttctcgattggcgtcagggcccgcggttcggggcgtgccagcgccccggcccccgccacctccgggcggggaaaagcccgccgccggagatccggcgacgggcagttgccccggcgccatttgcgggggctgggaggcaggagcccggcgccgaagatcggaaaggcgacggccgggtcaggcggagaagaacgccacgacccgctcccagaaggcgaccgccagcagggcaatcggccagaacacgttgcggaccacgaaccggcccgcccgggcggcccaggcggcaccgacggcgcgctgctccatcgcctcgacccgttcgacggccggcagcacgcgatcgttgatgaccgtctcgatcgttgtcaggcggccgtcgatcgccgtctgatcgtcggccaggttccggacttccgcgcccaccgcctcgagcccctgatagagccgttcccggctgcgcgccgcgctcgccgcatcccgttcctgcgcagcgatcagccggtcaagcttgccctcgacgcggcccag

SEQ ID NO: 4292 - DNA, 15995 bp, synthetic construct
  misc_feature 1..15995: note = Synthetic
  source 1..15995: mol_type = other DNA
gccaaaccctccgccaaaaccgccaagcgcccggccaaggccgcaaccgccgacgccgtgcttgaaccgacgctgccgacgttcgctgccgataccggcgacgtgaaaatcgccgccgaggaagcggcctgcattgcggacgccacccaggccgccgccgtcgatggcctgaccgcgctaagtcaggaatatgccgccttttttgaaaagagcgctgaggaagcgtcgggcctgatgaaagcgctgtggacggccaaaagcctgcccgaggcgatcgagatcggcaacaagtacggcctcgacgcgctggccgcctacctggcgcacctcaaacggctgcaggaaatcgccgcccagtcctcgggcaaggccttcgagcccttcgcggacgtcctggagtcgcccctggcgtggtggaagacggcggcttagtgctgttgtgggtccgctgacgcttgacccacactacctatttccttgcgttcagacggtattacaaaaagtcccttttccatcgtcatccccgcgcaagcggggatccagttctttgattctactatggattcccgctttcacgggaatgacggcgtaaattgaaaataatatagttgtacgtaacgttaccctaccgcagcgggcccagcgaacgccccttgaccggccggcggtcacgccgcgcggtttgcgtctgataagcctgggcgcagtgctctttgcaatagggcgccgtcggctcggactttttgccgcagaaatggaaatcaggctcgccgggatggccgatcggccacttgcacatgcggtcggtaagctgcaatagcgtgatccgctccttgaccgccttcttctccggcgcctttttaggcgtggcgcgggccttgggcgcctccgccttgaccggcgaggggcgcgacgacagccccatgcgatgggccttgccgatcaccgcgttgcgggtgacgttgccgagatcgctggcgatctggctggcgctcaagcccttctcccacagttccttcaggcgggatatccgttcatcggtccaactcatgggtgccctcgcttctctgaccttggtgttagctaatccccggggacgggaaaatcaagctgcatcggtcttaagttgcacctagaacagacctcggctatgacgaacagcatgtccgccccgacccagaccccgcaaagcttcgccgtccgccgcatcggccgcatcaactggatgggcgtgtggaccatgtacgccaaggaggtgcggcggttctggaaggtctccacccagaccatcgtcgcgccggcggtgaccacgctgttgttcctggcgattttcgcgctggccttgggcggcggcggccgcaccacctgggaggcgccgttttccgccttcctggggcccggcctcatcgtcatggctattctgcagaacgccttcgccaacacctcctcctcgctcatcatcgccaaggtgcagggcaacatcgtcgacgtgctgatgccgcccttaagccccggcgagctgaccttcggctacgccatgggcggcctgacccgcggcgtggtggtgggggttgcggtgacgctcctcatgctacccttcgtgccgctgaccttaagccacccgtgggcgatcctttacttcggcgtcagcaccgccctgatgctgtcgctgatcggcgtcctgaccggcatctgggccgacaagttcgaccatacggcggcggtcaccaacttcatcgtcacgccgctgtcgctcctctcgggcaccttttataccatcgaccgcctgcccggcgtctggcgcacgatgagccatcttaatcccttcttctacttgatcgacggcttccgcttcggcttcttgggccgcgccgatagcgacatcgccatcggcgttgcagtcaccttggcgctcaattccgccctctggctggcctgctacgcgctctttaaacgtggttataaactgcgttattgatcgccgttttcgtccattgactatggggggttgagtccccataatccccggcttttcgacgcccccttgtgagggctaagggcctttgcgatgaagaacagccgcttggacgatccgcagcagtcgctgatgccgccgttattgccggcctacgcgcgcgccgacctgcgggtcgagcgcggcgagggcccttatctttacgataccgacggcaagcgctatctcgatttcgtcgccggcgtcgcggtcaattgtctgggccactgtcacccggcgctggtcgccgcgctggaaacgcaggccaagaagttgtggcacgcctccaacctgtttcgcatccccggacaagaagagctggcggttcggctggtggcggcgacgttcgccgataccgtgttcttcggcaattccggcgccgaggcggtggagtgcgccatcaaaatggcgcgcagatatcaatcccatattggcaggccggagcgcttccgcatcatcaccttcgagggcgcgtttcatggccgcacgctggcgaccatcgccgcctcgggccaggaaaagctattgaaaggttttggccccaaggtggatggcttcgatcaagtgccgttcggcgatctggaagcgacccgcgccgccatcagcgaggagaccgcggcgatcatgatcgagccggtgcagggcgaaggcggcgtgcgtccggccagcgccgaatttttgcacggcttgcgcgcgctggccgacgagcacgatctcttgctcatctttgacgaaattcaatgcggcatgggtcgctccggcaaattgttcgctcatgaatgggcccgcgtcgcccctgacatcatggcggtggccaagggcatcggcggcggttttcccttgggcgcgtgtctcgccacggcgcgcgccgccgagggcatgacggtgggcagccacggctcgacctatggcggcaatccgttggccatggcggtgggcaatgcggtgctgagcgaaattctcaaacctggattcctgaagaccgtgatagacatcgccgactacatgcgcgcgcaactggtggcgctggccaaccgccatccggcggtcatcgacagcgtgcgcggtttaggcttgatgctgggcttgcggctcaaactgccggcggcggagatcgtgccggcggcgcgggcgcgcggccttctggtggcggtggcgggcgataacgtgctgcgtctcttgccgccgttgatcatcgagcgcgcccatgtggacgaggcgatcgcgcttctggatgaaactttcgccgccgtgacgccggctgaggcgtaaaggagatcgcttgatgacgatccggcactttctcgacctcgacgcattgccggcagccacgctgcggcgcattctggaagcggccttcgatatgaagcgccgccgcgccggttggcccaagggcaagatcgacaacggcgcgcccttggccgattacacgctggcgatgatcttcgagaaatcatcgacccgcactcgcgtctccttcgagatggcgatgcggcagcttggcggttccaccgtggtcatgcagggccaggacacgcagctcggccgcggcgaatccgtcgctgacaccgcccgcgtgctgtcgcgctacgtcgacgccatcatgatccgcgccaatcgccacgacatggtgcaggaactggcccgcgaggcggggatcccagtgatcaacgcgctgaccaaccgcagccatccctgccaagtgatggccgacgtcatgaccttcgaggaagcgcgtggacccatcgccggcaagcgcatcagctggatcggcgacggcaacaacatggcggtgacctggattcacgccgccgcgcgattttcctgcgagctgcgcttagcctgccctgccggctatcggccgccgcagggcgagatcgaatgggccaacgccaacggcggtaaggtgaccttgagcgatgatccggcctacgccgccgacggcagcgattgcctgatcgccgatacctgggtatccatgggcgataccgatgtggaagagcgcctggcggcgctcaaaccctatcagatcaatgccgagctgatgaagaaggcgaaacccgacgccgtgttcatgcactgtctgccggcctatcgcggcaaggaagtgacggctgaggtgctcgatggcccgcgctcggtggtgtgggacgaagcggaaaaccgcctccacgtgcaaaaggccattctcctgtggtgcctcggcaagcttgattgacatgtcgtcggaactcgaagccgtagagcgtgtcaacgccgatgtcgtcgtgcccttcaccatcgaagggcgcgacgtgcgcggccgcatcgcccgtctcgacgaggtggtcgatgacatcattgcccgtcatgactatcccgatgcggtatccgccctcctcggcgaggcgctgctctatgccgcgctcctcggcagcatgatgaagtttgaaggcatcttcaccctgcaggccagcggcgatggtccggtttcggtggtggtcgccgattacgccgccgccgccggcgctgacggttcggtatccatcggcggcgtcgtgcgcggctatgcgcgctatgatgaggcgcgtctggcggcgctgggcgatggaccttttgaccttggcatgctgatgggacaggggcgtctggtctttaccctcgatcagggccagtacgccgaacgctatcagggcatcgtcgaactgaccggcgcgtctttggatcgcgccgtgcgcgcctacttccttaattccgaacaactgccgtccgagatcatcgctcactgcgccaaggtcgatgacggcaatggcccgcgctggcgcgccgcctgcttgctgatccaacatctgccgggcggcggcaagatccgtggcgatgacgttgccgaggaaaattggcagcatgtccgcgccttgatgcaaagcgtcaggcgggatgagatgctagatcctgcgctcagcctgcacgatatcctgtatcgcttgtttcacgaagacggcgtgcgggtgttcgcgccgtcgcacgtagcgctcggttgccgctgcagcgaggatcggctgcggctcatcatctcctccttctcggaggaagagagaagcgatatggcggaagaaaacgtcatctccgccacctgcgaattctgcaaaaccgaatatcggtttttgctgtcggaatttaattaaccccgccagaagccgggcgtgaacagcaccagcacggtgagaagctccagccgccccaccagcatcgccagggagaaaagccacttggtgctggcgggcaatgattggcagttgccggccggcccgatgacatcgcccaatccagggccaacatttcccatcgcttgagcaacgccggaagccgccgtaatgagatcaacgccagtcgccagacaggcaatggtgaagatcaagaatacaacaacatagagaaaaaagaagctcgccacggatcccatgacagtcgttggtacgggccgtccgttatagcgggcgggaagcacgctgctcggctgcaggagcttgcgcgcctgcgcgtaggccatggaaaagagaacgcggaaccgaaacatcttgatggcgccggcgcttgaccccgaacatccgccaagaaaggttgcaaagaaaaacaggccggcggcgaacgcgccccaggtctggtaatctgtcgagacgaagccggtagtggtgacaacggaaacgaggttaaacgaggtgtatcgcaacgcagtcagcggcgcatagtccttgaatatgaccagccacaatgaagcaatgccgataagacctgccaacactataaaaaataatcgcacttggtcgtccttgaccaaagatagcggacgcccgcgtatggcttggaaatagagtgtatagggtagtgccgacaatgccataaatagtgttgcccaaaaatccagaagcgggctgttgaaatgaccaaaagatgcgtcggaagtcgagaaccctcctgtcgctactgtcgcgaatgcatgcgccaccgcttcaaagaacgtcatgccggaggcgtcataagcaataatgcaaacaatggttatgcccagataaaccataagaataatgccggcgagctgcgatacccgcggcacgattttttccgagttgtccgaggactccattctgaaaagctgataaccggcgatttgcagcatgggcaataccgcgattgccatggcgatgatgccgacgccgccaagccaattaagaatcgcccgccacatcaggatgcccggcggcgcggtatcaagtcccaccagcaccgtggcgccggtggtggtaaggccggacatggcttcaaagtaggcgtcggtataatcgatctgaagcgcggaataagcaaacggcaacgcgccgaacgccggcagaatgagccatgccgacacggtaagaataaaagcctgccgggtggtcaagcggtcatatgcgccgcggttggcgaaaataagcgcgccggccacgaacagcgaggttgcagacgccgccataaacacttgccagtcggaattggcgaaagaataatcaatgagcgccggcacggtcataccgatgcccagcaccgtcaacatcaatccgttgatgtagagtactggcctgaggtcgagcactctgcccccttttctaattcacgcattctagaaaatccgctcaagtgtcagcagacacaacttcattttgtcattcccgcgaaagcgggaatccagattctttgttaaggactggatccccgcttgcgcggggatgacgatggaagttttaatttccagtgcgttcattttatggaaaccaacctagtcgctcgtccggctgcgcggattgccgatcacggccagaaactcccgtcgggttttttcatcatggcgaaatgcgccgagcatggtgctggtaaccatggtgacgccgcgtttatggacgccgcgggtggtcatacattgatgcgccgcctcgatcaccaccgccacgcccaagggccgcagcacgtcatgaatggtgttggcgatctgcgccgtcatcttctcctgcacctgcaaacgcttggcgaaggcctcaactacccgggcgagcttggaaatgccgaccacgcgatccttgggcagatagccgacatgggcgtaaccgatgatcggcgccatgtggtgctcgcaaaacgattcaaaggcgatgtcgcgcagcaccaccatctcgtcatagccctcgacctcctcgaacgtgcgctcaaggtaggccaccgggtcttgcgcataaccggcgaaatattcctcaaaggcgctcgccacccgacggggcgtgtccttcagtccttcccgcgacggatcgtcgccggcccatttaagaagcgtgcgcaccgcctcttccgcctcgcggcgggagggacggccggcgttgctgtcttccgccatgctagttcaccgatcgcttttcatagggactgtcgagggaaaaggccgggatcgccacttcaaacacgtcgcccgcgccggtggtcatcaaaaaactgccgaccatgacgcccgacggcgtcgccaggggtgcgccgctggtgtattcgaaggcctcgcccggttgcagcaccggctgctcgccgaccacgccctcgccgcgcacctcctgcacccggcccagggcgtcggtgatctgccaatagcggcttttcaagcgcaccgtctcgccgccctgattttcgatcatcacccgataagcccacatatagcgcgcctcggcgggttcggagcgctcttccatatagcggggctccaccgtcacctggatattgcgcgtggtcgacctgtacatcctcaagccatgccgtttcttaccagaaccatgaatattcttgcgccgcgacggaggcttgtaaagccgggatacgggcagtctgtcagccgcccagccccaccttggccagcgcctgggcgaggtcttcgatcagatcgtccgggtgctccaaccccaccgacaggcgcagcatgccctcgccgatgcccagttcctcccgcgccgccgccgtcagaccctggtgggtggtgctggcgggatgggtcatcaggcttttggcgtcgccgatgttgttggaaatgtcgatcatctgcaaggcgttgaggagcgcgaacgcctgcgcccgtccttccggcacatgaaacaccaagatgctgccgccaaccccgcccatctgacgcatggcgagatcgtgctgcgggtgatccttgcgccccgggtacatgaccttttgcagtttgggctgggcagccaggaaatccgccgcccgggcggcgttggcgcacatccgctcgacccgcagatcgagggtttccatgcctttgagcagcacccaggcgttaaacgggctttgcgtcggcccggtgttgcgcaagtagggcagcagggggtcggcaagaaaagcgttggagcacagaatggcgccacccaggcaccgtccctggccgtcgatgtgcttggtggtggaataaaccacgatatccgcccccatctccagcggccgctgcaacaggggcgtagcgaacacgttgtccaccaccacccgcgcgccggccgccttggcgatgcggcagacggcggcgatatcgacgatgtcgagggtgggattggcgggagattccaagaaaaacaccttggtgttgggcttgaccgcccgcgcccaggcttccgtgtcgcggccgtccaccagggtggtttccacgccgtaacgaggcagcaggttgtcgatgatccagcggcaggagccgaacagcgccttgccgctgaccacgtggtcgccggtccgcacctggcacaagatcgccgccgccaccgccgccatgccggtggccgtggcgcggcaagcttcggccccctcgatcatcgccaggcgctcttccagcatggcgttcgaggggttgcggagccgcgaataggtatagccgtcctggacgccggcaaagcgatcggcggcgtcctcggccgcctcataggcatagcccgaggtcatgaaaatggcctcgctggtctcgcccagctcgctgcgccaagtgccggcgcgcagaagctgggtggagagccgccacttgctggtgatggagcggtcgaagccggtcttatgtttcatggggggtcctatcggtcggatggcgtgcgacctctttaggcagggaaccgggaaaggtcaagctaacgggagcaggaggcgccgcccagcacgcaaaagcgggcgcagtgcggatgattgaggcgcaccggccgcgccgccgcggccagggtcggccccagctcaaattgcggatcatagggcaacagcgtgcaggcgaccaccgccggcgacgcggctccctgacgcttgaccaccatgcgcgaggaggcgcacatcatgtcttccggccgcactttaaggatatcccagcaggcggtggtgatttccggcacgtcgcggctggcgtccatctccggaaacagcaccaggacggaaggatcgtcggcgtcgatggcgagccccagctcggcaaaccgccgggcataggccgcgcgcagctcatcctccggctcgccgaacacggtgcgccccgccacatggacggtaaagccgtgggcgattagccagcgcacgccctcaatcatcgccgcccaggagccggggccgcgcagcatctcatggcgttcgggttcgggatggtcgatggagacgcgcacggcaagccggccggcatgggcgcggtgcagcgccatgagccgctccttaaagcgcagcatcggccgcatggcgttggtcaacaccaagaccctaaagccccgccccaacgcctcgcccatgatctggtagatgtcggggttcatgaacggctcgccgccggtcaggccgatgtcctcaaccggcagacggtcgcgggcgatttcctcgaaaaagacccgcgcctcggccgccgtcaggtaggccaggcgatcgtttttggggcttgattcgatatagcagccgacgcattccaggttgcaccgcgtgccggtgttgagccacagggtttttaagccccggaacgccaccgccgcccgcgcctcgcccttggcggtaacgaggggatcgcggaacttcgccgggttgagcggcggcgcggcgggggtaaaagcgggggcgatggtcatggggctaagtgtcgccgaagcgccgggttctggcaatcgaggagtggcgacgggcttatcccttaaaaagagatttcccgccgccagtttcccgacggcgggatcactcttcttcatggaaaaccatgttaccgtggtttcccttcagacttcccaaagatatagaagcagattgacaacgcccggtcaagtacctgatgcttgccataagggaataggacgaatgggggtggagatggaccagcacaagcgtttcggcattgatctcggcattggctcctgcggttgggcggtggcgagcaacccaggcgaaattcttggtgcaggcagctgggttttcgatgtccctgaaaccgataaggagaggacgccaaccaatcaaatccggcgtgggaataggctgttgcgtcgcgttacccgccgccgtcgccagcgcatgacgcaactgcgccaacttttccatgaacaaggactgcttgcccattcccggcccgacgccctgaaacgcgccggtcttgatccgtgggaattgcgcgcccgagggttggataaaatgctggagccggcggaatgggctgttgtacttggacatatcgccaagcaccgcggctttaaatccaattcgaaaagtgatcttgccggcaatgcgccgccagaaggaaaggctgtcttatccgctttgacggaaaatgcagagcgcttggcaaagtaccgcacagttggcgaaatgttcgcccgcgacccccactatgctgcacgccgccggaaccgggagggagattattcctgttccgtcaagcgggatgaccaagaacatgaggtccgcaaattgtttgagcggcagcgagctctgggaaattcacgcgcaacggaccaattcgaggaagcttatcgtaagattacttttttccaacgccccctacaggatagcgccgatagggttggatattgcccgttcgagaggcaggaacgacgcgccgccaaacacagctattcctttgagttgtttcgtctgatatcaaaactcaataccctgacgttacgggatggaaaggaagagcgccgcctgacgtcggacgaaataaaagccgcaattagtgatttcggcgcgcaaaaatcccttacctataaaagccttcgaaaaaaactgaaactctccgataatgttcgattcaatcgcgtaagtcaggatgaagaggcttatgacgtcgcagccaggaaagggtcgtgtgcggcaggaacctatgccctaaggaaagttgttggcgaggcggggtgggcgcacctcattgctacgccgcacattcttgatcagattgcttggatcatcacattctatgagactattgcaaaaatatcatcagaactgaaaaaactgagcctgcaacccttgatatttgacgcacttatgaagggcttggaggaaggcgcattcaaaaccttcaccggcgcggcgcatatttcagacaaggccgcacgcaatattatccctcaccttctggaagggctggtctattcagacgcttgcgccaaagcagggtacaatcatgcagagcaaacggaattcgccatcgaaaaactcgccgaccttgtaaacaaccctatcgcgcgcaaggctattcacgaaggatggaaacaaattcgcgctctggtcaaccgctatggattgcccggcgccatacatattgaaatggcgcgcgatatgggcaaaagcctggaagagagaagggagattgaaaccggcatcaagaagcgcaccaagcaacgagatgatcttgcggcggaattggcggagcatatcggccgccctccccgtggcgaggaattgctgcgctatgaactgtggaaggagcaaaacggcaaatgcttgtacacggatgctaatatttccccatcgcagttagtggcgacagataacagcgtgcagatcgatcatatattaccgtggagccgatttggcgatgacagcttcgccaataaaaccttatgcacagcgcgcgccaatcaagagaagcgcggccgcacgccttatgaatggttcagggacgaaaaatctgatgcggagtggatggcgttcgaaactaggctggaacgctgccttgccatgaagaaccgcaagaaaaacttctaccgtctcagaaacgccgaggaagcagcggaaaaattccgtaaccgcaaccttaatgacacgcgctacgccatgcgggttttgatggggctggccaaaactctctaccccaaggatgagggatggcgagtgaggggccggcccggcgctctaaccgccgccctgcgcaaatcgtggggcatcgaatcgttgaaaaaggtcaatggcgagcgcattcccgacgaccgccatcacgcgctggacgccatggtcgtggccgccatcagtgacagcgaaatcatcaagctgacggaacagtataaggaagcggagagacgcggcgaggcccgacagttaggacatgtgccagagccatgggaaggatttcgcgaagaagtcaaggcagtctatgagcgcaccttcgttgcccgcggcgaacggcgaagagcgcgcggcgagggccatgccgccaccattcgccaagtggtgaacggcgaaaacggcgaggcgaaaatatatgaacgcagggctatcgccgatttgaccgcagccgacttggcgcgcatcaaagacccggagcgcaatgccgcgctgatcgacagcttacgggcatggattgacgccgggaaaccagcggacaagctgcccacgtcccccaagggcgatgtcattcgcaaggtgcgcctgctgaccaacaaaaaactggatgtgccggtacgcggtggcgcggcggatcgcggcgaaatggtgcgggtggatattttcgccaagccaaataagcgcggcaaggatgaattctatgtggtgccgatttaccgccatgaggtggcggaccgcgccaataaccccacgccgcccaatatcgccatcccatccggcaagcccattgattccagctatcggttttgcttcagcgtatattcgttcagttatctggaagttgtcaaatctacgggggagatcgtggagggatattttcgcagttttgatcgtaatactggcgcaatcactctgtccctccaaaataggccagatcaactaattcgaagtatcgggattaagactttatcaaccataaagaagtttactgtggatcgcttcggcaaccgttatgaggtcaagcaggaaacgcgtacatggcatggcgcggcgtgcacatcgccaaacccgcccgactgagctttgctgacgggcaaatcgtcatcaatcaggatgacggatcgatccgcctgcccttggaagacatcgcctgtctgattctggatacgccgcagattacggtgacgtgcgccatgctgtcggcttgcgcgggccagggcgtggcggtgatcgtgcccgacgccaagcatcatccggcgggcatgctgctgccttttcatcaacattacgcccaggcccatgtggcgcaggcgcaagttgaaacctcggagcctttccgcaaacgctgctggcaggccattgttaaagccaagatcaacaatcaagcctcggtggcggcgatgcgcgacgcaaccgcggcaaaggccttgcgcgccatggccgggcaagtgggatcgggcgatcccgacaatgtggaagcgcgggcggcccgcgcctactggggcgcgctgttcgatgacttccgccgcagtgatgaaaacgaccggcgcaatgcgtgcttgaattacggttatgccatcgcgcgggcggccttggcgcgagggttggtggcatgtgggttgttgccggcgttcggcctccatcatcgctcgcgcacgaatgcattcaacttggtggatgatctcattgaacccttgcggccgatgatcgaccgactggtggcgcagcatgcgcctgccccatcgaccgccgcattatccaaagaagatcgccagatcttggtcggcgtgctcacggagaccgtgtggattgaacaggaaaaattgacgctgctggcggcggtggaaaaaatcgccgcctctctggtgcgcgccattgatgccggcagcgccgcggtgctgctgcaacccgccttggacgcgccatgaaaagcgaggacgtgcgattcatgtggctgtttgtattcttcgacctgcccgtcggcaccaaggagcagcgccgcaccgccagccggtttcgcggcttcttgaaggatgacggctatatcatgctgcaatggtcggtatacgcccgggtgtgccggggccaggatgcggtggacaagcacctggcccgcatgcgaaaaaggttgcccggcaagggcagcgtgcgcgccctgcaagtgacggaaaagcagtatgcccggatggaattcctggtcggcgattcgggaaaaaccgaaaggaccggcagtaatcaactggttctgctgtgatttcggggctgaaaaaacccggaaaatcacagccagaacaaccagttacgcgccacctagcttagcatggggaagtcggtagggaaaccacggcatacggtcttgtcgagcactggcacacaaaagcttagcatggggaagtcggtagggaaaccacggcttggccttggcataccactcatcgatccccagcttagcatggggaagtcggtagggaaaccacggccttcggattgatagtgctctttggtttcaaagcttagcatggggaagtcggtagggaaaccacggcctagcgacagcgacgatacacagcttttgtagcttagcatggggaagtcggtagggaaaccacggcggagtttgccactatttatctgaacgagtgagcttagcatggggaagtcggtagggaaaccacggcttgaaaccgcagcatatcgatgaaggcggcagcttagcatggggaagtcggtagggaaaccacggcggcgaccagcgccataaagcggcggccttgagcttagcatggggaagtcggtagggaaaccacggctcgccattgttcactacctcgaaaaagcgcagcttagcatggggaagtcggtagggaaaccacggcgcgatgcagccggtatagctgccgctaggcagcttagcatggggaagtcggtagggaaaccacggccgggttggcggtttgtcaatgggaaaaatcagcttagcatggggaagtcggtagggaaaccacggccgtgggcggcgccgcgagcggatgggttggagcttagcatggggaagtcggtagggaaaccacggcgcgggtggtcaaggacggcaaattcttcgcagcttagcatggggaagtcggtagggaaaccacggcttataccaaggattgagttactctgctgatagcttagcatggggaagtcggtagggaaaccacggccctggttacagccatgcgtctggcgcaagtagcttagcatggggaagtcggtagggaaaccacggcatggcgagcgtacctggccggcccgcttaaagcttagcatggggaagtcggtagggaaaccacggcagtcgaaaacgatgtggttaggccatgcggagcttagcatggggaagtcggtagggaaaccacggcctcctcgatattacggctgttatagaccgcagcttagcatggggaagtcggtagggaaaccacggctaacattgctggcacggcgcgctccaaggcagcttagcatggggaagtcggtagggaaaccacggcgtcgatccggcgcttgccaactggggcaccagcttagcatggggaagtcggtagggaaaccacggcgctgcccaccgtgtccgccgtggcgtggacagcttagcatgggg

SEQ ID NO: 4293 - DNA, 15422 bp, synthetic construct
  source 1..15422: mol_type = other DNA
  misc_feature 1..15422: note = Synthetic
gtccgtgctcgaccgcctcgcaaatggccaccccatcacccgcatcggcgaactgctgccctggaactttaggccaagccgtcaacccgccagcgtgggctgacgcatacgccgcatcgcgtgacggaccattcgcgctggcgcgcgctcgagccaagcaacatgcagcgtcatggaattgctatgatccggccgtttggatcacatcatgatccgcggcgccccgggccgcggcgatgtcgtcgaaggggcggtcctcgccctccagcacggcggtctcgcctgtcgcctcctgccagcggcggaggatgacatcggcataggccgggtcgagctccagcagcaccgcccgtcgcccggtccgctcggcggcgatcatcgtcgtgccggagccgccgaagaggtcgagcacggtgtcgcgctgcttgctgctgttgcggatcgctcgctcgaccagcgccaccggcttcatcgtcgggtgcaggtcgttccgggccggcttgtcgaagtgccagacattgccctggtcacgggcgccgcaccagtagtgctgcgcgccctgcttccagccatagagcatcgcctcgaactgctggtggtagtcggcccgaccgagggcgaaggtgttcttcgcccagatgatggtgctcgaccacttgccgcccgcctcctgccaggcgcggtgcagcgtcggccactccgaggaggacattctgctggccggcgaggagcgtggtgccggagccggcaaagggctcgaacaccgcctcgccctcgtccgtgtaggcccgcatcaggaactcgggcagcgcgaccgggaagaccgccgggtgctcggtctcgatcccccggcccttgtgccgggtgatgcgcagcacgctgtccgggatccggctctcctgcaccggcaggccgatatgggtgtaggccttcacctcgccgtcggcggcgcgcaggccgctgcccttgttcggggtgccggcccacttgcaggggacgatcttgtttggctggcgcggctggcggttgaagtggaacaccagctcgaaggctggggcgaggcgaccattccagtcgcccggcagaccagggccttggtcccaggcgtagaggccgaagcggcgccagccctgggcgcgcatccagtcgagccagccggaccaatagggcagccattccccctcacggtggatcaggccgaggttcaccagcacctggccgttgtcctgcaggacccgcggcagatgctggaacacgccccgcatcaacgcgtcccagtccgacacgccgccggtggtgtagtcgcgctggttgccgtagggcgggctggtgaacagcaacgccgcctgatcgccggccatgacccgggcgacggtggcggcgtcggtggagtccccgcagagcagccggtgctcgccgagcagccagaggtcgccggggcgggtgacagcctgacgcggcggatcaggttcggcatcggcggggtcctccgccggcgcctcctccgtctccatcgcgccaggcgcgccacccccgccggcctccggctgatctgcctcctcgggcgcttcgccatcggtgacggccgcgtccgccgccgcgaggattgcggtcagctcgtcggccgagaagcccagcgtggtcacatcgatctccgccgcggcctgcacaccggccagggcctcgcgcagcagcgcctggtcccaggtcgcgttctcggcgagggcagcatgaccaccgccaccagcgtcaccgtccgggtcccgctgaccatccgccggcgcggtgggcggaagctggtggtcacgccggatggcagcgcccctggcgtcgcaccggcgcgcacgcgggccgacccggcgttggtcaaggccctggcccgcgcgcactggtggaagcgcctcctggagagcggccgctacgcctccctcggcgacctggcaaaagccgagaagatcgaccggtcgtacctcggcaagatgctgcggctgaccctgctggcgccggacttggtcgaggcaatcctggatgggcagcagccggatggcgtaacgctaccggctttagagcgaaaaacagaacccccgcggccctttaaaaatcaaaggcttacgctgtgcacgcacgggttttgataggagctcttaatgaagggattgtcctcggaatggcatcattcaccactccgttctgccgcatgaaagaatgagggatcgccccgagcgttaccgctcggggcgaagaaccttcagtggaaaaccaccttaccgtggtttccctcccgactcccagtcccaataaacctgtagtttaaactcaggtcaagatggcattgttgcgcactagaacatggcctgggaaaaaaatgctaccagttcgcgtcttggcggtcgatctcggcattgcgtcctgcggttgggcgctcattgaggagaatggcgaggacgggcgtatcttcgcctggggcgtccgaaccttcgacgcccccgaaacagccaaggagcgcacgcctacgaaccaactgcggcggcagcatcgcggcctgcggcgggtgatccgacgtcggcggcagcggatggccgccatccgcgaactgcttaccacgtgcggcctgctcccgaatgatgccaagactggccttgcacgccccggactcgacccttggcagcttcgtgcagttgcgctcgatcgccgcctggatggcgacgagttggccgccgtgttggtccatatcgccaagcaccgcggcttccgttcgaacagcaagcgccagacgaacgcggccgccgaggattcaaagatgctcggtgcgatcgaggccagccgtcagcatctgatccagtatcgcagcgttggcgagatgttcgcgaagaatgctgcgtacgtcacccgcaagcggaaccgggatggcgactacacgcgttccatcctgcgtgccgacctcgaacacgaagtgcgactgatcttcgagcggcagcgcgcgctggggaacacgcttgctgatgacagcctgcacgacgcctatgccggcctcgccttcacccagcgcccactggccgacagcgaagaccgcatcggcgcctgcccctttgaaccagaggagaagcgcggggcgaagcgtggctacagcttcgagatgttccgcttcctctcccgtctcacagctctccgcatcggcacccggcactccgaacgcacgctgaccgtcgaggaaatcgcccgcgccgccgaaggcttcggcgtgcagcgcggcatgaccttcgcccggctgcggaggatcctcgacgtaccggatgccgagaggttcgcggatgtgcccgccaccgaagaaggcaagcgcgatgtggtaaaccgcagcgccaataatggctgcatgcagggatccgccgcgctccgcacggcaattggggacgtcgcctggaagaccctgctcggggtgccagaaaagctcgaccgcatcgccgttattctgagcttccgcgagagtgccgagagcatccgcgaggggctcgacgcaatcggccttccggacggcgtcgcggatgcggtgatggccgggctggaccagggcgccttcggcgatttcgcaggggcaggccacatttcggcgagggcctgccgcgcgattattcccggcctgcgaaacggcatggtctactccgaggcatgcgccgccgccggatacgaccacgcgcaacggccagcgacacgcatcgaggacatcgccaatcccgttgcacgcaaggccttgagcgaagcgctcaagcagctgcgcgccatcattcgcgaatacggcttgccgaatcgcatccatgtcgaactcgcgcgcgatgtcggaaaaagcgccgaggagcgcgatgaaattcggcggggaatcgaaaagcgtaacaaggagcgtgaccgcctgcgcgacgtattcgtcgagaccgtggggcaggcaccgcgcggcgcggaggacatgctgcgcttcgagttgtggcaggagcagtccgggcgctgcctctacaccgaccgcgcgattccgccgacggcaatcttggccggcgacaacagcgtgcaggtggaccacatcctgccttggagccgcttcggcgacgacagtttcgtcaacaagacgctgtgctttgccggcgccaaccaggagaagcgcggccgcacgccctatgaatggctgaaggacgacactgccgcctgggaggccttcgccgcgcgcgtcgagaccatcagatccatgaagggtcgcaagaagcggaattacgtgctgaaggacgcagcctcggtcgaggagaagtttaggtcgcgcaacctgaacgatacgcgctatgccgcgcgtaccctgatcgagtatctggcgcgactctatcccgccgatggcacgcgccacgtcttcgcccgccccggcgcgctgaccgatcggctgcgacgcggctggggcctgcaggacctgaagaaagtgctggaatccgatggcgagaagcgcagggccgatgaccgtcaccacgcgctggacgcgctgatcgtcgccgccaccaccgaatcggcgctgaaccgcctgacccgcgccttccagcaggctgaggcggcgggttcgcatcgggacttctcgggacttgagccaccctggccgggcttcgtcgaggaggtgcgcacgaagttcccggccatcatggtcagccgcgccgagcgcgggcgcgcgcggggcgaggcgcatgccgcgaccctccgtcaggtgcggcaggaggaggaaggcccggcggtctatgaacggaaggccgtgctggctctgacggaagccgaccttgcgcgcgtgaaggacgccgagcggaacgcggcgctggtcgaaagcctgcgcgcatggatcgcggcggggaagccgaaggacgcgccgccgaagtcgcccaagggcgacccgatcggcaaggtgcggctgttgacgaacaagaaggtggacgtggaagtacgcggcggcgcggcggaccgcggcgagatggtgcgggtggatgtgttccggaagccgaacaggcgcggcgagtgggagttctacctggtgccgatctatccgcaccaagtggcgaatcgggaacgctggccggcaccgcccgaccgcgccgtgacggcgcacaagccggaggacgtatggcccgtcatggatcgcagcttcgagtttctttggagcctgcatcagcgatcgttcatcgaggtcgagcgcagggacggcaccatcatcacgggctacttcgtcgggatggaccgcgccggcgggcagatcagcatagtcgcgccgcattcgaccaaggcgatcgcggcgggcattggcgcgcgcacgctgaagcgcttcgagaagttccgggtggaccggctcggccgcatcttcaccgtcgcgcgggaaactcgcacatggcatggcgtggcctgcacctgagccgctccgcgcgcctgtctctcgctgaccgccagatggtggtcgcgcaggaggatggcgaggtgcggctaccgatcgaggacgttgcctatgtcgtactggatacgccgcaggcgacgctgacggccgccctgctagcggcctgcatggaatccggcatcgcggtgatggtgacggacccggcgcaccggccgagcggcctgatgcttcctttccatcgccaccaccggcaggcgggcgtggcgcaggtgcagacgggcatttcagaaccgctgcgcaagcgcctgtggcaggccgtagtgcgcgcgaagatcagcaaccaggcagcggtgctggacgtactggcgcggccgggcgcggcggcgctgcgcgccatggcgcgacaggtggcctccggcgatccgcgcaacgtggaggcacgtgcggcgcgcgattactgggccgcgctgtggcacgacttccggcgtgaggacgacggtgatcgccgcaacgcgctgctgaattacggctatgccgtggtgcgcgccggggtcgcgcgtgcgctggtggcggccggcttcctgcccgccttcggcatcggccatgcgagcgcggcaaatgccttcaacctggccgacgacatggtggaacccttccgccccttcgtagaccgcctggcctggcaggtggcgggcgaaggtgctgccgggcgcgcgcccatctcgcttgaggaccgccgcactatggccggcatcctgatggcggatgcgaggatgggggcgcagacgcagaccctgctggttgctaccgaagccgtggccgaatcgctgctgcgcgcgatggaaaacaggacggcggcggcgcttgcactgccgacgcttccggactgaggcgaaagccatgaaggcggaggaagtgcggatcttgtggctgtttgtgttcttcgatctgcctgtcggaacgaaacccgagcgccggatggcgacgcggttccgcaacttcctgaaggacgacggttacatgatgttgcaatggtcggtctatgcgcgggtttgccgaggcgaggatgcagtggacaagcatgttcagcgggtgacgaagcacctgcctaccaagggcagcgtgcgcgccctgcaggtgaccgaccggcagtacgaccggatgcgcctcttgctaggggaggcaaaaaaatcggaaaaggtcgcgtcagcgcaaatggtcttgctctgatttccgcccgtttagtgggcgaaaatcagagcaattccaagcgtttccggcagatcgagcctacctgatgggagtcggtagggaaaccacggctgatccgctggaacgcggcgcagcaggtccagcctacctgatgggagtcggtagggaaaccacggcatcgcggcgacgcagccggatcacccgctgagcctacctgatgggagtcggtagggaaaccacggcacgacgcctgccgtcgtggaccgcacggctagcctacctgatgggagtcggtagggaaaccacggcacccagaggtcgcggccgttgtgcgtctccagcctacctgatgggagtcggtagggaaaccacggctttgggtgcgcacatacgtcacgtgcgcctagcctacctgatgggagtcggtagggaaaccacggccgccccgcggtagatgctgcggccgatctcaagcctacctgatgggagtcggtagggaaaccacggccgggtcggccttgaccatctggttcatgctagcctacctgatgggagtcggtagggaaaccacggcgatgacacgctgcgcctgccggatgtgcagaagcctacctgatgggagtcggtagggaaaccacggcctccttgtcgttgctggcgggcttgaggctagcctacctgatgggagtcggtagggaaaccacggcggcggatcgagaaggcccgcgcctcgctgaagcctacctgatgggagtcggtagggaaaccacggcatcgcggcggcggccagcggcgccatggccagcctacctgatgggagtcggtagggaaaccacggcgacgttcgtcagcgagcacgccggccaccgagcctacctgatgggagtcggtagggaaaccacggcaccgaggtcgtcggtgacgcgcacccaacgagcctacctgatgggagtcggtagggaaaccacggcggcgatgccgtgctggcggcgcaggcctccagcctacctgatgggagtcggtagggaaaccacggcctcgttggcggcggggaggcaggcggtggcagcctacctgatgggagtcggtagggaaaccacggccgccggcagggaggccatcaggtcatcgacagcctacctgatgggagtcggtagggaaaccacggctcgtgttgtcgcctcgctcgaccgcggcgtagcctacctgatgggagtcggtagggaaaccacggcgggtacatagtcctccggcgtgtgcgagagagcctacctgatgggagtcggtagggaaaccacggcgcgaaggtgccgacgccccgcgactcctggagcctacctgatgggagtcggtagggaaaccacggcgcgccggcgcgctcggggcaggcggcggcgagcctacctgatgggagtcggtagggaaaccacggcgcggtcgatcatcgaccccaggttgataagagcctacctgatgggagtcggtagggaaaccacggcgcgaagctcagcgttctcgcgcgccaggcgagcctacctgatgggagtcggtagggaaaccacggcgcggatgccggacgcctatcgggaggaggcagcctacctgatgggagtcggtagggaaaccacggccccgccccggccggtgacgcggcgggcgaagagcctacctgatgggagtcggtagggaaaccacggcggcttacgccatcccccgttcgccccccttagcctacctgatgggagtcggtagggaaaccacggcgaggccaagcgccggctgcgcatcctcgacagcctacctgatgggagtcggtagggaaaccacggcggcgaagctcctccaccgcgccggggaagcagcctacctgatgggagtcggtagggaaaccacggcgcgttccgcgccggctcgcgcgcgccgctgagcctacctgatgggagtcggtagggaaaccacggcggcgcgcagcacctggaccaagcgggcgctagcctacctgatgggagtcggtagggaaaccacggcgtagtccacaacgtcttcgatgtagtcggcagcctacctgatgggagtcggtagggaaaccacggcctcccagacgcaaacccgccgcaatacgcctagcctacctgatgggagtcggtagggaaaccacggcgcgatgccgcgccggccgtaggaggacagcagcctacctgatgggagtcggtagggaaaccacggcgacaaccccaccgcgccggaggtcacgctggagcctacctgatgggagtcggtagggaaaccacggccgcggcgcgcgcatcccgcaggagccacacagcctacctgatgggagtcggtagggaaaccacggcgcgcgagttgaaccgagtgatcgaggcgctagcctacctgatgggagtcggtagggaaaccacggccccgccgagagcgccgcgcccgcgtggcggagcctacctgatgggagtcggtagggaaaccacggcgccggcgacgatcctcgcgccgtgatcgagagcctacctgatgggagtcggtagggaaaccacggcgcgccggaggagcgcaggctggcgacgtagagcctacctgatgggagtcggtagggaaaccacggcagcatcagcaccgtcatgccgcggtcgttgagcctacctgatgggagtcggtagggaaaccacggctgctcggctcgctcattggccgcatcgtagagcctacctgatgggagtcggtagggaaaccacggctcaggtacttgcgcagcgcaccctccgataagcctacctgatgggagtcggtagggaaaccacggctaggcgatggtccgggcctcggccatgttcagcctacctgatgggagtcggtagggaaaccacggcaacaaccagggcgtcatcgtcgcgccgggcgagcctacctgatgggagtcggtagggaaaccacggctggccggaggcggcgggctggccggacctgagcctacctgatgggagtcggtagggaaaccacggcgtcgtaccgctgcaccggcacggcccgggcagcctacctgatgggagtcggtagggaaaccacggcttggcggcgcttgccccggccgccagcgtcagcctacctgatgggagtcggtagggaaaccacggccgcggttggggatcgccagtcgccggcctggagcctacctgatgggagtcggtagggaaaccacggcacggccggccgaatgccgccggcgatcgccagcctacctgatgggagtcggtagggaaaccacggcggcgccgtgcatgacgggctggtcgcgcgcagcctacctgatgggagtcggtagggaaaccacggcgccgcctgggcggacatcctcgaccgcgccagcctacctgatgggagtcggtagggaaaccacggctcgcggacgcccgccgtggtgttgaggtagagcctacctgatgggagtcggtagggaaaccacggccggctggacaagcagtaccagcagctcctgagcctacctgatgggagtcggtagggaaaccacggcgtgctgtcgggaaccatcgtacctaccgctagcctacctgatgggagtcggtagggaaaccacggcggcgccgtgcatgacgggctggtcgcgcgcagcctacctgatgggagtcggtagggaaaccacggcgccgcctgggcggacatcctcgaccgcgccagcctacctgatgggagtcggtagggaaaccacggctcgcggacgcccgccgtggtgttgaggtagagcctacctgatgggagtcggtagggaaaccacggccggctggacaagcagtaccagcagctcctgagcctacctgatgggagtcggtagggaaaccacggcgtgctgtcgggaaccatcgtacctaccgctagcctacctgatgggagtcggtagggaaaccacggcccacatgctgcgcgacggcgtcccgaccgcagcctacctgatgggagtcggtagggaaaccacggctcctccatcgggcgggtgcggacatcctccagcctacctgatgggagtcggtagggaaaccacggctgaaggaagttggccaggttgttcgccgccagcctacctgatgggagtcggtagggaaaccacggctctgccgcacgaacggctgtaagaccatgcagcctacctgatgggagtcggtagggaaaccacggcctcgaccgggcctgccagcgcgtgctcggcagcctacctgatgggagtcggtagggaaaccacggcctcgccaccaagggccgcccgatggtgcttagcctacctgatgggagtcggtagggaaaccacggcggctgccggtcgccgccctccggccgcatgaagcctacctgatgggagtcggtagggaaaccacggcggcgggaggaggggcgcgcaggcgcgcgggagcctacctgatgggagtcggtagggaaaccacggctccgtcggcaggcgggactggaaggccgcgagcctacctgatgggagtcggtagggaaaccacggcacggccagagccgccgtagaccgcgatttcagcctacctgatgggagtcggtagggaaaccacggcggcagtcgcatgggtggcctcgctatccggaagcctacctgatgggagtcggtagggaaaccacggcgcatcgtgtaggtggacgatgccgccctggagcctacctgatgggagtcggtagggaaaccacggcgcatcgtgtaggtggacgatgccgccctggagcctacctgatgggagtcggtagggaaaccacggcccgaaatacagcgcggtgccgaccggcgatagcctacctgatgggagtcggtagggaaaccacggccacggtgagcagcctcgccggggacgccttagcctacctgatgggagtcggtagggaaaccacggcgcctgcgccgcggcggccgtgggtcgcggcagcctacctgatgggagtcggtagggaaaccacggcgtgtgcggcgtcgccctggcgccggagaccagcctacctgatgggagtcggtagggaaaccacggcgtgcacgaccgcctggcccgcgtcggcgccagcctacctgatgggagtcggtagggaaaccacggctccggcgggcgaaggcccgctcctgctggcgagcctacctgatgggagtcggtagggaaaccacggcggaaatcccggagccgcgccgccgcgcgctagcctacctgatgggagtcggtagggaaaccacggctggcgggggcggcgccgctcgcctcgcccgagcctacctgatgggagtcggtagggaaaccacggctggcggacgcagctacgtgccgaaggccttagcctacctgatgggagtcggtagggaaaccacggccggcgagtgcggcgactgggagatcggcccagcctacctgatgggagtcggtagggaaaccacggccagaggcgccgcacctcgcacaactccttgagcctacctgatgggagtcggtagggaaaccacggcatcgaggagcagatcgcctatctcaagtccagcctacctgatgggagtcggtagggaaaccacggcgttcggcgaggacctggcgcagaagcacggagcctacctgatgggagtcggtagggaaaccacggctggtgccggcacggcctgggcggcgtcggcagcctacctgatgggagtcggtagggaaaccacggcatgccggagagatagtcggtgggatcgcgcagcctacctgatgggagtcggtacccactcggtaatcgaactccccagccgccctcaccccaacaacccaatgttttcgcccatttccaaaccttgggagtaaatcggccaagtcccaaggtttggagagaatccgccgtccggagaaagagttccggcccgctccgcccccggcactcccggggttccttcgtcaaccctggcgcaacctgcggttccgcacggctgccgcccaaccggagagcgagttttcaggaaggaatggtgtccccggcgggattcgaacccacggcccccagattaggaatctggtgctctatcctgctgagctacggagacctatagcaatggtaccacgctttatgtcgtgctcaaagcgaccctgactcaaattcggcgtgccgacgagttcatcgcagacattggccgcggcgatcaggacgaggatatcgatgtcggcccaggaggcgccagccgaagggcgcggtcagataccaggcgaggtacagggccgggttgtcggaccatccaacctggccggtgcgtgggtcatggagcggcccccatttcgaccggacaggtggcgcaaccgtgagggcctaggtggaagcctaggcgtgcgcctatgtcgaagcccatcgagcgcgttgaaatcatcaccggccgggagcgccggagacgctactctgccgaggagagggtccggctggtggagcaaaccctgcgcctggcatgacggtctctgccgtcgcccggcttcacggcgtctccccgagcctgctgttccagtggaggcggcgcatggccgagggtgggcacgaggcggttagggcagatcaggaggtcgtccccgtcagccgcgtccgtgaactcgaggccaagctccgcgaaccgcagcgcctgcccgcgtgaatcccaggccgaacaccatctccgtcctccagcagagtgcctcgccatacttcgcgtccgtcacgccgaagacctgaacttccaggatcttcgaatgacgggaggggaactcctcgatctcgcgagggtagaggttctcgccgccacggatcatcaggtccttgatgcatccggcgatgttgcagtagccggcacagatccggaagactgttgcgacgaggaactcctgcaccggagtttcgttgatcgcctccggcctcgggaatgatcaggacgcatcccaccaccttgaaaagcggatcgagcgcctggacggccagatccgcagcggcactctgtccgcacgcgacggtggacgtgccagcaacctggtcctcaggcgttatgggcgcgacaggcccgacgaactcgcgaagtgtcagaggccgtaccctcagcctccgccgcgccacccagggcaggaggagcatcggctgtccgttcgggcgcgccgcaccattttcggggcgccgcagcaagttgccccaatgcgacaccagcctcccccgggagtcgcggccctggacgcatcccgtgcgccgctgcaagcaacccaccccgggtcgacgccgttgcccctgtccatccccaaaggaggcgtcaccccaatggccagttccgtccaggacatctacatcaccggcttgcgcaacgcccatgcgctcgaagcccaggcagaccagctcctctcccgacaggtggagcggatcgagaactaccctgccgtgaagcagcgcctgcagcagcatatcgaggagacgcggcgccagtcccagcggctggagcagatcctgcaggcccatggcaccagcgagagcacgctgaaggacctcgccaccggcttcatgggcaacatggccgccctggcgcatgccccgatgcaggacgagatcctgaagaacagcttcgccaactacgccttcgagcatttcgagatcgcctcctaccgcggcctgattgagatggcgcagatggccggcgaccagcagggcgtgcagttgctgcaggagagcctgaaggaagagatcgccatggccgaatgggccggccagaacctgccggaggtcgtccgcacctatgtgcagcgggagaccagcggccagaaatccggtatctgacaccagcggccgttgatcgcgacccgatcaacggccgttccgtccatcccggtctcctgccgccgttgacgtgatcgggatgccggggcccgtgctcatgcgacccccgtcgctcgggccagcgccatgacgcgggcacggccggagctgcgtctcctgggtcaggtggcgcaggcacccgtccggccgatcgtcgagcagccagggcgtggtgtgcatcgtgccgcatctcgacacggccctccaccgggccatgccacgccacacgggtccctgacccgccgccggcaccgggtattccttgccgagcgcctcaaccgcgacgcggaaggtggtgaagcggaagcgcgcgtcccggtgcaggcgcggacccacaccggcctgggagcgggtgtcggggacagtgccgtaggcggccggccggagcgtgacgccgtcctctgacccgccgcgcatatcccgaccgacggcccgcggccggacatggcgggcagatgcgggcggccaccgagagacgcgtcaccgcctcggtgctgaagccgtgttcgggacgcgccgccaattccatcctcgcgggccggcacggaagcaacgaccggggcggacggcctcgggcacagaaccgggcgcaggtggagccgatcctcaccggccgggcagttccgttgtatggcacaaacagcgtgcatcgatgtccaggcatggacaaagaccagaaatgttacgaacatggtacatagatgtcagtttgccgatcgtgaggcagtgtcgcagcaatttgcaacgctggccaaataattcggtatcattctagtgggctgaatcccgcctgtcacgatgtcgcaaacttgagttgtgcactcgttgtcagaataaccttatacgggtatagcgttatgaacctttggcacgtttgcgcgaagcgggcagagtttttcaaggtaaatactctgaacgacgaagctgcgtttggcagctg

SEQ ID NO: 4294 - DNA, 15288 bp, synthetic construct
  misc_feature 1..15288: note = Synthetic
  source 1..15288: mol_type = other DNA
acctcggacgagcgcgaagccgtctcggcgttcttcgtcggacaaagcggcgtgcgctacgccaggaagattgcggtcaccgccgacaggatcgtctgccgggtcagcaatgtcgacatcaccgcccgctcctgcgagctgacctttaagggcgccaagcagaccatcagcggacggcgcgcgaacgagatctttgccacgcaagccatggccggcattcccgccgacggcgccgccggctcagtgtccgaaagcctgtcgaagctcaactgcacgatcgatccggccgagatcaagcaaaaggccggcggcggcgctgaatgttcgttcgagaccgggaattgagggagcgctgagctacttcattgcaacgtagcccctcttccttctcctcttgagggagaaggtggcgaccaggcatgcctgtcggtgcacagcgctgtcgagtaaccgccaccacagatgccttggagacggctactcgcagaagcatcactttagtttgtacgtcccgacctgatgattgcagccctgaaacattccctctttgatgaccgggaacggcccgagcagctcgaccgtgcctgttgtgaccatcccttcgtattttccagttcctgcaacgttcgtcctcgttacttttccatcggcagtcgaaaaagatgtaagtcgcttttcgccgtccggatcgattgactcacatacgttggaccccgtgatcttcccatcaagcgaggcattcatccctacgcagcgaaaagtactcttatcaaatatgcctccgggaggattgctgcggttagtacccgtcatttcataactgtttgccgtgtgggtcttggagaacgtgatcacgctgctaacgccggaccagcaggaattgaagtcgaagttgccttcctttggcagttcggctgcaaatgcagaaactggagaagcaacgatgagcaaggctaatgcatacctctgcatggcattcccctcctgagatcgttttaaatgtctgcccccgtttgccagcctatttcgcatccgagccaccactttgatctagatcatccggatcccgtgtgagaagggagtagccgcgcgattgacaggccgctcgatccccatccaaatgcctgcgttgaaacgagaatgaggcgcaacgcgtgacgggcggcgaacaggaaacctaccaatgcgacgtgctggtggtcggatcgggatgcggcggcctgtcggccgcggtcaccgccgggcaccacggcctcgatgttctcgtcgccgagaaagagccgcgcttcggcggcaccaccgcacgctccggcggctggctgtggattcccggcacctcgctggcgaaggcgtggggcatcgaggaaagccccgaacaggcaaagacctatctgcggcacgaagccggcaacagtttcgacgccgcgcgcgtcgacgcgttcctgagcgagggaccgaaagcggtcgacttcttcaccagcaagacggcggtgcgcttcgacatgccgctgacgtttccggattatcatgccgaagcgcccggcggcgcgcagggcggccgctcgatggtgacgcgcccgttcgacggccgtgaactcggcagccacgtcaaggatatcggcagcgccctgcccgaactcacggtgttcggcatgatgctgggctccggcaaggacatcgtccatttcatgcgcgcgaccagatcgctgacgtcggcgatctatgtcgcaaagcgcctgtcgaagcatgcgatggacgtcttgcgccacggccgcggcatgacgctgaccaacggcaatgcgctggccggacgtctggcgaaatccgcgttcgacctgaacattccgctgtggctgtcgtcacccgtgcatgaactgatcgtcgaggacggcgcggtgcgcggcgcggtcatcgaacgccagggcaggctgatccgcgtcgataccaggcgcggcgtcgtgctcgcctgcggcggctttccgcacgatatcgcacggcgcaaggcgatgttcccgcacgcgcccagcggcgccgagcacttctcacccggccccgtcggcaacaccggtgacggcctgcgtctggcggaagccgccggcggcggcgtcgaggatacgctgccgcatgccgcggcctgggtgccggtctcgatcaccgagcgcaaggacggctccaagggcgtgatgccgcatttcatcgaccgcgccaaacccggcgtcatcgcggtgctgcgcgacggcaggcgctttgccaatgaaggcaattcctaccacgatttcgtgcaagcgatggtgaaggcggcaaagccgggcgaagaggtcacggcgttcctggtctgcgaccaccgcgcgctccggagatatggcctcggatgcgtgccgccgtttccgatgccgctgcgccatcatctcgccaccggctatctcaagcgcggcaccacgcttgccgaactcgccgaccgcaccggcgtcgatccacaagggctcgcggcgacggtcgaggagttcaacgcgtcagccgcggaaggacgcgatcccgccttcggcaagggatcgcgcgcctacaaccgctatcagggcgatgcgctgcacggcccgaacccctgcatcgcgtcaatcaaggacggaccgttctatgcgatcaagctggtggtcggcgatctcggcacctacgccggcatcaagaccgatgaacatgcgcgtgcgctggatgaacacggccagccaatcccgggcctctatgccgccggcaacgacatggcgagcatcatgggcggcaactatcccggcgccggcatcacgctggggccggcgctgacgttcggctacatcgcggggaaacatctcgctgcaggtgcttccgaggctcacgcgatgaacggcccgatcggcgggagccgacgagaacgacacgacgagagctgaagctccgccagcggccgaactgcgtcatgtgacggcaaaaattccggacgaaatgtgtgagacaccacattgacaatcaacccttcatggcgctcaatcaaaggaattattgtttatcgatacaaccgcgtaccatttcagttggtagtggggcaggtattccatgctccttccgcatacacatagccacgcgatctcatccggcatgcgacggtgcaagcgcgcgggattccgcaacactttgccacccctggagccggacgacgcatccctcgaaccgcaacgcatgaccggcggcgaccgcctgcggcggcgtcctttcgatggcgccggaccgcagcaacccgagggcggacttcgatggtagacgaccccgtacacgccattggcgacgaagcggacacgggtggcccgcaggacggcatcgcactctgcctgtcgggcggaggctaccgcgcgatgatttttcatatcggcgtgctttggcgcctctatgaaacaggcatcctgcagagggtggatcgcatatcgagcgtttccggcggctcgatcaccgcaggcctgcttgccctcaaatggaacaggctggcgggcagccagacggcgaacatgcagctctttcgccaggaatttgtcgaaccgctgcgggcgctcggacgaacgaccatcgatgtcaaggccgtcatcctgggcctggtgctgcccggacgcgtgagcgaccgcgtcgtcgcagcctatgagaagtacctgttcggttcggcgacgctgcaggatcttccggaccagccgcgttttgtcatcaatgcgaccagcgtgcagtccggcgcattgtggcgcttttccaagccgtacatgcgcgactaccgggtcggcgaggtcgtgaaacccaccatcagactgtcgcaagccgttgcagcttcctccgcgtttccgccggtgctgtctccggtcgagatcgagctgaacgatagcgcattcacgcccgggtcaggatccgacctgcagcggcctccgttcacgacgaaagtcattctcgccgatggcggcgtctacgacaatctgggtctcgaaaccacgtggaagcgctaccgcaccatcctcgtaagcgacgccggcggaaagctgcagcccgaggaaagtccgaaagccgattggggcaatcatgcctatcgcgtgctcgatctcgtcgataaccaggtgcgatccctgcggaagcgccaggtgatcgattccttcaaacaacatactcgttcgggagcctactggggaattcggaccaacgtgctcgattacgggctggcagatgccttgccttgtccgttcgacgcgaccatgcggctcgccgaaacgcccacgcgcctgcaggcgatgggcgatcaattgcaggagcgattgatcaattggggctatgcggtgtgcgacgccgcggtccggaaacatctgcagcctgcgcctccagcgcctgccggttttccctttcccgcgtcaagggtctgagccatgacggcgcacattcccagactcctggccgattacatcctgcttggaccgaccggtgaccgccgccaactgcaggactcgccgatcttgggcgacgtctggattgcctttgcgagcgaaacccggaccgcaggaactgttgattacgccgcacaagacgaagactgcggccaccgtcgcaaactggattgatgacgaagtcgagcaagatcgacaggcgcgcaaggagagtgggcgggagtcccgacaaatcgcctatttgcagggtgtcgtcgccgcccggctgtactttgacgaggtgctgcgcgtcatcgttccgacgacgagttggtggagcagcccacgcatcaaaagcgatatggcggtttatctgcaggccacaaccggcagtcagcgcatcaacgccgttctggatacagttcagcaaatggcggaagactggagcaaccccaaggcagtcaggaaatccgaaggacggctgaccgcactcgatcgctatgcggcgctcgccggcattattctctgggcggcccaaaccaccacgatcggaccggatgcaaagccggcagaactggtcgccgcgatcaaggcaggaaaaagcgacattgcagccctgctgaccaggttgttttccgagattctctctcgccagcaacaggacgacgcagaccggcgcaagccgtggacaggatcgctggtctatcaggtctcactcaatcggcgcgccgacatggccgtcgctcaatccgtcccttcagtcaaggcggacgccgcccgcctgctcttcactgtcgattgcgccaagatcgcgtgggccgtcatcgattccgggattcagggcgatcacgtttgcttcaaggacgcagccgggaaggaatccagggtcgttgccagtttcgatttcagcaactttcgcaggatcgtcaacctcgacaatctcaggatctttggcaaaaacgccgattccgaaacacaaaagaccaagctcaaggaacttctgcctgaaggccagaaactgaagcaggccggcgacaagctgatctcatacctcgttgaactgtcccaggacgcaagggcgcaacgcccgattcattgggaattggtcgaaccgttcatcgaaatcaagatcgatacacgtccatcggtgagcgatcatggcacgcacgtcgcgggcatcattggcgccagggcgcctcaaaagcgaaacaagtcgattccggaagaagacaggctcaacggaatgtgtccggatattcaactgtacgatttcagggtgctgtcgccaaacagcgacgagaaagataccgagttcgcgatcatcgccgccttgcagtacatcaggcatttgaacgagcggaacgactatatctccgttcacggagcaaacctcagtctgtcgatcaagcacgatgtgcgaaattacgcctgcggccgaacgccgatttgcgatgagtgcgagcatctcgtcgaaagtggcgtggtagtggtggccgccgccggaaactacggatatcagagctttacgacgaccgatggcgcgttcgaaagctatgcggcgttcagcatcaccgatcccggaaatgcggacggcgtgatcacggtcggatcgacgcatcgatcactgccgcatacctacggcgtcagctttttctcgagccgcggtccgaccggcgatgggagattgaagcccgatctcgttgcaccgggcgagcgcatccacggtccgttccgggacggctggggcgatctcgatggcacgagcatggcagccccgcacgtcagcggcgccgccgcgatgctgatggcgcgttatccggaattcatcaagcagccgcgcaagatcaagaagatattgtgcgaaaccgcgaccgacctcggtcgcgaacgcagttttcagggcagcgggctgctcgacgtgctcagggcttttcagagtatttgaggaggcttgccatgatcttcagtctggacgtccggcgggcgcgcaagggcgattgcctgctgctgcacttcggcaccaagcaggagcccggcctcgtcatgatcgacggcggacccaaggcggtctattcgccgcatctgaaaccgagattgatgaagatccgcgaggcgcgcgagatcaagaagaacgatccgctgccggtcgacgttctgatgatcagtcatgtggacgacgatcacatccagggaattctggatttgaccaaggaagagatcgccaatgcggctgcgcacaggccgctcatgctgaatgtcttcagtctgtggcacaacagtttcgacgagatcatcggcagtcagccggcagaattgacggcgaaggtcaatgcgacgttcaagaccgaggcgagcaccggcacggtcgacttgtccgacgaaaaggtcggcagcgtggaagagatattcatcgacaagaaccccggaggcaacgaggcagcggacgcggaggtggtcggcagttccttgaaggtgcttgccagcatcgcacagggctttcggctcagaaaggatgccgatcggctgggttatggccgcaacacggaattcggcggcgaactcatcgtcgcggcacagggcaaggcgccgaccacgatagccgacacgctggacgtcactgtgatcggtcccatgcttgaagagattcaagccctgcacaaggatcaccagaaatggctcgaggatctcaagaaacagggcaagacgcccgaggaggccctcgccgcctatgtcgacaaatccgttcccaatctctcgagcatcgtcgtgctcgtggaggcggacaagaagcgcatgctgctgaccggggacgcgaggggcgacaaaattctggaagggctgcaattggcgggcaagctcggccagggtgacaacacgacgatcgagatcgatctcctcaaggtgccgcatcacggcagttccaacaacctcgacgaggatttcttcgagcggatcatcgccaggcactatgtattctcgggcgacggcgaacacggaaaccccgaacgggaaagcctggagatgctgctgaaggcgcgaaaggacgagaattacgcgatccatctgacttatcctttgccggacatagaccggctgcgcgaagcagactggaacaaggagcgcaacaagcagatcgcgcgcaggaagaagagcggaaagggcgaggtgcgcgaggaatggtcgccggaagatcacggtctggtggcgtttttcgatgccaatcccggcttcaagaagaaattgagaattgtcgacaaggcggagccgcatatcatcgatttgggcgatcctcttgcggcggcctggccaaagctcgccgagccgtccccgtgacgcacgcgccggcgcggcagccttcgcctgcttcgctacgacactacggagtgtggcttgccaagccgaagctcgcgatgcacagcccgccttcgcccgttgggctacggcgcggcatccttgcgctcgcttcgcgagcgaaggatggtgggcacgacagggatcgaacctgtgacccctaccatgtcaaggtagtgctctcccgctgagctacgtgccctggagtccaactcgggtggggtccgtatatcggctccaaagcgcccctgcaaggatgcaggcacgtaaatttctggagcgatcttgacggaaatggcggccgaatcaggccgccagcatcttgttcacttcgctgaccagctcgcgcaggtggaccggcttggccagcaccttggcgttcttgggcgcctccgaatcggaattcagggcgacggcggcaaagccggtgatgaacatgatcttgatgtcggggtcgagttccgaggcgcggcgcgccagctcgatgccgtccatttccggcatcacgatatcggtcagcagcatctcgaacggctcctcgcgcagccgctgataggccgacaggccgttgtcgtggggcgagacctgaaacccggcgttttccagcgccttgacgaggaagcggcgcatgtcgttgtcgtcttcggcgagaaggatcttgtgcatggcggtcagtcgtcgagcccggcttggaggatcattgcgcccactaagcccgacagagggtaaatttcgggtgaaaggtaacgacgtctggcaatcgggggcggcgctatttccgtagcgccccgtatcaggaggcaaacaaggcggcgcttttcgggcgtttgcgacgacttccgggcgaaccgcggccttttttcgcttggcagaatgattacgattacggacaatgcatccttacaaaacctgcccgccgccggccgaatcgatcggatgatcgatcgccccggaagggaaatgtggacaagggacggcgcccgacgatgacccagtttgatggcgagctgtcgccgccgttcgagatcgtggagccggagcactggcgggcgccgatcatcttcaactcgccccattcgggctcggtctacccgctcgaatttctcaacgcatcccggatcgacctcgcggcgctgcgccgctccgaggattcgttcatggacgaactgatcgccgatctgagcgcgcagggcttcccgaccgtccgggtcaatttcccccgctcctatgtcgacgtgaaccgggagccctatgaactcgatccgcgcatgttcaccgggcgcctgccgagctttgccaatacccgctcgatgcgggtggccggcggcctcggcaccatcccgcgggtggtcggcgacggccaggagatctatcgcgagcggctttcggtcgacgaggcgctgggacggatcgaggcgctctacaagccctatcaccgcgcgctgcgacggctgatcaacaaggcccatcaggccttcggcaccgtgatcctggtcgactgccattcgatgccgtcggtcggggtgtccagggacgagccgcggcggcccgatatcgtgatcggcgaccgctacggcaccagttgcgcgagcctgttgcccgacgtcgtcgaggaggtcatgagcaagctcggctactcgaccgggcgcaacaagccctatgccggcggcttcatcaccgagcattacggcaaccccgccagcgggctgcacgccgtgcagctcgagctcaaccgcgcgatctacatggacgagcggcggcgcgagcgcagcccgcgctttgcgcaggtgggcgccgacttcatcaagctggcggacgcactcgcgcaggttccgttcggcgatctcggtccgttccaggcggcggcggagtagctgccagaccgatcagccgcatcgtctcggccaacgcgttcacgtgcgtcctttggtcaccctgggccgcgggccgcagggccgaatcaaaaaatcttgaaatcaaccccatgcaaagaagggttcgccggcctgaggctgccctcgtcgaaccaaaacggtaatttgatacctttcttgagccaaatgaatccccccgctgcgtttccgcaacgggggtaatccttcgcaacagaaaccgaggcttccgttgcttgccgtggctttccaaccgatttcccaccttatgtttgctgaactccgaaaggcggtcaataatcaatttttggttgtccgcgtctttcaggtggagtgatgggtcgtccgattgcccggcgtattcttggaatcgatcttggtatagcgtcctgcggatgggggatcattgaggtaggcgaggctgcaggaaacatcgttgccgccggcgttcggtgtttcgacgcccctctggtcgacaaaaccggcgaaccgaagagtgcgacgcgtcggactgcgcgggggcagcgtcgaatcgtccgccgccgccgtcaacgcatgaacgccatccgtcaattgcttcacaagcatggagtgctgcccgatcagtcgccggacaccctgcaccatgcactgcgccgaatcccgcccgacgctgcgggatcgcaagtcacgccatggacactccgagctgccgctcaccagcgtcttttgaccaacgatgaactggcagttgttctcggtcatatcgcccggcatcgcggcttccgctccaactcgaagagtgaggctggcgcgaatgcggccgatgaaacgtcacggatgaagaaggccatggaggccacgcgcgaaggcctcgcaaaatatccctcgttcggcgccatgatcgcctgcgatccgaaattcaaggatcgaaagcgcaatcgtgacggagattactcgcacaccgcgaaacgttccgatctcgaagatgaagtccgcgcgatctctcgtgcccagattcgatttgggagccagatcgcgagcgagaagttctcgcaagcattttcggatgtagcatttttccaacgtccgctgcaggacagcgaagacaaggttggagattgtccgtttgagtccggccagaagcgaaccgcccgccgcgcaccttcgttcgaattgttccgcttcctgtcacgcctggcaaatctcaagttggcttctggccggtcgcccgagcgaaatttgacgcaggaggaaattgctctcgcagtgaacggattcggcgaaagcaagaaaaccatcacgttcaagtccctgcgcgaaacgctcgatctcgatcctaacatccgctttgcgggcatcgcgaaggaaaaagaaagtacgcttgatattgcggcacgcaccggaggcgcggcttacggaaccaagacgctgaaggatgctcttggcgaggcgccgtggagatccttgttgcgaacgcccgaaaagcttgaccggatcgcggaagtcttgtcgttccgtgaggatatgcattcgatccgcgccggtcttgatgagattggtctcgacgccgtggttgtcgacgttctgttgcaagcggccgccaacggcgatttcagggattttaccaaggcggcgcatatttcggcgctcgcggcgcgtaacatcgttcccgggcttcgcgaggggctggtctattcagacgcttgcgcgcgcgtcggttacgaccacgctgcacgcccctccgtttcccttgagcagattggcagccctgtcacgcgcaaggcgtttggcgaggccatcaagcaggtcagggccgtcgcgagggagtacggcccgattgatttcgttcacatcgaactcgcccgatctgtcggcaagagcgcggaagagcgcgcaaagctgacacgaggccttgacgaccgcaccgcggtgaaggaaaggcggcgccgggacgcggccgagcatcttggacgtgcggtcagcgatgacgaactcttgcgatatgaacttgcccatgagcagggcttcaaatgcatctattcgggcgatgcgatcgatccggccggcatctcggcaaacgacagccggtatcaggttgaccatattttgccgtggagccgcttcggtgacgactcgtttctgaacaagacgctttgtactgccaaggccaatcaagacaagcgcgggcgaacccccttcgaatggttcgatgccgacaagacagaacccgagtggatggagtttgtcgcccgcgtcgaaggcttgaaggaggtcaaaggacgcaagaaacgcaactactgcatcaaggatgcggcgagcatcgaggatagattcaaggcgcgcaacctgaccgacacacaatgggcaacccgattgctggccgacgaactcaagcgcatgtttcccgcgccggatggggagcggcggatatttacgcgtcccggcgcgatcacgtccaagctgaggcgcgcatggggacttgagggcctcaaaaagctggatggaaaaagaactgaggacgaccgacatcacgcggtcgatgcggctgtgctggccgccaccaccgaaagtctactgaaccgtctgacgttggaagtccagaagcgcgaacgtgagggacgtcaggacgatatcttccattgcagtccgccgtggccgggattccgggtcgatgtcaaacgcgcgatttatggttccgacggcgcgcccggcattttcgtctcacgcgccgaacgtcgccgtgcgcgcggcaaggcacacgatgccaccatcaagcaagtccgggagattaatgacgacaggctcgtctttgaacgcaagccgatcgcgaaacttacggaaagggatctggagaaaatcccggtcccgcagccttacggaaagatcgccgatccggggagattgcgcgacgaattggtggagaaccttcgcgcgtggatcgccgccggcaagccaaaagacaaaccgccgctttcgccaaagggcgacatcattcgcaaggtgcgcgttgagaccaaagacaaagtcgcggtcgaaataaacggtggcactgtcgatcgcggcgatatggcacgcgtggatgtctttagaaaaaggagcagaaaaggcgcgtgggaatatttcgtcgtgcccatctacccgcaccaaatcgtctcgtctgcatcgccacccaacagggctgtcgtcgcctacaaggcggagagtgactggacttctatcgatgacagttttgagttcgcctggtcgctcaaccccatgagttaccttgaactcgtgaaatcaagtggcgaattgatcgaaggatattatcgaagcatggatcggacgacgggcgcaattaacctgtcgccgatggcaaccaattcggagacgatccgaagcattggtgtcaagacactttccagctttcggaaattcgctatcgaccgtcttgggcgtaagtttgaagtaccgcgtgaggtgcgtacatggcgtggcgaggcctccacctgacgcaggcagcgaggctttcactcgcggacagtcagatttgcgtgaagcaagacgctggcgaggttcggctcgccctcgaggatgtggcctggatcgtcatcgacacgccgcaagcaacgctgtcgagcgccctgatgagcgcctgcatggaagctggaatagcgctggtctttacggatgagcgacataccccttccggcctgacgttgccttttcatcgacaccatcggcaaggtgccattgcaagacttcaggttgatgcgaaagacggcgtaaaaaagcggctctggcaagcgatcgttcggcgcaaaatactcaatcaggccgcttcgctttcggctctcgatcgcgagaacgccgagacattgaaggaaatcgcccgccacgtggagcccggcgatccggaaaatgtcgaggctcgcgctgcacgtttctattggggccgcctgttcgcggatttcgtccgggatgacgatagcgaccgccgcaacaaaatgctgaactatggttatgccgttgttcgcgccggtgttgcccgtgcgctcgttgcttcgggctttctgccggcattcggcctcaaacatgatggagcggcaaacgccttcaatcttgcggacgatctcgttgaaccttttcggccctttgtcgatgtactggcctggaagactttctcgaacggcgcagacaagaatggcgatctgagcctggaagatcgccgcgccatggctggcgcgttgctcctcaacagcactgtcggcgatggcaaggtttcgcttctggtagcggctgagatggccgccgccagcctggcgcgcgccctggaattcgaaaagccggcttttctcgaaatgccggaattggagcgagactcgtgaagagcgaggaggtgcgtttcgtgtggatgtttgtctttttcgatctacccgtcggtacgaagaccgatcgccgcaacgctactcgcttcagaaaatttctgaaggacgatggattcatgatgctgcaatggtcggtctactcccgcgtttgtcgcggcgacgacgctgcggaaaagcacgggcaacgggtgacaagaaacttgccgccgcgcggcagtgtccgtacccttcaggtcacagaccgtcagtatgcgcgaatgaggctgttgcttggcgaatcgaccttcaacgagaaaaaggcatctcagcaactggtcttgctctgattcccgcctgacgaatcagacgagaatcagagtgttttcagcagcttgtagcgctcgcagcctaccacggggaaatcggtagggaagccacggccaaccgtacggccggcccggatgtagccgtagcctaccacggggaaatcggtagggaagccacggccgtcagggtcgcgctggtgttgacggcggcagcctaccacggggaaatcggtagggaagccacggcctccttgagatccttctgcacttcacgaatagcctaccacggggaaatcggtagggaagccacggcagcggcgcaatgcgctcttcggtgcggcgaagcctaccacggggaaatcggtagggaagccacggctgaaatggcagaccccaacaaggccgtcgaagcctaccacggggaaatcggtagggaagccacggcgagcagccgcgcggccgcggagggcgccgcagcctaccacggggaaatcggtagggaagccacggcccgaacgcgaagccaacgcaaagcattttgagcctaccacggggaaatcggtagggaagccacggcggttcgctcgatttccacccgatgggtgcaagcctaccacggggaaatcggtagggaagccacggcgaagggctgcgagtatagctggcggcgcgcagcctaccacggggaaatcggtagggaagccacggcggcgcgcgcctgcgatcactgcgcgccatcagcctaccacggggaaatcggtagggaagccacggcacaactatcacgtcaaccaccatgcctaatagcctaccacggggaaatcggtagggaagccacggctggtgtgccccgcgtgcgttggcggcggggagcctaccacggggaaatcggtagggaagccacggcacagcaagggcgcttgcgccggcccagtcgaacccaacacgggggaaagggtgggggaggcac

SEQ ID NO: 4295 - DNA, 14663 bp, synthetic construct
  source 1..14663: mol_type = other DNA
  misc_feature 1..14663: note = Synthetic
tggcgacggcgccctgcccgcgcaggatggcgggatttttgtgctcgacatgggcgagccggtgaaaatcgttgatctggcccggcagatgatccggctggcgggattgcgcccggacattgatgtgccgatccgcttcacaggcttgcggcccggcgaaaaactattcgaggaattatttcatggccgcgagcggccggtgccgaccggccatgagggcctgcttatggctgcgccgcggatcgttgatctggcgaccatcggccgggcgatcgacctgatcgaccaggccgcgcaatcgggcgacgcaagtgcagcacttggcgaattggcacgtctggtgcccgaattcgcgcataatgcggggtagggcctgcggcctatttgttattttatcgtaacaattagggcgtgcagaattatggcccttggcgtcctatttttttgatgttgcaggatgggatgacaggctggtgccagggtgggacgcgcgtgttgtggtgttgtgcgggcgtgaaggcgatgcggctgtcggggttgatgttgtaattggccctgacatcgggcgcgcatttgggcgttctggggcgcgtggggcggggtttggtggatttggggcgtttgatggccggggggtgtcgcagaccgagcatggtgtggagcgggcggaggatgcggccgaggctggggtgggtggcgagcagggcttggagggtggggtcttccatgaagtgctggagttcgaggcgggcgtgggcgccggcgacgatggggccggccgggctgttggggagcaggcggatgagccaggcgaagccgcgcgggagggtgaggactggtttgggtttgggggcgggttcgcgcgcggcggttttgcgcgtgcggggggattgtggcgggcgggcggcgattttggcgaagcgggcgatcagggtgctgagatagtttccgatcaggacgaggagggggccgtggattttcagcctgtggccgttatcggccacggatttctgcagggcgcggaagatgatcgcgaagcgctcggacgggtcggttggtatgaggggcgcgttcgagatcatgaccgcatataaaccacggagggtggggggtgagaaagggaattgttagagcggggtgtgtttttacgcacaggctgcaagggtgttttatcgatcgattttatgcgtttggatttcggctttggatgggtttcttccggcccgctggcgcatgggtcacgcgagcgccgaaccttcagtattcggcgagagctgggcggaagcggaatggcgccgtttaggtcgaggacaattgatagagcacagcatgatatacaattgaatataaatcacaaaatccgaagccgaccttttttggcttacggcctttatttccttcacggcaaattgctgactgacttagcaggcatgaaaatgcaatgtatatattggaaataactaacaatacagaatccccctatctcattgctgagataggggtaatccgtcagtggaaaaatccactttgccgtggtttcactactgatttcccaccactgttattgcgctttccctgttttttgtcaagttagtgaatagcgacatacaggaagaggtgctccatgcgcagtttcgggattgatgctggcattgcgtcggttggttgggcagtgatggataacgacggtgctggcggcagcattgtggcatgcggcacgcggatgttcgatgcccctgagacggacaaggaccgcaagcccacaaatgcaataagacgcgaaaagcgaggcatgagacgggtgctgcgccgccgccgtcagcggatgaatgccgtccgccagctgctagccgatcatggtctgcttgccgggagatcaaacgactcgcttgcgctaggcatcgatccctgggcgctccgcgcagcaggtctcgatcgcccgctagctgattccgagtttgccgctgtacttggacacatcgcgcgccatcgaggatttcgatccaatgcaaaggctgagcgcgccagcaacgcaagcaatgaaacctcgaaaatgctcagggagatcgatgccaatcgggaccggctgagccagtggcggacgatcggcgaaatgttcgcttgtgatgtcgctttcgctgggcgcaaacgcaaccgaggcggcgggttttcgtgctcgatactgcgcgacgatcaggagaacgaaatacgccgattgtttgccgcccaataccggctcggcaacgctagggcgacggaagagcttgagcaggctttcattgcaaccgccttctcccaacgtccgatgcgcgattccgatgatcttgtcgggttctgttcgttgattccaactcagagacggtgtgcgcggcgatctcacgcgttcgagatgtttcgcttattgtcgcgactgaataccatccgcattggcgcaccgggcggtgccgaacgccgcctcagtgcggcggagattgctctgattacgggcgattttggggtgcagaaaacaatgagctggaagtttcttcgcaagcgtctcgatttggcacctagcacgaggtttgccgacgtcgccgccgaagacgagaaaaatgatttcgtagcccgtgcaggcgcggccgccgaaggtagttatgcgatccgccaggtggtgggcgatgccgggtggaaatccttgctcgcacaacccgaagcgctcgatgaactcgcggcgatcctgacatttcgcgccgatgtcgggtcgatcagggtcgggattatggcgttaccgatagagtctttgattgctgaaaccctcatcaatgcggccgaaaacggtaaattcgatcatttcaccggtgccgggcatatttccgctgctgctgcacgtgcgcttttaccgtatctcgcacgtggcttggtgtattccgaagcctgcgccgaacttggtttcgatccggcagctcgcgccgaggtcattctgtcggatgttaaaaatccgatcgcacgcaagtccgtgagcgaagtgcttaagcaggtgaaaatcatggtgcatgaattcggcctgccggatcgcattcatgtcgaacttgcgcgcgatatcggcaagggagtcagtgagcgcgatgaaatcagccggggtatcgaaaagcgtaacaaacaacgggaccgccagcgcgacgattttaccgaactactcggacgggcaccgatgagtgctgacgatatgttacggtttgaactttggcaggaacagaatgggcgctgcctttacaccgaccgtgacattccggttttgagtgtggctggtaccgataactccgtacaggtcgatcatattctgccctggagccggtttggtgacgatagcttcgtcaacaagacgctgtgcttcaccagcgctaactccgagaagcgtgggcgcacaccttatgaatggtttattgctgaaaagacacctacggagtgggcagtatttcaggcccgtgtggattcttgcaaatcgatgaagagctacaagaagcggggtcattatcttcgccaaaacgccgccgaggtggaggagcgcttcaaggcccgcaatctgggcgatacgcgctacgcgacgcgactcgctctcgatttgatcgcccgcaaatactatcctgacccgatgacccgacacgttcttgcccgtcccggcgctttgacatccaagctgcgccgcggctggggattggaatttcgtaagaaggacgcgaacggcaagcgcctgtcggacgatcgccatcatgcgctcgacgctatcgtggttgcggcgtgcagcgaagcgatgctcaacaagctgacgcgcgcatttcaggaggccgaagcgcaggggctcgggcgtgattttggcgcgcttgatcaaccatgggacgggtttcgtgaacaggttatggcggcggttgacaccgtgctcgtttcccgagctgaacgtcaccgggcgcgcggtgaggcacatgccgcgaccatcaagcaaatccgtgaacgcgatggaaagctcgttgttttcgagcgcaaagcgatcgatgctttgaagtcgagcgacctcggtcggatcaaagatagcgagcggaaccgagcaatcgttgagtcgctcggcgcttggattacggcgggcaaaccgaaggacaagccgccgctgtcaccgaagggcgatccgatcgtcaaagtgcgattggcaacgaccgataagatcaatgtcgagatcaggggtggcaccgccgagcgaggcgatatggcacgggtggatgtattccagaaaaatgatgccaaggggagggcgcggttctatttggtaccggtttatccgcaccagatcgctaaaatggcggtgcctccgaatcaggctgtggatgcagggaaagacgagtccgaatggactgtgattgattcgacgttccatttcatgttcagcatctacggcaatagcctgttggaagtaaccaagcctgatggtgaagttgtgacgggatactttaagggtttgaaccgttcagtggccgctatcacgttggcggagcaccaaaatccgctggcggtgaaacagcgtattgggacgcgcacactcctcagattccgcaaattcaacatcgaccgccttggccgtcactacgaaatcaagcaggaaacgcggacatggcatggcgtggcctgcacataagccgaccctgccggctcaccctgacggatgggcaatgcgtcgttacccaagacggagccgaaactcgactcgctctggaagaccttgcctggattattcttgataccgcgcaggcgacactgaccaccagcctgctttcagcctgtatggacgccggtattgctctggtcgtgaccgattcacggcatcacccaagcggtctggtgttgccgtttcaccggcatcaccggcaagccaacattgccggcattcagcttggggctaccgctgcgctgcgcaaccgcctttggcaggttgtggtgcgcggcaagatacgcaatcaggccgctattctggatatttgtgcggatggtgcggcgccgttgctggcgatggcagatcgggtcgaatcgggagatccggacaatatcgaggctcgggctgcccgccattactggtcgcggctatttcctgatttcgtgcgccaaaacagcgatgatttgcgcaacgcaatgctcgattacggctacgccgtgatgcgcgcggcagttgcgcgggcgctggtagcggcagggctgctgccgtcgatcggcctgcaccacgctagtgcagtcaacccatttaacctcgccgatgacttgcttgaaccctttcgaccgattgtggatcgtatggtttggcgtttgtccgatcacggtattgcctgtgatggcaaactgacgctggagcaccgccgctctctcgccggcgttctgctcgaaacgacctgctttggaggtgaaatggttacagcgctgattgctaccgaaatggcagtggtttccctcgtgcgagcgttcgaggcagccactgctaaaattctgcttctgcccaaaatagaaaacagtaaatgaaagccgaggagattcgcttcgtgtggctctttgtgttttttgacctcccggtcggtaccaagccagaacgtcgtgccgcaacccggtttcgcaattttttgaaagatgacggctacatgatgttgcaattttcagtctacgcacgcgtctgtcgcggcgaagatggcgctataaaacatattgcgcgtgccactcgaaacctgcccagcgcaggaagtgtccgtgccttacaggtgactgatcggcaatatggcagaatgagattgcttttgggtgaggtgaagccaaccgaaagcgccggttcggcgcaactcgttcttctatgacaacgcgtcaaaaaagcggaaaaatctccacgttctgtagagaaatttcctttattttgaagccattatggagagcctagcctagcagggggaaatcagtagggaaaccacggcagcgggcgctgcgcttgcactcattgcgcgagcctagcagggggaaatcagtagggaaaccacggcttgcctgtgctggtcgagatggtcaatctcagcctagcagggggaaatcagtagggaaaccacggctcaatcgcggcgttcggcgtgccggctgttagcctagcagggggaaatcagtagggaaaccacggcacggcgcgcgcggcattcagcgcgtaagggagcctagcagggggaaatcagtagggaaaccacggcagcagatcgaaaacatcgtcaaatcgtggcagcctagcagggggaaatcagtagggaaaccacggcccagccgctacgttggcggaggaccatgtcagcctagcagggggaaatcagtagggaaaccacggcgtcgatgatgattgaatttgccattgtcttagcctagcagggggaaatcagtagggaaaccacggcccagggccgaccaggcgcgatataaatccaagcctagcagggggaaatcagtagggaaaccacggcgtcgagtatgctgtcgcgtgcaaagaatgcagcctagcagggggaaatcagtagggaaaccacggcctctggatagactgcctgcaaactttcaaaagcctagcagggggaaatcagtagggaaaccacggcataacatcgtgacggcgagcagcccaaaccagcctagcagggggaaatcagtagggaaaccacggccttgtgcgagtccttgaggattgcttgtgcagcctagcagggggaaatcagtagggaaaccacggccattgctggaaaattggcccataaccaatcagcctagcagggggaaatcagtagggaaaccacggctgcatcgcggcgttcggcgtgccggctgttagcctagcagggggaaatcagtagggaaaccacggccaaactggcgcgcgacacccgcatcccgccagcctagcagggggaaatcagtagggaaaccacggctatcaacagcgaaatctttaatgccggatttagcctagcagggggaaatcagtagggaaaccacggctaaattatctgcaaccggaaataagggtgaagcctagcagggggaaatcagtagggaaaccacgggatgccctgcttgagagcagacaacaatctcagcctggcaatgggaaaccaggatgcctgttcaatggtctcgatgccctggatgttgatcccgttttgaagccacctatttgagccaaataatcgaacgtttccggctacatccttaagaaaggttagcccattggtttgattggctcaaggtcattttccggaagtcttgatttttgcaacctcagagatgtctgctttcgggatcactggcctggaccgtgtatggccgggatgagtgcaaagccgtcagccttggacgatgctcaatgctcgcttattatggtcattgagagctctgacctattcccaactgaggtcgaagtcagagagtcaatctgaaatatcgcaaaagttttttgcgtctttttttcaaaaaagacagttttgccttggcttaccttaaacttgttcgcgcggcggtccatagggccgatcggagcgcggggcaacaaaaagcccggtgcttgcgcaccgggctttgtgggggggaccggttggttagaactggttcattgtgttgtgggcgccgccggctttgagggcggattcgccggcaaaatattctttgtgatcatcgccgatgtcggagccggacatgttttgatgtttcacgcaggcgatgccttggcggatttcctggcgctgcacgttgagcacgtagccgagcatcccctgggcgccgaaatattccttcgagagattatcggtcgagagggcggcggtgtggtaggtgggcagggtgatcagatggtggaagatgccgctgcgtttggcggcgtctgcctggaaggtgcggatccgttcatcggcgacggttgcgagttcggtcgtgtcgtattcgacattcatcagcttggcgcgatcataggcggacatgtcgcggccttctttcgaccaggcatcgaagacttgctggcggaaattcagggtccagttgaatgacggcgagttgttgtaagcgagtttggcgttcgggatgaccgcgcggatgcgatccatcatgccggcgatttgttcgatatggggtttttcggtttcgatccagagcaggtcggcgccgttttgcaggctggtgatggagtcgagcacgcagcgatcctcgccggtgccggcgcggaactggaacaggttgctcgccaggcgcttcgggcggagcattttgccgttgcggttgatgatgacatcgccattgcgggcggtctcgggcgagatttcttcgcaatcgaggaatgaattatattggtcgcccagatcgccggcggtgtggctgacggcgatttgtttggtgaggcccgcgccgagcgagtcggtgcgggtgacgacgatgccgttatccacgccgagttcgaggaaggcgtagcggcaggcgcgcactttggcgatgaaatcctcgtgcggcacggtgactttaccgtcctgatggccgcattgtttttcgtcggacacctgattttcgatttgcagggcgcaggcgccggcctcgatcatttttttggcgagcaggtaggtggcctcggcattgccgaacccggcatcgatatcggcgatgatggggacgacatgggtttcgtaattgtcgatgcgggcctgaatttcggcttgtttggcgctgttgccggcggcgcgcgcggcatcgagatcgcggaacatcatgcctagttcacgggcatcggcctggcggaggaaggtgtaaatttcggcgatcaacgcggggacggaggttttttcgtgcatcgactgatccggcagcgggccgaactcggagcgcagggccgcgaccatccagccggagagatagatatagcggccttttgtggtgccgaaatgctttttcaccgaaatcatttgctgctgggcgatgaagccgtgccaggcgccgagggattgggtgtagtttttcggatcggcgtcgtaggcggccatgtcggcgcgcatgacggaggcggtgtggcgggcgatatcgaggccggtcagaaagcggttctgcaggcgcatgcgggcgacggattcggcgctgatgccatcccacgtgccgcctttgctggtgatcaaggccgcgacattggcgatatggtcctgataggacccggactggttggtggtgccggccggcgccatgctgccggtcatgccttcaggggagaaattcgctgtgctcataaaatcgatctttcgtagtgaaccgctttggtaacgtgatgtgtctagtctgccgcacctgcgaagggcagtgtaaaaaaccggcgaaaagacgaaagctgtaaacagatttacaatcgcaaaattttatttgtaatgtttgttaatcggccggatggcctggacgaccgccattctggcgtctgcggccggcgggttcgcgcggttggaaccccttgcgcaccccagatgattgcttcatgaacgagcagtgtcgtcgcgtaggtggggttatgcccacaggataggcagccagcttcccgcacgtgccgcttgccccctgaccattcgggtccagggccggcccggaagcaaagccgcttctatccggatggcgcacccgcccgttgaattgccgcgggcgccccagtttcaccccgcccgactgcgccttttgcgcagaacggtaaaccagaattgcctatgctgacccttcaacccgttcgccaatccgacccattgaacgaagctgttttaaccgtccccggattattgagccggtcgcggtgcagtttgtcggcagcttcgggtttctcctcgctgttattttttcccccagcctccgcccaaagcccgccttgcgggtggcaggagcctggccttcggagttccctaccccatgccaaaacatatgctgatcgatgcgacccacgcggaagaaacccgcgtggtcgtgctggatggtaaccggcttgaagatttcgatgttgaaaccgccaccaagcggcagatcaaaggcaatatctatcttgccaaggttattcgtgtagagcccagcctgcaggcggcttttgttgaatatggcggcaaccgccatgggtttttggcgtttgccgaaatccatcccgattattaccagatcccggttgctgaccgccagcggctgatggccatgcaggccgaagacgagcgcgcgatgcaggccgaggatgaggccgcccctgtgatcgatggcgcggcgggcgagccggctgcagaggtgatcgaggaggctgacgacggcgccaagcctgatgccggagacgaacaccaggcgtccagcgcgcagcccttgatggtcaccgagatatcgatcatcgcggccgaaccgccttcatttgaggcagaccctgagccggcgccgttgccgatgggcgatgatgaggcgggcgcagcgccgccgagcgcgcccgataccggctatgccgaatctggtgagtctgggtctggcgagatggggccggttgagtctggcccgcgcacggaagagattattgaggaacaggcgccgcctgagacactgggcggcagcgacgataccggcgatgaagccgagcggcgcgccacccgccgcttcatgcggcattataaaattcaggaagtgattcaccgccggcagatcatgctgatccaggtggtgaaagaggagcgcggcaataaaggcgcggctctgaccacttacgtctcgctggccgggcggttctcggtgctgatgcccaactcgcccaatggcggcggggtttcgcgcaaaattacctcggcggctgaccgcaagcgcctgaaagaggtgatgaccgagctcgatattcccgatgggatggggctgatcgtgcggacggcgggtgccaaccggccgaaacccgagatcaagcgggattgcgaatatttgctgcgcctgtgggacgatattcgcgagcggacgatggcatcggtcgcaccggctttgatttatgaggaagccagcctcatcaaacgctcgatccgcgatgtttatacccgcgatatcgaggaaattcaggtggatggcgaagccgggttcagtgcggcgcgcgaattcatgcgcatgctgatgccgagccacgtgaagaaagtgcagctctggcaggatccggggcagaggctgtttgcgaaattccaggtggaatcgcatttggatgcgatgctgagcccgacggtgcaattgcgctcgggcggctatatggtgatcaatcagaccgaggctctggtcgcgattgacgtcaattccgggcgctcgacccgtgagcggaatatcgaggacacggcgcttcggaccaatatggaagcggccgaggaattgggccggcaattgcgcctgcgcgatctggccgggctgatcgttgtcgatttcatcgacatggaaagccgcaaacataacggtatggtggagcgcaagctcaaggaatcgctcaagaacgaccgggcgcgcattcaggtcggctcgatcagccattttggtttacttgagatgagccggcagcggctgcgcccgtcgattaccgagacctcgctggtggcctgcccgcattgtgccggggccgggcatgtgcgcagtacggaatcggcggcgttgcacattttgcgcgcggtcgaggaagaggccgccaagcggcgggcggcggaaattgcggtgcatctggctcccgatgtggcgctgtatattttcaaccataagcgtgagcgtctggcggcgatcgaggcgcatttgtcgatgcgggttttgttcatgtccgacccgagcgccacggcttcgcaattccgtatcgagaaattgcgtgcgcagagttttgtgccgccgccgagcgaaagcccggttgccatgcatgccgcaccggcgcgccgcgccgagacgattgagccggtggacgccgatgatgaggatgatgtcagcgaggataacgacgcaaccggtgccgatgcgccggtgccgggggagacggccgaggaagggcaacgccgccgcaagcgccgccgccgccgccggggcaaccgccgcgatgacgcgccccagatcgaccctgccggcgagcagcccgatgtgattgatgggtcgcaagcccagcctgtgccggagatgagcgtgcaggccggcgattctgaagcggttgccgaggcgcccgctggcgagatgcaggctggcgagataagcgagaagccgcgccgccgcagccgtggtggccgccgccgccgcaacgaggacgaggcagcccccgcgatgcagaccgaaccggccgccgagcgcgacatgccggtcgatacgggtccgattttccttgatgtggccgatatttttgaggctgcggagcgggccgaagcggaaatgctgcgtattcgcgcgctggaacagcaagcgccggcggcggaactgccgcctgcgctgccacaggcgcccgcgcctgaaccggccgccccggcgccgatgatgggggcgctagtggaacctccgtccgagattccggcagccgaggacaagccggcgccggcgattcagccgacgattattggcgaaagcgaacccgacgcgccgaaaaagcgcggctggtggcgccgcgcctgatctacaaccacgcctgaacgcctaacggcgttcaggcgtggttgaatatattgatctaaatcggcgcgcaggcggcttgcaggaaggcgcttgctgcggggtccagcgacgggccgacctgtttgagcactgctgcatgatagtcattcagccaggccagcgccgatggggtgagcaaggacggcacgatcaggtggcggtcgaagggtgcgaaacttaatgtttcgaaccggtagaattttttcgggcccggcagatcggcatcgacgaccagcaacagattttccagcctgatgccaaaaccggcggtgccttccgcggcgggttcataataacccggctcgttggacaagatcatacccggctgtaatttcaccggccgtgacgcgcgtgaaatgccggccggaccttcatggacggacaaaaagctcccgacgccatggccggtgccatgatcgtaatcgagcccggcctgccagagtgccgcgcgggcgaaggaatccagatgcgggccggccacaccatcggggaatatggcctgggcgagggcgatatggccggccagaacgcgggtgaaaatatcggcaatgcgcgcgggcggtgcgtccgggccggtccagatggtgcgggtgatatcggttgtgccatcgttatattggccgccgctatcgatcagataaacctcgttgggattgatcggccggtcggaggaggctgtggcgcggtaatggatgacggcgccgtgcgggccggcgccggaaatggcggggaaactctcgccacggaacatctcgaccgcgcggcgaaaccccaataaagcggtcgctgcggttatttcggtctcctggccgcctggtgcggcgcgatcgagccaggcgagaaagcggcacatggccagcgcatcacgctgatgggctgcacgggcgcctgcttgctcggtcgggtttttgagtgcgcggggaagaatactcgggtcgggtttggcggcgatgcttgcccccgcggcccgcagcctggtttcaaaccagaccgcactcgccgccggatcgagccggacggttttgccggccagaccatcgagggcggcgggcaaggcatcgcgcggcaggatttgcacctgattgcccagatgcgtgcgcatctggggcgataatttcgccgcatccatgaacaggcaggccgagccatcggcgcgcaaaatcgaaaagcccagcgcaatcggggtaaattccagatcggcgccgcgcatgttgaacagccaggcgatggaatgggcgtcggttataatggccgcatcctcgccctcggcggataagattgccgcgatgcgggcccgcttgacggccgaatcctcgccggcgaatgccagatcatgcggaacggccggcgccattggcggggcggggcggtctgtccagacctgatccagcgggttgaccgtcacctgtgatgccgttgccatatcgccgcgtctgtttcttcgatgagctgtgtggtgtagcggccatcggaaaagatcgcggctttgtcggccaggatgatcgctaggccggcactgccggtgaaaccgctgatccaggccaggcgctcggcggagggcggggtatattcaccgagaaattcatcgccgcgcggcacgatgaagcccgcgagattctgtgcgaccagcgcggcgcgcaaggccctgatacgttcattgatcatagcttatcccctaaccatgcgtccatcgcatatctgactcggcattcatccccctcacaaacgaccggcgaaggtttatgtgcagtgcgggatgacgatgaaggaccgcaacaagcgcctgccgccctccccctaaacatatggtgagtatgatgacgaccgaaactaaaacccgcttcatgggtgaccgcatcgcggatgcgatcaaccaacaggatatggcgatcaacgccgccttgcgcgagagtgcgatcaacgcgacgcagatattcagccggattggtgaattttttgcg

SEQ ID NO: 4296 - DNA, 14578 bp, synthetic construct
  misc_feature 1..14578: note = Synthetic
  source 1..14578: mol_type = other DNA
ggcccgtgccggaaggcggcggcttcctcgtttcgtctcccaatagcgatagatgtcggccgtcagcggatggcagacggtcaggaaatccagcgtcttaattagatcatccatcgagcgcgctccgagccgccaatcggcgctggtagggattccagtaatgataggtgtagaccagtatctggtcgacgttcgttccgtcgctcgaaagcggcaggaacagcacctcctcgtggcccgccttgccgtcgaaggtgacgaaatcctcgttgtcgaagatgtaggaacggctcgacacgacatagtcgtaattgcccagcgcgcgctcgcggctgctgccgtagaacttctcggccacggacttgccggtgggatcgtttccacgcgccgtcacctcgcgcgttccaaccaggcgatagacatagcggcgctcgtcggcaacgatctggacgatcatcatgcccggaaggtgcttcctgagatctcccgggtcgatatcggcccgcgccggcatgggacggctcccacgcttcgcctcccaataccgatggatttcggccgtgagcgggtggcagaacgaaagaaaatcctgcgtcttgtattgattgtccatgggcctacgtaaagattggcgtccccaaggggattcgaacccctgttaccgccgtgaaagggcggtgtcctaggcctctagacgatggggacggcggggccagtttctagagcatttttcggtcgaatggaaccggattggcgccggcccatggccaagcaggctatcgcccggccgcgggatcgcgcataatcatccccagcgggccgaagggccggcttcatacacttgagaggatacaagaacatggcgatcagacgagtccaggtcggcccgcgcatgagccaggccgtcatccacggcaacacggtctatctcgccggccaggtcgccgaccggccggtgccctcggtcgggcagcagaccaagcagatcctgagccggatcgaccgcttgctgaaggccgccggcagcaacaaggcgaagatcctttcggcaaacatttggatggcggatattcgccgcttcgacgaaatgaacaaggtctgggacgcctgggtccccaacggcaacgcgccggcgcgcgccaccgtcgaggccaagttggccggccccgactatctcgtcgagatcatggtgacggcttcgctggactgatgccaagtctcgggtagcccgagacctatggccaatccttcgagacgcgttcttcgaacgctcctcaggatgaggtaggcgttctttatcaaattgttacctcatgctgaggagccgcgaagcggcgtctcgaagcatggcggctgggtcaaagcttccgagacttgaactaggccgccgccgcgtcctcgatcacgagctgcacctcttcgcggccctgccagcgatcgaggcgcaagcatccggcgaggtgcatgaccgcgcccgaggagcgcatcaaggctcgcccgacgtcgctctcgaaggcgcgaaacgcgatcgcctttagccggccgcccccggcgccggcaagaatgcagcgcacatgctcggcgccggcttgggttgcgcgcacgacgcgaacgccggtgatggcgaagcggggttcggcgttgccgctgccgaaggggccgagatcggcgacgaccctcgcgagatccggcgtcaccgccgccagcgccaacacgccgtcgagctcgaaaatccgctcccgggatccgacgcccatctggccggccagccgttccgtcaggaaatcgcgcaagtcctcgatccggtccgccgccaccgtcaggccggcggccatcggatgaccgccgccattgatgagtaatccggcctggcgcgccgcgatgacggcgctgccgaaatcgacccccgccaccgaccggccggagcccttgccgatcatgcccatcgctttgtcttggaccagcgccacgacgcaggccggccggccgaaacgctccttgaggcggcttgccaccacgccaatgacgccggggtgccaatcctcgccggatacgaagatgaacgcagggtgcgatgcggcctcggccttgacctgtgccgcgtccagcacgacccgctcgatcgcgcggcgctcggcattgagcgcctccagccggtcggcgatcgcggccgcctcggccggatcctcggtgctgagcagccgcgcgcccagatcggccgcgccgatgcgcccgccggcgttgacgcgcggccctagcacgaaccccgcgtgccagccggtggggcgttcggcgatgcgcgcccggtcggcgagcgcggccaggccgatattggcccgcgcggccatcaccttaagcccttgcgcggcaaaggcgcggttcaagccccgaagcggcaccacgtcgcagatcgtgccgagcgccaccagatcgagccactgaagaagatcgggctcgggcgaactttcgtagcggccggcccggcgtaagctccgattgacgccgacgacgagcaggaacgccagcccgaccgcggcaagcgtcccgtaaccggcgcgcacgtcgtcggcctcgtccaggcggttcggatcgacgacggcgtgggccggcggcaggcgcggctcggccacgtgatgatcgatgacgatgacgtcgaggcctacgccctccgcctcggccagggcctcgaacgcggtgatgccgcaatcgacggtgacgacgaccgcgatccccgcgtctcgcagccggcgcagcgccggggcgttcggaccgtaaccctcggtcagccggtcgggcacgtagagtgtcaccgccacgccgatcgcggcgaagaagcgatgcaggagcgccgccgaggtcgccccgtccacgtcgtaatccccgaagacggcgatgccctcgccgttgccgacggcgcggaccagccgctcgacggcgcggtccatgtccttgaatcgcgatgggtcgggcaggtgatcgcgcaaggccgggttgaggaacgacgccgcgctttcggcatccacgccgcgcgccgccagaagccggccgacgatctccggtacgccgaggcgttgcgcgatcgccaggcccgttcgctggtcggattcccggttgtcccccgcgcggattacccagcggcgcccgccgtgcgagcgctcgacgccaaggcaggtctccccgcgctcgttcacacacgaaaaagggggcgaaacccctctaattgaagtctgtcattccggcgcaagccggaatccatcgagccgtgtcgcgatgggtcccggctttcgccgggacgacagaaataccggtagaatgctctcgcgctatccggcatcgaatccgactttgcgttcgaaattgtggtgcgcctcgatgacgcgaaccgtgccggtcttggaacgcatgaccatggaatgggtgatggcgccgccgcgaaatcgcctgacgccgcgcagcatggtgccatcggtgacccccgtcgccgcgaacatgacgtcgcccttggcgagatcgagcaggccgtatttgcggtcgaaatcggcgatgccgtagcgccgggcacgcccccgctcgtcgtcgttgcggaagataagccggccttgcatctgcccgccgatgcaccgaagcgcggctgccgccagcacgccttcgggagcgccgccggagcccatgtagatgtcgacgccgctgttggggcgcgccgtggcgatgacgccgctcacgtctccgtcggagatgagggcgatgcgggcacccgcaattcgcaccgcggcgatcagctcctggtgacgcgggcgatcgagaatgcagacgaccagatcggcgatctctacttttttcgccagggcgagggcgcggaggttctccgccggcttggcatccaagtcgacgacggcgtccggcaatccgccaccgaccgcgatcttgtccatgtagacgtcgggcgcgttcaggaatccgccttcgccggcgatggcgacgacggcgagcgcgttcgggccgcccttggcggtgatcgtcgtcccctccaggggatcgagcgcgatgtcggccttgggcccgccggcgccgaccttctcgccgatgtagagcatcggcgcctcgtcgcgctcgccctcgccgatgaccacggtgccatcgatcgagagcgcgttgagggcacgccgcatcgcgtcgacagcggcctggtcggctgctttttcgtcgccccgccccatgaggcgcgaggcggacagcgccgccgcctcggtcacgcgcacggcctccaacgccaggttgcgctccatgatcggcaaggcatttgcggtcttttgcggcaacggagtctcctataacgcttcgatgcggatcatgcgcggcggctcgaccacggagcctagcgccgcgatgcgcgcgagtgcgcggcccatcgacgcctccagggtatcatgcgtggtcagcaccaccggcacgggttcgccaggcgcccgcgcgcgctggatcatggcctccatcgagacctgctcgtcgcgcagcgccgccgccacgtcggcgatgacgccgggcttgtccacgaccatgaggcgcacatagtaggcgccacggtgccgatcgatcggcgaggccggaatacggcgcaacgccgccgccgggacgccgaacatcggcagcgcccgtccgcgcgcaaggtcgatgagatcggccaccaccgccgaggccgtgggccccgccccggcgccgcggccctcgaccatgctttggccgacgaaatctccttcggtcacgaccgcgttgaacaccccgtcgacatgggcgatgggcgtgcccagcggcaccatgcaggcgtgcacgcgctgttcgatgccgctctcggtcgggcgggcgaggccgagcagcttgatgcggtaaccgagctcctcggcaaaggcgatgtcgacggcccggacgtggcgtatgccctcgacatgcacgccggcgagatcgatctcgcagccgaaggcgaggctggtcaggatcgccagcttgtgcgcggcgtcgatgccgtcgacgtcgaagccgggatcggcctcggcatagccgagcgcttgggcctcggcgagcacgccggcgaactcggcgccggtacggcgcatggtggtgaggatgtagttgcaagtcccgttcaggattccatagatccgctggatgcggttggcggcgagtccttcgcgcagggttttgacgatcgggatgccgccggcgaccgccgcctcgaaggcaaccgtgacgccggccttctcggcggccttcgccaacgccgcgccatgatgcgcgatcagcgccttgttcgcggtcaccacgtgcttgcggttggcgatggccgtctcgaccagctcgcgcgccggaccttccgcgccgccaatcagctcgaccacgacgtcgatgccgggatccttggccaactgggcggcatcgccttcccagcgcaatccggttagatcgcaatcgcgcctggcgtcccgcttccgggccgagaccgcggcgatctccacgcgccggccgcagcgctccgccaggacgtcggtgttctggcgcagcagcttgacgacgcccgcgccgacggttccgaggccggcaatgcccacgcgcaacgccccggcctggcgaccctcatgcttcgacaagctcatgcttcgacaggctcggcatgagggtgtcgtcctgaacctcctcgtcccgagcttgtcgaaggacgagggataaggctcatgtcagacatccaccattccaggcacgagccaactactggaaaaagatctcggtgcggcggttggcggcctccccttccggagtcgattcatcggcggctggcgcggtgtccccaagcgcctcgacctccaaactttcctgggccagacccaagctcgccaggccttccgcgacggcggcggcgcgtttcatcgacattttcatgttggcttcgggttgatccacgccgccgctggcgtgaccgacgatacgaaggttccggccgctctcctggtgaacgcgggcgatctcgcgcaacacgtcttcggcctcgctcgacaaactggccgagttcgtgtcgaaatagacgatgccgatgggcgtgcccgccggcgcgcccgtagccgccaagtcaggttcggccggctcggacggcgcttcgattgtcgaagggtcgacggcgacggcgctttcctcggcctcgggcgcggactcgggctcctcaaccaccggcacctcggtcgtttcgaccgattcgaccggcgccgcctcgggcaccgattccggctccggcgccggcgccggcgccgattccgccgcggcggcctcttcggccgaggattccgccgtatcttcgggcttcggcggcggggctggcggcggcggctcggccggcgcaaccgatgccgcctgatcgccgaagacatcgccggtgtattccgcgttcgccttgtcggccttcaatccctcgatgatgcgttcgcgctcggcgcggctggtcgcggccggcacctcgccggggaccgtcgccagattggggaagtcctccgcatccgcggccggcgccgtcgtttgtggctccgctgtctcgctgcatccgccgagcgcaagcgaacccgccaggcaggccacgaccgcccataaacgggccttaagcagtgagtctcttccaatcatcatccacactttatatgtcccatcgggttggaggccgacattgtcttggcgccgggcgaaagctatggtgcgccgcatcatagaggaagccatcatgaccgatcaacagggcgccggagcgggcgccgacttcgccaagaccatggccgagatcgccgagcggtcccagaggattgtttcggagttcctgacccgccagcagcagggcggcttcggcatgaccgatcctttccaggtcggccgcaccttcatcgatttgacggcgcgcatgatggcaaacccggccaagctgatgcaggcccaggtcgatctatggcaggaccacatgaagctgtggcaaagctcggcccggcgcatgatgggcgaggacggaccgcctttggcggcgcccgagcccgaggacaagcgcttcaaggacccggcctggcaagaaaacgcggtcttcgatttcatcaagcaatcctatctgctgtcggcgcggtggctgcaagcgaccgcccgcgacgtcgacggcctcgacgacaaatcggccaagaagatcgacttctacacgcgccagttcgtcgatgcgctctcgcccagcaacttcgtcatgaccaatcccgaggtcttgcgcgaaaccatcgagtcgaagggcgagaatttggtgaaggggctcaagaacctgctcgaggacctcgatcgcggcaagggccagatcagcatcaagatgaccgatcacaccgcgttcgagcttggccgcaacgtcgcggtgacgccgggcaaggtcgttttccagaacgacctcatccagctcatccaatacgagccggccacgaagaaggtcatgcgccggccgctgctgataattccgccctggatcaacaagtactacatcctcgatctgcgcgagaagaactcttacgtcaaatgggcggtcgaccagggcatcacggtcttcgtcgtttcctgggtcaaccccgacgagaagctcgcggccaagaccttcgaggattacatgctcgaagggccgattgccgcgctcgacgccatggaaaaggcgaccggcgagcgcgaggccaacgtagtcggctattgcctcggcggcacgctgttcgcctgcgcgctcgcctacatggcggcgaaaggcatcgaccgcgtgacgagcgccacgttcctcgccacgttggtcgatttcgccgagccgggcgagctcggcgtcttcatcgacgaggagcagctggccgcgctcgagacccgcatgaacgagaagggctatctcgagggcagcgccatggccaacaccttcaacatgctgcgcgccaacgacctgatctggtccttcgtcatcaacaactacctgatgggcaagaaccccttcccgttcgatctgctctattggaattccgattcgacgcgcatgccggcggcgatgcacggcttctacctgcgcaagatgtaccaggagaacctgctgtcgaagccgggcggcatcaagctcgccggcgttcccatcgatctcaagaagatcacgcagcccagtttcatcctttccacccgcgaggatcacatcgcgccgtggacctcgacctatgccgcgaccaggctctacaacggcccgatcgaattcgtgctggcggcgtccggtcacatcgccggcatcgtcaatccgccggcgccgcccggcggcaccgccaaatacggccattggaccaacgccaagttggcgaagaccccggacgactggctgaaaggcgccgtcagccacgaaggatcgtggtggccgcattgggccgcgtggctcaagaatttcgccggcggcgaggtggcggcgcgcaagcccggcggcggtaagctgaagccgatcgaagcggcgcccgggtcttacgtgcgcgtgcggacgagttagctggaaggcgccgggatggatctcctttcccatgcggtgcaggcctacaatttcctgctcgtcctcgtcgacatcatcctcggcacgatcttcgggaacatctacgggttgggcgcgctcgctgtcctgttgctcgcggtgccggcggctgcttacgtgctgctgcgccgccgcaccgcggcggcccggccggccaagacgccgccgccttagtttccccgcattccgccgccatggtcgccgacatgaagatcggctcggcggccttggtcctgatctacctcgcgctcgcgacacaagcgaaagcggaggactggtatgtcggcccggcgcccagcgcttacgcggacctcatggccgcgtcggtctcgaatggcgaaggcgatcgtctctatgtctggcccaaccattcggaagaccgcttccgcgtcatggcggaactgcacctcgccgacggtgccggaatcggcggcatgccgcgctaccgcatcgatggcggcgatgaaatcgacaccgagacgatccgcgccgagggcgagcgcaacaacgccatgtggggatcggccggcggatcggtagcgttctggctgttgtggtcgggcgcgtccgccacggtgacggccgacgagccgttgagcgcgtggctaacggggcgcgagatcgagattacctacaaggccgccaacggcatcgaatacgtcacggtcttcccgctcgccggcgccgcgtcggcgatcctcggcgtggcggggttgacggggccgtagtgggccgcgctgttcaagccgcatccgccgacttcacgcgccgcgcgatctccttgccgcgctcgccctcgaccacggcgatctcgtattggctctgaaggtcgagccagaattgcgggctgttgccgaaaaaccggcccagccgcaccgccgtgtcggcggtgatcgagcggcgagcgttgagaatgtcggtaatgcggccggacgggacaccaaggtcgagcgccagccggttggcgctcaaggcccgaaccgccaattctcgcttcagcagtcggccagggtgagcgatcgggggcatggttctatcctccgtggtagtcaacgatgtcgacgtcgtaggcatcgccagcgcggccggcgtcgagccgggaaatgagtaggaccatgcttgaatacaagggatatgccggcaccgtcgaggccgaggacggcgccttcgccggccgcgtcgtcggccttcgcgacgtcatcaccttcgaaggcagaaccttcgccgaggtcgaacgagcgttccgcgacagcatcgatgactatattgccttctgcgccatgcgcggcgaaagcggctgattcgccgcccgcaaccgtcaacatacaggaatcgatgaaggatcgggagggaggaatccccccggggtgtggcccgggggtaatccttcagtggtaaaaccactttgccgtggtttcccaaccgacttcccgcgtcgatattcctacccttggcgtggaatgtcaatatactttccacttggcaatgggtttcccggggtcagtcatgcagaccgtgcgtttccctaagacttccctcaccaccaagcgcgtcttgggagtcgatctcggcatcgcgtcatgcggctgggcgctgatcgatctggaaaacgacgacgctcaggcccaatccgtcgggcagatcgtcgcgcttggcacctggatgttcgatgcgccggaaacggacaaagagcgcaagccgacgaaccaaatccggcgaaccatgcgcgggcagcggcgggtgattcgacgccggcgccagcgcatgaacgccatccgccggttgctgttcgatcacaaacttctaccaagcgacgacaaggatgtcttgaagatgccgggccgcgatccgtggaaactgcgggccgaggcccttgatcgggttcttggagccgaggaattcgcggtcgcggtggcgcatatcgccaagcatcgcggcttcaagtccaacaagaagagcgacggcgcgaacgccgccgacgaatcctcgaaaatgctgaaggcgatcgaggcctcgcgcgagaaatcggcggcctatcgaacggttggcgaaatgctggtgaaggaccccgccttcaccgggcggttgcgcaaccgcgacggtgactacagccgttcgctcttgcgccaggatctcgaggcggaaacgcgaaagatattcgaggagcagagaaggcttcgaaatccaatcgccagtgaagctctgcaatcgagcttggccgagatcgccttctttcagcgcccgttacaagacagcgagagccttctcggcccgtgcccgttcgaaaacgacgagaagcgtacctcgaaacgcgcgccgtcctttgaactcttccgttatctgtcgcggttgaccgccctgcgggtgaggccagggcggaccgacaggcccctgacggctgacgaaatcagtaacgcggcagccaatttcggccgaaccgccaagatcacgttcaagtccctgcggaagacgatcgggctagaccccgactgccggttcgttggcgtaagcatcgaggacgaaaagcacgatgtcgcggcgcgcaagggcgaggccgcgttcggcacggccaagctccgcgacgtgcttggcgatgccggctggttgtcactggtgaaaacgcccgaacggcttgaccgcctcgccgaagtactgacctttcgggacgcgccggaacggattcgggcgggcctggaggaattggcgctcgatccgctcatcgtcaaggcggtcatggacgcagtgaacgcaggcgccttcgcccgcttcacgggcgcggggcacatttcctctatggcggcccgggcgatcattccgtttcttaggcaagggcgagtttactccgacgcctgcgcccaggccggctacgaccacgcggcgcggccgacggtcgaacttaaggacatcggcagcccggtggcgcgcaaggcgctgtcggaggcagtgaagcaagtcaacgccgtggtgcgcgagtatggcatccccgacgccatccacatcgagcttgcccgcgacgtcggcaagagcaaggaccagcgcgacgagatcaagagcggcatcgacaagcgtaacgcggagaaagacaggctccgtacccagtacgaggaggacatcggccacgcgccgcgcaccgccgaggatctgcttcgttacgagttatggaagcagcagaattgccgctgcatctataccgacgcctacatcgatccgaaggccgtcgcctccaccgcgaacgaggcgcaagtggatcacattctgccgtggagccggttcggcgacgacagtttccacaacaaggccctggtcaccgcgaaggcgaaccaggacaagcggggccagaccccattcgaatggttctcgaacacgaaaagcgaggacggctgggatgcctttgtcgcgcgcgtcgagggcaacaaggtctttcgcggattcaagaagcgaaacctgttgttgaaaaatgccgccgaggtcgaggagcggttccgcagccggaacctgaacgatacccgctatgcctcgcgggccctggccggattccttgagcaaaagtatccgcccgagcccggccggcggcgggtgttcgcgcgtcccggttcgatcaccagcaaactgcgtcaggcttggggcgtccaggatttgaaaaaggacgccgacggcaagcgcctgtccgacgaccgccatcacgcgctcgacgccctggtttgcgccgccacgaccgagggtatcctgaaccggctgacgagggcattccaggaggcggagcggcgcggattgggccgggagatcgccgacatgccccaaccgtggccgggctttcgcgatcaggccaaggcggcggtcctatcggtgttcgtggcccgcgccgagcgccgccgtgcgcggggcaaggcccacgacgcgaccatcaagcagttggacggcggcagtatctacgaacgcgagtccgtcgaaaaactgacgctcaaggacttggaattggtcaaggggccggagcgcaatggcaagttgatcgaaagcctgcgcgcctggatcgaggccggcaagcccaagaacacgtctccgctatcgccgaagggcgacccggtgcgcaaggtccgcattctcaatagggcaaaggacggcgtatcgattcgcggcggtatcgttgatcggggcgaaatggtccgcgtcgatgtcttccgaaagaaacatcggaggggcgcttggcagtacttcctagtgcccgtctatccgcatcaggtggcgatggacaccgccccgcctagaaaatgggcgcagggtggcgttttggaaagtgagtggcaatcggtggacgagggtcacgagtttctttggccgctgcatccgatgtcgttgatcgagatggtcaaaccggatggtgaagtgctgcgcggatatttccggggcatggatcgttcaaccggggccatccatgtctcgctgcatcaaagcagggacgcgaaggtgcgcggcacgggtgcccgtactttatcgagccttacaaagctgacggtcgatcggttgggccgggtccatctcgtcgaacgcgaggcgcggacatggcatggcgcggtgtgcacataagccgcgattcgcgcctgcggttcgccgacaatcagatcgtcgtcgaacagacggacggggaggcgcggttcgcgatcgaggacttggcttggatcgtcatcgacgcgccccatgtcacgctgtcatcgaccctggttcgggcttgcatgaatgccggcgtgaccatcgttttcaccgacgagacccacacgccgaatggaatggcgctgccgttccatcgccacttcaggcagggcgaaatcgcccgccagcaggtcgaaatcgcgctgccgctcaagaaacgcctgtggcaagccatcgtcgtcgccaagatcgagaaccaggcggcggcgctgggcgcgcgcggccgggagggcggcccgaccctggcggcagcggctcgccgggtgcggtcgggggatcccgtgaacctggaggcgcgcgcggcgcgctactatttcgggcgcctgttccgggaccgtgggccgggagagagaagcgggcgctatacgcgcgaggacggtggcgacgttcgcaacaagatgctgaattacggctatgcaatcctgcgctccggggtggcgcgggcgctgacggcctatggcttcattccggccctcggcctcatgcatgccagccaaaccaacgccttcaatttggccgatgatttggtcgagccattccgcccgttcgccgacgtgttggtacacgagatgtcggcgggggaaggcgatcttcgccgcgacctcgctattgacgaccgccgaaaactggcggggcttctgcttcgggaatgcatggttgggcgggatcgcgtgacactgctggtcgcaacggagcgggcggcggaatcgctggcccaggcgatggaggccaagtcgccggcgctcctgtctctcccggatctgggagctccggcggatgccgcccggtgaaaaccgaggaggtccgcatcttgtggctgttcgtttttttcgacttgcccgtcggtaccaaggaggaacgacgacacgcgacgcggttccgcaattttctcaaggacgacggctacatgatgctgcaatactcggtctatgcgcgcgtttgccgaggggaagaggcggtggacaagcacctgacgcgagtgacgaaaagcatgcccaggaaaggggcgattcgatcgcttcaggtcacggacaagcagtacgcccggatgaggctgctgctcggcgagcagaaaaaatcggaacgcatcgctccgcagcagatggttctgctatgaaaaaacgccgcggcaaaacggcgttttccctgttcattcagacccttcggctgctggtagcctaccatcgggaagtcggtagggaaaccacggctttgagcagggttgcgattctcgccactacagcctaccatcgggaagtcggtagggaaaccacggccggc

SEQ ID NO: 4297 - DNA, 14562 bp, synthetic construct
  source 1..14562: mol_type = other DNA
  misc_feature 1..14562: note = Synthetic
caaggccgaggagcgttgccgactgctcgaaacgccggccgccattgtgatgaccgaacgggacaggcaactcggcctgttcgtcggaaacgcgcgcgtcggcgccactttcggccgcaatgacatcccggtccttcgcgctctgatccgcacgtacaacatcgtggacgacgacgtcagcgtcgagatctggaaacggacttcggagatccttgaggcgctgcggacgctcgatgaggacgaagagcgcgaggagatccggtcgggcttggccgaggccaagcgcactcactaccctgcggtcgacgtccacgacgacctcgtcgagaggctcgcgaagacgccggcctcgacgctagagggggcgctggccaaggcgcgcgcgatgcgccgcactttcctaggccaggcggaagacttcaccgagcgcttcaacgacaatctgcgcagccggatgcgcagggtaggacctgaccaagaggcgtgcgcgctgagcctcgcgcgcgacatgatcgcactcgccgaaaagtcccgtgatagccgaggagaaatcgccaatgtctgaggccaagtctttcgcgttcagcctcaggcgcggccgctcaggctgcgccaacagggaggatggatcgtcaagcgaccggcgcggcttccttcgctccatcatcgccacgggcgccgccgcggccgtcgtcgctgtccccgtcgccgcgagcgccgaagcgcacccggatgcggcgctcttcgcgttggtcgaccgaatgaagggactcgacgggatcgccgacgcggcttggcaggcgctcgaggacgccgagaaccgggtcgagtggcccgccccgcctccggccctcttcgtgcgggaggatgacgcgaagctgtggccgtggggaccgtcgggagacgccggggcgcttctcgacgaaagggacatcggccacatcgtcaggtcgagtgccctgctcaaccgcggtccggcggaatacccgaattccgatttcgtggccgccgtccatgcgcgcgcggacgagctcgccgcggcgctcgccagcgacaaggcggcgcagcgcgaagcgaacgagcgggctggcgtgcctgaggcggacgagcgggcgcgcatggcgtcgaccgaagttcgcagggccatgagccgcatcgccaagacgcgggcgacgacgatcgacggcctgatggcgaagctcgccgccgtcgcgccggcattcgtcgacgaaacatgcggagaagagggcgacgccgacgccgtcctgtacagcgccgccgccgacgctcaggccctctcgcgcccgggccgcggacccagatcggccgccgtcgaactcggcctcgtcgccaaggagagcgtctaatgtctgaggccgaagaatccgacgtctcgtggcgtcaagattgggcgcttgatccggacagggcgctgccgtttacggagccggaagtgattcacgaattcgcgctgaacggcctgaccgtccgccgctatgataacgggtttcgtctcgtgggatggacaacggtgcttggcggcaacggtgaacccgaagagcgccgcatcatggtccggttcgcgatctccgaacgtggtgcgaggcagttgcgcgccgacatcggcaaactgttcggggccgagcactgatcaccgaaaaatccgcttccgaaacggccgccggggcgactcggcggcttttctgtgtgcgcgcgagaaacggatggcggcgacagggccagtcctcaaaattgaggactgcgcttcgtggcgcgtccacatggcgtccatctcgtcgccgttcggcgcaaggtcgagagctgggtggtccggcgcccgtagggggaagcgctccccgctggctctggcgcgcgctcgtcgccgccctcgtcgcggggacgtggcgcattgccgcgccgggtaattacaacacagaaatagcgtgttaccctaatgcataccccggcgattttggcatcgtttttcggagtgtcacaatcgccgctaagtggttgattttgttctggctccccgagcaggactcgaacctgcgaccattcgattaacagtcgaatgctctaccagctgagctatcggggatcagcgggggcggatatagcagattttgtcgccgagccaagccgtttttcgccggctgccgatgcgcggaaggcgtattcctccctccttttggcgggagcgaaaggaggggcgcgcggaacctcggatttttcgcgtcctgcgcccttccagcggggccgcccggccaggggtccgaaacgcgcccctccggcggcgggcgatcggcggcgcgcggcgcggcccgacgggcaacgtcgcttccccgaccggcgagccgattttcgcacttgccctcgccgccgcgccgctccactttcgacgcatgctcgatccttcgaaccatccggaactgctcacgccggccgaaatgggcgaggccgatcgcatgacgatcgccgccgggattccgggcccggcgctcatggaggccgcgggactcgcggtcgcggacgaggcggcgcggctcgcgcgctcgcgcgggcgaatcgtcgtctactgcgggccgggaaacaacggcggcgacggcttcgtcgcggcgcggcggcttcgggagcgcggctatcccgtcgcgctcggcctcctcggccggcgcgaggcgctgagcggcgacgcggcctatgcggcggggcgattcgcgggcgatatcctgccggccgaagcggtcgatcccgagggcgcgtcctgcgtgatcgacgcgctgttcggcgcgggactggcgcgcgatatcgacggcgaggcgcgcaagctcgtcgagcgcatcaacgcctgcaagcggttcggcggacgcgtgctggcggtggacacgccctcggggctcgacggggcgagcggaaaaatccgcggcgtcgcggtcgaggcgaccgcgagcgtcaccttcttccggctgaagcccgggcacctgctcgagcccggccggacgctctgcggcgcgatccggctcgccgacatcggcattccggcgagcgtgttgccgcgcatcgcgccgcgcgccttcgtcaacgggccggccttgtggcagggcgcgctgccgcgcctcgacgcccacgcgcacaaatacgcgcgcggggcggcgctcgtgctctcggggccgccgcatcagaccggcgcggcgcggcttgcggcgcgggcggcgctccgggcgggggccgggatcgtcgcgctcgcgagcccgcccgaaagcgtggccgtcaacgcggcgcattcgaccgccgtgatggtcgcgccgttcagcggcccgagcgggttcgaatcgctgctcgccgacgcgcgccggcgcgctgtggccctcggccccggggccggcgtcgggacgggaacgcgcaagctggtcgcggcggcgttgacgcggccttcggaccggcggacgatcgtgctcgacgccgacgcgctgacgagtttttcgggcgaggcggacaagctcgcccagttgatcggccgcggcggacacgccgtcgtcatgacgccgcacgagggcgaattcgtccggctgttcgccgccgggatccgggcggacgacgacaagctcgcccgcgcgcgcgaagccgcctggctcaccggggcggtgatcgtgctcaagggcgcggacaccgtcgtcgccgcgccggacgggcgcgcggcgatcggctgggacctgccgccgacgctggcgaccgcaggctcgggcgacgtgctgaccgggttcgtcgccggcctcgcggcccagggcgtcccgccgttcgaggccgcggcggcggcggtgtggctgcacggcgccgcggcgcgggctttcggcccgggcctgatcgccgaggatctgcccgaggctttgccgggcgtgctggcgcggctgcacggtcgggaccgcatggggtccgactgaatgccggtttctcgaagggctttcgcgattgtgtcctcgagccagccgaagatcatgctccacctgtagcccataggttacagcgggtggagtttgaaagtatcgatggcggtcgtcgagatcaatccattgcagatcgaagggcggtggcaatccggcgccgcgctggatttgcacccgaccagcagcatcccgatcggacccaacgaatttggccacatgcagttcgagaccgtccggccagaggtcgccgaacagtcgtatcggttgaaaaaccggggcgacgtctacgccgcaacgccaagcattgagacctcggcgagcttcccgtcaagacatcgggacaaattcgacggcatcgttccggttccgccgtcgcaccagcgggtcgtacagccggttgtcattttggccggcgggatcggaaaggcgctgaacgtcccgcttctcccgtgcatcggtacgattcggccggcttcgcagctcgagaacattaccgatcctgaggagcgcaagaaacatgtcgagagtctctatcaagtgcgtgtggaccagacgcgtggacgaaagttcctgcttttcgacggtctctctcggcgccgtctggcttgacgatgaactcggggatcagcgggacgaccttggcgtgccccggcgcgaccacggtcgccgccagcatggaatgatagctttcgaccttgctgttgctgtgcttacgcgtctgacaatgccggcaggcgatcttccggctgcagaaatactcggtcccatcgacggcgacgcacgttctgccgccgagcctgacgaacgcctcacgcatcgccggttcgaggagccgctgctcgaccgcctggaagcagggcgcgagcggggccgggtccgccccgtcgagcgtgtccctgatatcattgtccgaagggattttctcgatcccgaacaaggtctggcggttcgaccggccccggccccgctccagcgtccgctggaaggacaaggaggacgcgctctgcatgaagaccatagcgaacgccggcaacccgaaacccgccatcgcgatattgccgccccgccccttgcgagggtccgggaacgcagcgcaaacagccttcaggccagacagaagcggcgccaaaatcttcatctccggcgtgaatcatgtttccgctgacttgtgaattcggaaaatgcccttctggcctaattttcgaattgctggcgatgctcgccggcttcgcggcgctgggctacgccggcatcggcagagccggaaaacgaacgtcgcgtccgcgtgagccgcgcgcacaatcatcgccacaagaattcggacccgcctcgggcggcgggtccgtgccgcgagcacgtgagccttcagcccgcgagcgccgccgcagcctctgcgagcggcaggtcgacgatctcgatcatctgctcgtcgtagaaccttcgctcgttgcgggtcagcgagctggtctcggcgaccgcgaaatgcggacccttggaacgcttcatgatctggcgggcgtaggtcctgagcatctggtcgtggaagcggcagcccaggaacaggaagccgcgatcggtgcgcgcctccttcacggccgagggaatcggggtctgaatgtcgatctccgtcatcacctcgacatagtccgaatcggccaccaggaagttgcgcgccggacggacgccgccatgcggggaatagagcaccaggcgcgccgcctcgaccgcggccccgtcgcagggctggccggcggcgtcgtaagcgacggtccagatgtcgtagttgatccccgcgcgggtgatgccctggatctcgacgaaatcgtcccgtccagcctccctcagcgcggtcgcgaattggtcgtcgtaccacgagttgacgacgagccgggacggcatgccggccagaaaccgaaccagcgggctcggtgcgaccggcgcggcgaagatgtccgccatgaacttctgcaaggtcttgcgatggcggcggctctcgatgaactgcgccaccgaccacatgttggtgcggatgcgcgacggcgccggggccttggcgtgcagcgccgcggccaccgcttccggcgtcgccggcacgggcgaaccggcgagcgtgaggagcccagggccgagatagggaacgagcgcgtctcgcccgagcaggtcgcgcacgacggcgaggcggggcgccggatcggacggcggcgcgcgtgccggaacaagctcggcgacggagaggttcattcttcttctccgagcttcctggcgttgacggtgatcggcagcttcgtgtcgggcggcatctccggcaggatcagggtccagccgttgcgcagcttcaccgatccgccccacagcgtctcgcgctcggtctcgacgaccggctcctcgagatccttcttgggcacgtagacgctcaggcccttttcgccgcggcggatcatcaccttcattgtccggtttccttcaaggccgcgggcgcgtccgcgcgatcgaggctcgtcagctccttgccgcgcatgccgacgacggttgcgctgtcgatccattcgaccgcgtagatgtagaattgctggaggaaggtgccgatgtcgcgcacgtagccgacctcgcccttgcgcaccagaatgtcgccgatgtcgcggcccctgtaggtcccgtcgttgcggatgtgcttgagcgaccggaccttctcgcccggcatgaagaccggcgcgtcgcggatctcgacttcctgctctctcgccagtcccatcacgcgttctccgccgtcttgcgggccaatgccgcctcgcgcacgacctcgtcctcgtcgtcgaccagcgcgcccagaagcgcgggcggcagccgctcggcgcagacgaagcgcacacgaaaatcctcgtccccggccatgagcacgagccgttcctccggcagccgctcggccaccgcgatcctgaccagcgggtccggatcgccggtcatgctcggcagcacatagtccggggcgcgccacgcggcctcgcgccgcaccgtcggatcggggtcgtcgatcagccgcaccagcagcgccggttccgcccgccgcgccgccgcgagccgcacggaatattccggatcggcgaacaggttcgccagcgcctcgcccgagaggcgctgggcgagggcgatgcgcaccttgggctcgggatccttcatcagggggccgagccgggcgcgcggcagccgaagcgccaccatcgcacgcacgtccggctccgggtcgttcaggagcgccgtcagccggaagggcgaagcgtagcgcgccgcgagcgtgcgcacctcgaaatagggatgggccagatgccgctcggcatgcacaggattggcggcgaagaaccggtcgatccggcgcgcgcgccgatccatcacgcaagcgcggccgaactcgcattgtccggccgcccgcgtctcctcgtaagggcagtcggcgcaggaaatcggattgccgagccagtcggccggcccgtcgtcctcttccggggatgcgccgccagccatggccaaacgccctcgaagccgtcaggctttgacgcaggtcttcggcaccgggcagacggccgcgcattgctgcgtgtcgaaatgcccgtcacattctgtgcatttttttgcgtcgatgacgtaggtttcgcccttgaacttgatcgcggccgtcgggcactcgaattcgcatgcgccgcaagcggtgcaactggaagcgatgatcttgaaagccattccgtcttctcctcttgctcttgtcagccggcgcggctcgtgcgccggaattcatggatccctctccccttgcgggagaagggcagcgcgcgaagcgcggccggatgagggtcaggcgaccgctctcgcctcgcccttgtcggcggtcgcctcggcgtagagcgcgctgatcgcggtctcggcgtattcgtaggcataggcgtcggtggcctcgatcccggcagccgtcagcatgtccttcgggcaatcgccgatcttggagcacaggacatgggtcacgccctcgagcgcggcgatggtggcgtcgagggtcgcgtcctcgccgaagccatccatgcaataggcgtcgatcttgcggtggccgacgaacgccacgcccctccccgaggcttcgtagacctggaattccttggcgtggccgaaatgctcgttgatgcggccgccccccttggtcgcgaccgcaaccaggatcgtatgcccgccggccgcgttctccttgaccgcggcgaccgccttctccttggcgcgcacatggtcgccgcgctcctcggcgacgatctcgcgataggccgcgcgcttgctcggatcgtagacgacctcttccggcagcaggtcgaggttgaattcctggccgcggtcctcgcccagaaggccgaccgcgtcggcgcggcactggcggcaatggcgcatcagcttggcgccgccgtcgagcttgtcctgcagggctttcagctccatcgcggtgggtccgcgctggccggtgaggccgaaatgggtgccgtgcgcggcgtcggagatcaacggcatgacgttgtgcaggaaggcgccgcgctccttgacccagcggttgacctcgacgaggtgctcgtcgttgatccccgggatcatcaccgagttgatcttggtcaggatgccgcgcgcggtcagcatctcgaggccgagcatctgccgctcgtgcaggatcgtggccgcctcgatcccggtgtagcgccgcttgttgtaatagatccagggatagatcttcgcgccgatctcgggatcgaccatgttgatggtgatcgtcacgtggtcgacgttcatgcgcgcgagttcgtcgacatggtcgggcagggcgaggccgttggtcgagacgcagagcttgacgtcgggaatttccttcgagatcgccgagaacgtcgcctcggtcttcttccagtcgtagcaggcgtcgccggggccggcgatgccgagcaccgagagttgcggcacctcgttggcgaccgtgatcaccttgcgccgggcctcgtcgggcgtgagcttctccgacaccacgcccggccggctctcgttggcgcagtcgtacttgcgattgcagtagttgcactggatgttgcaggccggcgcgactgcgacatgcatgcgggcgaaatagtgatgcgcctcttcggaatagcagggatggtccttgatccgctcccaggtggcctcgtccatgtcgctgggcttcgccgacgttccgcaggaggacgacgaacagccgcccgatgtcgccgcctctttcatcgcctcgaagtcgatgggcttcatcaggctgtcgagcgagatcgtgaacggctggctcatgtgtcgcgtctcctgtcgctgggacagaggacgcaaggggtgtgccatcgtgattgcgcgcgatttcaagagctttccggcctccgcgcgcagtcccggccggacactgccatgtcgcgttcgcgacagagcgcgctgtcgccgcggcgcggagggtcgtcgggcgatatccgcgcggggcgagccttcatgggcgccgcggtcgtcgggccgtcggcgaggctgtcatctcgagccccgaaggggcgtagcgatctagaaagtctcagggcgccgcatcggctcgcggatccccccggaattttgatccgggggctgctcgcgatgacagagttccacaagacaacggcagttacgacttgcgcgcgcctttgcagccccgtttgccgcatctcagccaaattcccgaacgggaccgacgccgccctcaccctcggattgtcctttcgcgccacgttcactttttgttccgaaagtctcaatgcctttccccgtcataaacttcgatcgacgcaaaaatgcgcccgcgaccgccagatcacctgcgcctctttcaaaagtggaatctccgcagccggtttcccgactgcggataatccttcggaggtttcttgcgaaacccccttgccgtggctttccaaccgatttcccagggtcaacgttgcacacttcgcctcgatgttcaatagtgacatccgatttcagcgagtgttgtccccatgcgtgttctcggcgtcgatctcggtatcgcctcctgcggatgggctgtcgtcgaaacggatgtcgaaacgccgagcgtcgtcgcggccggagcccggtgtttcgacgcgccgctggtggacaagaccggagagccgaagagcgccgtccgccgcgccgcccgcggccagcggcgggtcatacgccgccgcaggcagcgcatgcagagcgtgcgcgcgatcctgcacggcgccggactgctcgaaagcgccggccgggacgcgcagcgcgaagccttgcggcgcgtccagcaggactcggcggacgacaagccgacgccctggcggctgcgcgccgaggcccatgaccgcttgctgagcgccgacgaattttccgtcgccctcggccatatcgcgcgccatcgcggctttcgttccaattccaagcgcgacgccggcgccaacgccgccgacgaaacctcgaagatgaaaaaggcgatggagcagacgcgcgagggtctggccaaatatcgctcgttcggcgagatgctcgacggcgatccgaaattcgccgaccgcaagcgcaaccgcgacaaggactattcgcacacgccgaagcgttcggacctcgaagacgaaatacggttgatcttcgctgcgcagcggcgtttcgataacccgagggcgaccgaagcgcttcaggcggagatcgcgtccgccgccttcgatcagcgtccgttgcaggacagcgaaggcaaggtcggtccctgcccgttcgaaaccggcgagaaacgcaccgcgaagcgcgccccgtccttcgaattgttccgcttcctgtcccgtcttgcgaaccttcgcctgacggccgggggcgccgagcccaaattgaccccggaggagatcgcgcgcgctgcgcgcggcttcggcgagcagaagagcataactttcaagacgctgcgaaaattgctcgatctggatccgaacacgcgcttcgccggcatttcgcccgacaaggaaggcctggacgtcgcggcgcgcacgggcgccgcggccgccggcacgtttgcgctgcgtgacgcattgtgtggcgcgccatggaacgcgcttgcgaggacgccggaaaagctcgaccgcatcgccgaagtgctgacctttcgcgaggacatcggccgtatcgaagagggcttgcaggatatcggcctggagccgctcgtgctgaacaggctcgtcgaagcgacccgggaggggaagttcagcgaattccgcggcgccgcgcacatctcggccaaggccgcgcgcgccgtcatccccggcctgcgcgaggggctggtctattcggaggcgtgcgcgcgggtcggctacgatcacgccgcgcgcgcggcggtctcgctcgatgagatcaacagcccggtgacgcggcgggctttcggcgaggcgatcaagcagatccgcgcggtcgcgcacgcttacggcccgatcgactgctttcatatcgagctcgcgcgcgacgtcggcaagagcgccgaagagcggcgcgagctgaccgacggcatcgaaaagcgcaacgtcgagaaagagctgcgccggggcctcgcagcagaaacattggcccgcgcagtgagcgacgacgaattgctgcgctatgagctcgcgaccgaacaactcttccgctgcgtctactgcgacggctcgatcgccccgaacggattccgggccgacgacacccgctatcaggtcgaccatatcctgccgtggtcgcgtttcggcgatgattcgtaccgaaacaagacgctgtgctgcacgcgctgcaatcaggagaagcgcggccggacgccctacgaatggttcacggacgacaagaccgaagcgcagtgggagacattcgctggcgtcgtcgaaggcttgaaggggatgaagggcctcaagaagcgcaattttcgcctgaaggacgcaaaggccgtcgaagacaagttcaagagccggaaccttacggacacccgctgggcgtcgcggctgctcgccgacgagctgaagcggatgtttccggcgccggaaggaacgcggcgcgtgttcgcgcggccgggcgcgatcacctcgaagctgcgccgcgcctgggggctggagaccttgaagaagatcgacggcgagcgggtttccgacgatcgccatcacgccgtcgacgccatcgttctggcggccacgaccgaaagcctgcttcaggcgatgacgaaggatatccagcgccgcgagggcgaaggccgcgcggacgacatcttccacgttccacagccgtggccgcatttccgcgccgaggtcgaacgcgtcgtctacggcgagaacggaatcggcggggtgttcgtctcgcgcgccgagcgccgccgggcgcgcggcaaggcgcatgacgcgacgatcaagcaaatccgcgaggtcgacgggcgggaggtcgttttcgagcgcaaagcgatcgagaagctgggagacaaggacctggacaggattccggtccccgagccctacggaaacgtcgccgatcccgccaagctgcgcgacgcgctggtcgagtcgctgcgggcttggatcgcggcgggcaagccgaagagccccgacaaactgccgcgttcgccgaaaggcgacgttattcgtaaagtccgcgttagaacaaaggatcaagtcgcgatccgattgcacggtgggacggtcgatcggacagcgataacccgaattgacgtctttgagacgaacgatcccaaaagccgttcgcggtatcgttttgtaccaatatatcggcatcagcttgtcgataacaccgttccggttaggtattttgaactaaggaaaaatcaagataattggaaaccaatttcaacttttgacgtatatttgttctcattaaatcctatgagccttgtcgaaatcaagagtgggaacaagcctcctacagtctggtactatcgcggctttgactcgaacgatggtcgaatgtccctgtcgccgcaagagacaaaggacgacgagtttcaagtacgcatcgcgcccacgacaattgagtccatccgcaagttgaccatcgaccggcttggcttctggaaacccgtcgaagcggagacccgcacatggcgtggcgcggcctgcacataagccgcgccgcgcggctcagtaccaccgacggacagatcgtcgtctcgcaggacgacggcgaagcgcggctgccgctcgaagacgtcgcctatgtcatcctcgacgcgccgcacgcgacgatgacctcgacgttgctgtccgcctgcatggacaacggcgtggtcatcgtcaccaccgatgcgcggcacacgccgaacggcgtcctcctgccgttccactcgcatcaccggcaggccggcgtcgcggccctgcaaatcgcgctcggcgaaccgctgaaaaaacgatgctggcaaaaaatcgtcgtcgccaagatcgccaatcaggccctgcatctcgaggcgcgcgggcggcccggcgccgaggctttgcgcgcgatggccgatctcgtcggctccggcgatcccgacaacgtcgaggcgcgggcggcgcgcgcatactggagccgcctgttcgacggcttcgtccgcgccgacgagggcgacctgcgcaacaagctgctcaactacggctatgcgatcgtgcgcgccgccgtcgcgcgggcgctcgtcgcctacggctgccttccggcgctcgggctgcaccacgacagcgtgaccaacgccttcaatctcgccgacgacctcgtcgagccgttccggccgttcgtcgacggcctcgccttcgcgcgcgcggccggacgcgagccgggcggcgagctgacgatcgaggaccggcgcgcggcggccggcattctcatgcgcgactgccgcgtcgcgggcgagcgcgtcagcctgctggtcgcgaccgagaaagccgccgaaagtctggtgcaggcgatggaggcgaaaagcgcggcgctgctgaagctgccggacatgtccgacgcgcgggagcaggcgccgtgaacagcgaggaggtccggttcatgtggctgttcgtcttcttcgacctgcccgtcgggaccaagacagagcggcgcaacgcgacccgcttccggaatttcctgaaggacgacgggttcatgatgctccagttttcagtctacgcgcgggtcgaccgcggcgaagaagctgtggataagcacctcgcccggatcgcgaggcagcttccgccgaagggaaacgtgcgcacattgaccgtcaccgagcgccagtacgcgcgcatgaagctcctcgtgggcgaatcgacaaaaaatgaaaaagccgcgccccagcagctcgtcctgctctgatttcctgcccgcctcagggcggttttctccttacgcatccgccacttgcgccgaacctagcctaccacagggaaatcggtagggaagccacggccagctcgagcagatgcgcgagcgggctggcagcctaccacagggaaatcggtagggaagccacggcacgcaaaagaagctcgcgcactcgcgccacagcctaccacagggaaatcggtagggaagccacggccagcagccg

SEQ ID NO: 4298 - DNA, 14329 bp, synthetic construct
  variation 3197..3239: note = note, n is a, c, g, or t
  variation 5987..5988: note = note, n is a, c, g, or t
  misc_feature 1..14329: note = Synthetic
  source 1..14329: mol_type = other DNA
ctaacctctggcatccggaaaactccgcggcgaaatcgtgtccgccgaccggcgcccccaatccagttccggaaccctggccttcacccgcgcctgcgcctcatgcaatgcctcggccgcggcgggatagtcgatcgtcaaaacgcgtccgttctcgacaactttcttcccatccacataaaccgcgcggatcgccctgtctcccgcggcgaaaatcaaatttcgcaccggatcgtgcagcggccgcatcatcggatgcgtcacatccaccagcaccagatccgcgcggcaccccggagcgatccgcccgatatcgtcccgccccaaagcgtgggccccgccgatcgtcgccgcgttgaacaaatccgtgctcgtcatcgtccgaggattacccgcctgggttcgcgccagatacgaaacgagccgcatttcatccagcatattgtgcgggtacgtatcggtccccacacccatgcggacgcccgctcgcagatagcgtccgaaatccttcagcgtgatcccgcgccgcgcgaacacggtcgggcaatgcgccaccgtggtgccggtttccgccaaccgctgaagatcggtctcagtatgccacggggttgacggatgatcgtccagaaaaatcccgtgaccgataatcgaccgttccgatagcagtccaagatgatccagccagccgatcggcgtgtagccgtgccgccgcgcgatctcatgaaattccgacacagactgcgccgcgtgaatttgccatgacaatccccgcgccttcgcctcggagaacgactctcgcaacaacccttccgtgcacgtatcgacctgcgacggagtcaccatcccgaacagcagcccagacggatgttgctcggcgcgatcgatcagggtcagcgcctcggcgaacgccttctcgcccgccgcctcatcccaggcgtattccacgaggtgcccattcttcgtgaaccaccgcgctgagcggaacatcggcgcgatgcacacgcgcatccccgcctcggccagcagatcgagccagccgggatgcgccatcgacaaatccgcgagagtcgttactccagaaagcagcaattccgacagggcgacacgcacgcaggacggcaccgcctccgcgtcggcgcgaaagatcggcaggtattcatagagcgacgaattgtaaaatcccggcgagccgatctcatcgatcagccctttgttcatcggttcgctggacgggtgcgaatgaatgttcacaagtccgggcatcaccatcagcccgcgcccgtcgatcgtttcgtcaaccgaacctgcataccggtcgcccgcgaaaatcaccgcgccgccttgaaacgcgacgtcggcgtcggagagatagacgtggctcttcgctgacgcgtcccacgccacaacgaaggcagcggaacggatcaacgtgacaggtggggtaccgttcggcatgggctcgcatctccggctatcgataccgaacccttgcattcgggcaccggtttggacagagggtcaacgtccggtcgcgattaaatcggcatcctgtctcggccgatagagtttctgtcgccagaagagtatccgatccgtggggagatcaggtccggatggtttcatgaagcggcttcccatgctcgcggcaaccgcgttggtcattggcctggccaacggcaacgcgcgagccgacgaactggtgcaggtagccccgcatcgtgccaccccgcccgcgcaacgtggcgaaacgacgccgccgctgctcggatttctgacgcggccatacggcccaggacgatttccggcggtcgtcttgctgcattggtgctccggcttcggcgcccatgacacgacggcggcggcgacattgaagtcatggggctttgtcgccctggcgctcgacagtctgggcgatgccaatatgtgccagggcggtggcggcagcatggccgaggtcgtcgatgcctacgccgcgctgcgcttcctggccgcgcgggacttcgtggcgagcgaccgtatcgccgtcatgggttattccatgggcggtctcgcgacgttggccgcggtcgatcggtcgccactcgcggagggacaaccggcacggttccgcgctgctatcgcttattacccgccgtgccagttcatcacgggcgatctgacggcgcccgcgttgatcctgatcggcgagcacgacgactggagttcaccggatgcatgccgcaagttgttgacgcatgaaaacgatatcggcatcacccgcggacccggcacgggtgcgacgatcgacctgatcgtgtatcctgatgcgactcacgcgttcgactcggatctaccgccgcatcgttacctgggacatttcatgcgttacgatcccgccgccactcaggacgccgcgacgaaggttcacgcttttttgcgcgataaaatcggggatctaccggaaaagccatgaacggcgctgttgagcacaccaatcgccgtggccaccctgggcaggaccgccgcctcgcgccagtcatgtcgccccaaacaagtagtccgacctcagccgctcgcgagcgcgaccaggaatgaacagccgtatgacacccacgtccaccagcgacccgcgaccgggcacccctggcgaggtcctgatcgccttcctgaagctcggactgacctcgttcggcggaccggtcgcccatattggatattttcggcaggcgttcgtgcaacgacggcactggctggacgaaacctctttcgcggacctcgtcgcgctcagccagttccttcccggtccggccagcagtcaggtcgtcttttctctgggcttgatgcgaggcggctggctcggagggctcgccgcgtcggccgccttcaccctgccgtcggccatcgtcatggtattgttcgcctacgccgcgaatgtcatggatgggccgctcggcgtcgcggtgttgcatggccttaagctggtcgcggtcgcgatcgtcgcgcaggcggtatggggcatggccaccaccctgtgccccgaccgaacccgagcgagcatcgctctgttcgccctggccatcgtcaccctgaccgcgaacgccgccggccagatcacggcgatcgtgttgggtgggtgcgccggggcgttgctctgccgttcagcgcccgcgccggccgcggcgaccggacagcttccctccattccagtttcacggacnnnnnnnnnnnnnnnnnnnnnnnnnnnnnnnnnnnnnnnnnnntattcaccttcgccgcctatttgggcgcggtgagcgggcctgccccgaacggcatcgtcggagcgatcatcgcactggtggcgatcttcctgccaggcttgctgctgatggccggtgcgttgccttactgggacgccttccgccgacgcccgtccgcgcaagcggcgatgcggggcaccaacgccgcggttgtcggggttctcgccgccgcgctgtacaacccggtatggacgagcgcggtcgccggcccactggatttcgccatcgccacgatcggcttcgtgctgctggtggtctggcggttgccgcctctcgccgtggtcgccgcgatcacggtcggcgcggttgcggtgcggctggtagggtagtgcaggtcactcccgcgtgaccgtcggcaggatcgggagagcccaggttccgaagcgcgatgttgaatccttaactacgcggcgcgtgcgtagacgccgctgagcagtaccgcgaacagcagaacggctggccgccgttgcagcgagtttgagacgcattggagagccgggcttcgattcggatgcggtcatgcgacctggctgtgacgacggagggtgcgccgtccgtttaactcatgttggcgcgtggccgcgacccgctttggccatgtcgatgcgagagccggaggaggattcttgactccggtttattatacgcggatcgcggtttgcgtataacgcctggtggtgaacggccagttctcggattatacgctgatcgcggtttgcgtataacgacgggaagggtcggatggccgataatatctccttgatgtcgcagacgacgtatgcggagttgctggatcgcgcgcgcgcatcggcgttttccaacgatttcccggatgatgagggggtcttcgtttcaaaaaccacgcggggtcgagtctactggtatttccaggaatcgtccgcgcatggccgacgccagaaatatgtcgggccggagaccgacgatctacgggagcggatcgccgcgcacaacgcggccaggacgtaccggcgggatcaacgtagcctggtcgcgacgttggtgcgaagcggaaatctgccctctccacgccgcgatatcggcgacctggtagcagcgctcgcggccgccggcgtgttccgactgcgcggcgtgttggtcggaacagtcgcctaccaggcatattcgccgttgctgggagtccgcctgcccgccgccctggtgcaaaccggcgatgtcgacctggcgcaggatgcgaatgtttcagccgaggtggctgacgcaacgccggtctcggacgtgttgcggcaggtcgacatttcatttcggccggtaccgcgcatcaattccgcgcgtttcgtgtcctatatggcggcatccggcttacgagtggattttctgacctcgaacagaggcccggacacggacgaaccgcgcaccctgcccgcgttcggcgtggatgctcaacccttgcgattcatggacttcctgatcagagatccggagccggcggtgctgttgcatggcaccggggtgttggtctcggtcccggcgccgcagcggttcgccctgcacaagttgatcgtcgcccgtcgccgtcacgaggacagcggcaagcgagaaaaggacctgatgcaggccggggcattgctcgacgctctggtcgagcggcggccgcacgaactgcgagccgcctgggacgaggcatttggtcgcggcaaggcgtggcggcgcctgatcggcgagggattgggcctgctgcatccggcgatccgggataaggtgcttcgaacagttggagcgtcacgtcaggtcgtgcccgggatggcgcttcgattcgttccagaaaaggccgcgtacgacgagaccgccgatggggtgaggttcttcgcgctgtgttcgggtccgctcgcgttcaataatcaacaaggcgttcgctgcctggtgacacgagacgccgtgtcgttcattgcaagaaatcgggcgcttgatcgagaccaatgccttgaggtgttccgtgaatacagaaacctgatcgaaacaacgacgcggacgaaatacctggagcgaccggtcgatagcgttggtgaagtttggcttgcgggctcagacatcatgtcctgaacgccggaatcgtccggacatcgcaccgttacgatttctggcttttccttcgaccgcgagcgttcttcaaccggctaaaccgcccgttcgacgatcagcttcttgatttccgcgatcgccttcgctgggttcagtcctttcgggcacgtatcggtacaattcatgatcgtatggcaacgatacaacttgaacggatcctccagcgcatccagcctctgacccgtcgcctcatcccgggagtcggcgatccaccgatacgcctgcaacaacacagccggccccagataccggtcgccgttccaccaataactcgggcacgcggtggagcagcagaagcacaaaatgcactcccacaatccatccagcttcgcccgctcctccttgctctgcagccgttcgccatccggcggcgctgggctgtccgcctgcagccacggctcgaccgagcgcaactgcgcgtagatctgcgacaaatccggcaccaggtccttcaccaccggcatgtgcggcagcgggtggatcttcaccgccttggccttcacgtcctcgatcggcttgaggcaggccagcgtgttggtgccgtcgatgttcatggcgcaactgccgcagatgccctcgcggcaggannccttcaccaccggcatgtgcggcaatggcgtgatgcgcaccgcgccctttacctcatcgatcggcttcaggcaggcgagcgtgttgccgccatcaatgttcatcgcgcaggagccacaaatgccttcgcggcaggaacggcggaaggtcagtgtcggatcgacttcattcttgatcttgatcagcgcgtccagcaccatcggcccgcaggcctcgaggtcgatgttgtaggaatccatgcgcggattttgcccgtcatccgggttccaccggtaaatccgaaactctcgaacctgtttcgcgcccgctggcgccggatgagactgcccatggccgatgcggctattggcgggaaggttgaattcgaccatggcgctttcgttatcctaaatccgcgaagcgaaactcatttcaccgtcatggccggttcgcggcctggagataccatcgcgatatcagtaaacccgcttcttcggcggaaataccgagacctcgttcgtcaacgtgcgcatttttactccgcgatagtccagcttcacggcgccatcgtcaccgcaccaggcgagcgtgtgcttcatccagtgcacgtcgtcacgatcggggaagtcgtcatgcgcgtgcgccccgcggctctcgtggcgggcctcggcgccgaccatggtggtcatcgcgttgcccatcagattctgcaactccagcgcttccatcagatcgctgttccagaccaggctgtgatccgataccgacatgtcgtccaggccgcgccagacccgctgcatttccgtcacgccgcgctccagagtcttgctgttgcgaaacacggcggcgtgggactgcatggtgcgctgcatgtcaagcctcaactcagccactttggtgccacctttggcatgccgcgcgcggtcgaagcgatccatcgtcgcctcgcccgcctttggcggcagcggaggctgcccggcgcccggccggatcagttccgcggtacgagtcgccgccgcccgcccgaacaccacgatgtccagcagcgagttgcagccgagacggttggcgccatgcacggaaacgcaggcgccctcaccgaccgccatcagaccgggcacgacggcatcgggattgtccggggtcggccgcagcacttcggtatgcaggttcgtcggcacgccgcccatgttgtagtgcacggtgggcaacaccgggatcgggtccttggtcacatcgacgccggcgaacactttcgacgtctcggaaatgccgggcaaccgctcatgcaacagatcggcgccgagatgttccaggtgcagatagatataatccttgttcggtccgcagccgcgcccctcgttgatctcgaccgtcatcgaacgcgacaccacgtcgcggctggcgagatccttcgccgacggagcataacgctccatgaaccgctcgccctccgagttggtcagatacccgccctcgccgcgcgcgccttcggtgatcaggcatccggcggggaagatgccggtggggtggaattgcacgaactccatgtcctggcacggcagaccggcccgcaggaccatgccattgccgtcacccgtgcaggtgtgcgcggaggtgcaggaaagaaaggtacgcccgtaacctcccgtggccagcacgaccatctgggcacgaaagcggtgaatggtgccgtcttccagattccatgccatgacaccgcggcacacgccttcctgatccatgatcaggtcgagagcaaaatattcgatgaagaactcggcgtcgtgcttcaggctttgctgatacagcgtatgcaggatcgcatgcccggtgcggtccgccgcggcgcaggcacgcatcgcgggcgcaccatcgccaaactgcgtcatgtggccgccgaacgggcgctggtagatcttacccgcttcggtgcggctgaacggcacgccgaaatgttccagttcgtagaccgccggaaccgcctcacggcacatgtattcgatcgcgtcctgatcgcccagccaatcggatcctttgacggtgtcatacatgtgccagcgccactcgtcgtgatccatgttgcccaaagaggccgcgacgccgccttgcgcggccacggtgtggctgcgggtggggaacactttcgtgatgcaggccgttttcaggcccgccgcccccatcccgaacgtggcgcgcagtccggaaccgccggcgccgaccaccaccacgtcgtaggtgtgatcgacgatgttataggcgcgcgacgaaggaagggtgatcgcgttcatcgaaaagtcctctcaggtattcaggccgagggccagcgcgctcatggcgcaaatcagcgccagaagaatacaaagccctttgaccgccaggaccgccgcgagcttcacgccctcctggggcacgtagtcttcgatcaccacttgcagtccgagttgcaggtgatggaacgtggcggcgatcagcgccagcagcagcgccagccgcaccggagacgacagccagtccgccacatcggcctgcgacgcgccagccagtcgcagcattgaccagatgaaccacaacgtcagcggcaccagcgcgatcgaggtcaggcgttgcgcccaccagtgcttggatcccgcccgcgcggagcccagacctcgcgcgcgtcccagaggcgagcgaagcatgtcgatatgcggcgtagcgcgggtatccggcattgcgttcccctaccagatcatcaggccggcgacccagatcagcacggtcagcgcggcggtggcggcgagcacggcaatgcccgagttatggtattgtttttcgtcgtaaccgtgaccggtgtccatccagagatgccgcaaaccggtcatcagatgaaacaccagcgccagtgtccagcagaacagcaagaacaagccgaccgccgagccgaggaaatactgaaaccgttcaaagcccgcttcggacgtcgcggccgtcagcagccacgcggtcatcagcagcgtgccaatgcccagtccgacgccggtaacgcggtgggtgatcgacagagccatgctcaacggccagcggtaaacctgaacatgcggggaaagcggacgacggaccagtttgccgtccgagtcacgcgccaccatcagcgcttcgcgtacgtctctcaagactcgctccaatcttgccggagagaagaagggaaccggcttgcgaaatgttgcttagtcgcctcgtcagatcgggtcaacgcgatccctgatcgggtctgccctgccgattggtggcgataccaaggaattggccgctcaactgaccggcacgggacggtaacggcggccggtgaagatatggtccttgaacggcgcgtcctcaccccactcgccgtcgaaccggtcgcgttcggggcgaaagtccacatcgaccacgccaacgccgttgcggtcatgccagaggaaccgtcccgcgcacggccccgacggaacgaaatccgtcagcgtaccgtcgaagccgccgtcggcatcctcgacatgatacgaacccgtcagttcgcccgtccgggtggagaattgcgtgtgaagctccttgacgcggccgttatccaggacctggccggtccaggagccgacgagatccggcgcgcaggcgggcggcgccgcgcgcgccgcgttcatccaccccaccagcacgagagcaagagccagaattcgtgaccatcccatgttcgacgacccgcggttcgaagcggggaaggttgaactacggcgagggcgcgcggtccagtggcgtgttcagagacgaggcgaaaggtcgcgggcgggacgacagccagcgttgataaagcgaactaaccgggcaccgccggcccatcgcgtgaagcgaccagccatatcacgctacagaatccccccggcgccgcgagcgacgccgggggttatccttcagtggtaaaaaccactttgccgtggctttcctaccgatttccctgagattgttttgatggtaatatcacctgtttgtcaagtgcggtttggcggagggaggaaacgatgcgaacgctcggtatcgacggtggcattgcgagcattggttggggacttcttgatgtcgatactgacgctggcgcgttgaccatcgtggcggccggagtccgtactttcgacgcacccgaaaccgccaaggaaagaatgccgacgaacgccgttcgccgccttcatcgcggccaacggcgagtaatccgacgccgccgtcagcgcatgaaccaggtcaggcgattgtttctttcgaccggactgcttccgagagcggatagcaatgccctcgcgctggcgggcctcaatccgtggcgattacgcgccgaggggctggaacgcctgttgtcggggcccgaactcgccgtggttctgggacatatcgcccgccatcgcggcttcaaatccaacgcgaagcgcgacgctgcggcgaatgccgctgatgaaacatcgaaaatgaagaaagccatcgagacgacgcgggaccggttggaaggccggaccattggacagatgttcgcgacagacccggcgtttcaggatcgcaagcgtaatcggggcgacttttcccgctccattcttcgcgcggatcaggaaaacgaagtgcggcaaattttcgcggaacaacggcggcgtggcaacgatctggcgaccgagcgcctcgaagacgatttcggccggatcgcgttcttccagcgtccgcttcaggacagcgaagacatggttcagtattgccttttcgagccgaaggagaggcggaccgcgcgccggtcctatgccttcgaaatgttccggctgttgtcgcgcctggcgacgatttccctttcagccggcgggcgggatgaacgcctgaacgcggaccagatcgcgcgggtggccgacgatttcggcaagaccaagggtatttcatataaaggggtccgaaaaatcctggacctggacaatcggacccgcttcgttggggttccggaaaaggacgaaaagaacgacatcgttgcgcgtcacggtaacgcggctgagggaaccgccgcgctgcgagacgtagccggcccgtcgggttggcgagttctgatgcacaacccgcagatgcgcgaccggatcgcggaggttttgtcgttccgggaagaccctgtttcggtacgcgcgggattgatcgaagccggcctggaagaacccctgctcggcgcggtgatgctcggcgtcgaaaatggtacgttcgggaaattcagccgtgccggccacatctccgccaaggcggcgcgcgcgctgctggagccgttgcgccgcggccttgtgtattcggaggcctgtgaggaggtcggatacgaccactcggctcccgcatcggtttcgttggaggacgtgcgcaaccccgtcgcccgcaaggcggtcaccgagatgttgaagcaggttcgcgccattgttcaggcttacgggttgcccgattacattcacgtcgaactggcccgtgacattggcaagagcgccgaagagcgcgacaaaatcaccaagggaattgaggaccagaacaagaagcgaagcaagtcgcgcgaggaactggaagaattgctggaacgccgtttggtcggcgacgagttgcttcgctacgaattgtggaaggaacaaaacggctggtgcctctacacgggcgaacagataaagctggaatggatcgccgccgacgacaaccgggtgcagatcgatcacattctgccatggggccggtttggcgacgacagcttcacgaataaaacgttgtgcctggctagtgccaatcaggccaagaagaaccgcacaccttacgaatggtatgacgaggagggcctggactggccactgttcgcatctcgcgtggaagcctgcaaggaaatgaagggccgcaagaaaggcggattctatcttcgcaagaatgcccgagaagtcgaggagaccttcaggaatcgtaacctcggcgatactcgttatgccacccgtttgttgttgggcatgttggcgcgcttgtatccaagggcgatcgttttggcgcgacctggccagttgaccgcgaagctccgccgggcgtgggggttggacgatctgaaaaaggatgtgaacggaaagcgccttgaggatgaccggcatcatgcactggacgcgatcatcgtggccgcgaccaccaagtcaatgctggaccgccttacgatagcggtgcaggaggcgaggcggcttggactgccgaggggcttcgattttacgcaggcaccgccgccggcggcggggttccgcgacgtagttcgacaaacggtcgagaatgtcttcgtttcccgggccgacagacaccgtgcgcggggtgaggcgcacgcggcgacgatcaaacgagtggagacagttgatggggtgacgaccgttttcgagcggaaggcagtcgccaatcttactcttaaggatctggaacgaattcctatccccgctccttatggcaaaatcggcgacccgatgaaattgcatgccggcatgatatcagaactacggcaatggattgagaacgaaaagccgaaggatcaaatgcccaggtcgcccaaaggtgatttgatcaggaaggtgcgcatacgatccgatgataaaattgccgtcccggttcgcggcggcacagccggtcgtggtgaaatggcacgtgtggatgttttcggaaaacccaataagcatgggaagttcgaatactacctggttcccatctacccgcaccagatagctgaccgcgatatgcaaccacaccctcccaatagctacatcgttcaaggcaagccggagcgcgaccttgactccagtcacaccttccggttcagcctctactcacacagcctccttgaggtggtgaaatccgacggggtcatcattcgagggtatttcaagggactggaccgcgcgaccggtaacatcgccatcgctgctcctagaaattcccgcgacgttacgaagggcgtaggtccaaagactctggaacgattcaccaaactcaatgtcgatcgccttggtaacgtgaccgaagtcagaaatgaggtgcgtacatggcatggcgtggcctgcatataagccgccgcacgcgcctgtccctggccgataatcagatcgtcgccaaacaggacgagacggaagtacgcatccccatcgaggatgtcgcctggatcgttctggattcgccacaggtgacgctttccacggccctgctggccgcctgcatggatgccggagtagcggtgataacaaccgacgctacccacactcccagcgggttgacgttaccgtttcatcgtcaccaccgacaggccgaaatcgcggagatgcaaatcaacctgtcggcgccgttgaagaagcggctctggcagacactggttcgaatgaaaatcgataatcaggcatccacactgatcgcgtgcggtcgagatgcgcaggcgctgcgtgcgatgattcatctggtggggtctggagatcccgataataccgaggcgcgggcggctcgtgcttattggcccagactgtttaccgacttcgtgcgcgacgatgccacggacaagcggaacgcgttgttgaactatggctatgcgatcgtgcggtcggcggtggcgcgcgcgcttgtcgcggcggggtttatccccgcgttcggcctcaatcacgccagcgtcagcaatgccttcaatctggcagatgacatggtcgaaccgttccgtccgttcgtggaccgacaggtctggacgctgaccgcccagggcactgtcagcaagggcgaaagctccgtcgaagaacggcgaacgctcgcgtcgttgttgacagggacgacaagttttggttgcgagatagtttcgcttctcaccgcgaccgagcaagcggcggaaagtcttgtgcgcgcgatgcagacgagcagcgcggccgtgcttcaattgcctcgcgtgactgtgtgatgccgacaacggaggcacggttcgtgtggttattcgtattcttcgatctgccggtcggaacgaaaacgcagcgccgggaagcgaatcgattccgtaattttctcaaggacgatggatttatgatgctacagttttcagtatatgctcgggtctgcaagggcgaggatggcgcgacgaaacatgttgcgcgggttacacgcaatctgccaggccagggcagcatccgcgcattgcaagtgacggatcggcaatatgggagaatgcggctgttgctaggcgagttgaccaaaaccgagtcggttgggtcgcggcagatggtcctcctgtgatttctggcgcggcaaatcgccagaaatcacagaaattccaaaaacttagcgcagaggcagcctaccacagggaaatcggt

SEQ ID NO: 4299 - DNA, 10448 bp, synthetic construct
  misc_feature 1..10448: note = Synthetic
  source 1..10448: mol_type = other DNA
ccaagggcggcaagatgctggacgtgtcgatcacggtgtcaccgatgcgcgaggcgggggggcgcgttgtgggggcatcggtgatggcgcgcgacatcagcgagcgcaagcaggcggagcagcgggcggcgctgttgctgggcgagcttgatcaccgggtgaagaacattctggcgatcgttctggcggtggtgtctcaaacgttgaagagcagcccgtctccggaggcgttcgccgctgagatcgaggggcggatcaaggcgatcgcgcgggcgcatgggcttttgaccgaggcgggcgagggcgcgatgtcgttgcagacggtgctggagacggagcttgcgccctatgggcgggatcggaagacggagcctggggctggcgggaacatcgagattgcggggcctggcgtggcgctgacgccgaaggcggggctggcgctggcgatggcgatgcatgagcttgcgagcaatgctgcgaagtatggcgcgctgtccagctcgcaggggcggctgtccgtggcgtgggtggtgacggagcctgagggtgctgggcctgtggcatcggagcagggcgatcaggttctgacgttgagctggcttgagaccggggggcccgcggtgctgccgccgacgcggcgcgggtttggcacgatgttgatcgagcggacgatggaatacgagttcgatgcggaggtgcgtcgggagtttttgccgtctggccttcgttgcgtgttcgtgatcccgttgaccgcggaggttgggcatcttcgcgaggaaagccagctgggggaggcggcatgagcgggcgcggggcggatggcacgctggccggattgcgggtgctggtggttgaggacgagatgctgatcgcccttttgatcgaggacgtgttggtggagatggggtgtgtggtggtggggccggtttctggccttgaggaggcgttgcggctggcgcgggatgttgcgataccgatctcgatcgcgtttctggatgtaacgatcagagggggattggtgtttccggtggcggacgcgctgatggcacgcaacgtgccgttcgttcttgccagcggttatggggcctgggcgttgccggagcatttgcgggcgctgccgcgattgagcaagccgttctcccggccggatctggaggcgcaggtgcgggcgctggcggcgcgggttgggacggacggctgatcgttcggcgcgtgccgggcggagggttgactgccgacagaacacagcattgtcatgaactttacacgatgcgatggcgcgcgaacaatgatggtgatgctatacgacctttgcgattggtgttacgaattcctcaccttcaagcgggatctgacaatgagcgatcatcatacgaccgacgctgttcacaacaatcacgcccatgaagcccataacgcgcctgacgccaacggccacgcggatgaggcgaatgccccaggctcttccaccggcggctggatgggcaccgatgcgcagaccgcgattgcaacggccggcgtgatcgttattggcgcggcgctgatcgaggtggcgttgatccccggcatgattgtgggcgtggctgcggcactggcgccgaaatacgtgccggcgatcagcgagaatcttcggcccgcgttccgttccatcgtgcgtggcgcctacaagttcggccgcaaggcgcgtgaggcggcggccgaggcgcaggagcaggttcaggatatcgtggccgaggttcatgccgagggcagccaggccgcttcgaccccgccggcttcgccgcacgcttgagcgggccgaatttgcggggcgcgacgatgagcgacaaggccggcgcggcgaagaagccacgcaaggcggcggcgaagggcaagtccagattacgggctgaggcgatgccggaggaggtgctgagcgccccggcggccgcttcggcggagcctgaggctccggcggtgacggcggccgttgtggaaccggtgctgcatgaggcgcatctggtgcatgcgacgtatggccgcgtgcggcttcgggttccggcggcgcggggcaatgcgggtttgctgggtgagattcgggcggcgttcgacgggcatgtcggcgttgacaaggttgaggtgaagccggcggcccacagcgtggtgatctattacgacgccgagcatcacgccgatatcggggcgttgttcgcgagccttggcacgaccaaggcgccggcgcggttgccgaagatgaacgggtcgcatccgcatcatgagatgcatcacgcgcccaagaccgagcttgatgagaaattgtccaagttcgaggaggaggcggagtttctggccgagcactcgcatgttgcgcggaccatcgtcgacaccgtcaaagggctcgaccggcagatcaagcgcgtgacgaataataaccttgacctcaagatcctggcgccggtgggtctggcgggctttacgtttctggagatcggtgcggcggcggcgacgccgatgtgggtgacgctgatgatcttctcgctcaatcacttcgtggagctgcgggcgcataccgcgggcgaggacgacgacgacggaccggtggacgtcgacaaggacgcgacggttgcgaccgccgccggctgatcggcccaggcaggacgcagcgacctctcaccagacaggtttgattgcagcgtgaaatacacggtcagacattggatcccggggcggatccgcctgcatattcccgcacttgagcagcctgggttggccacggggccgattgccgagtggctttcggcgcaggatggcatcaaggcggcgcggatcaaccaggcggcggcgacgttgcttgtggagtacgacgaggcgcatcgaggcgagatcgacgggttgttggagaccttgggcgagatttcgctgcgggatctgcgcaatctgatggcgttgacggcgaagcctgcggccgttgctgcggcgccggccaagccgaagccgaagccgggggcgcagattctggctttgccgactgtttcgctggggctcgcgctgtcggccaatccggtggcgttggcggtgaatattccgctgatgctgtggtgcgcctatccgatcgcgaagcgcgcgtttgggatcatgcggcgtgagaagcggctgaatgtggattttctggacacgctggcgatctcggcctcgatctttcaggggttgatggtgacgggggggatcatcacctggctgatccggctgggggattggatccgcgatctgacggcgcagggatcgaagaaggccattgcggagctgatggagttcgagacgcgctcggcctggaagctggagggcggcagcgtgcgggcgattcccgcgatgcagctgcagccggatgatctggtggtggtgtatccgggcgagatgatctcggtggatggggaggtggttgagggcacctgtatggtggaccagaagaccatcacgggggagagcctgccggtctcgcggggcaagggcgagatggtgtttgcggcgacggccattcgcgaggggcagatcaccattcgggcgacgcgggtggggacgcagacggtggcggggcagattgccatgctggtggacaatgcgccgatcggcgatacgcggatgcagaaccatgcggagcggtttgcggaccggttggtggcgccttcgctggcgttggctgttgggtctgccgcggtgacggcggatttcaatcggttcctttcactggtgatcatcgattacgggaccggcattcgcgtggcggcgccgaccagcgtgttgtcttccatgacgtatgccgcgcgctccggcatcatcatcaagagcggcgggcatatggagaccttggcgaaggtcgataccgttgtgttcgacaagaccgggacgctgacgcatggcacgccggaggtgatcgacgtgatcggctacagcaaccggatctcgccggattatctgctggggctggcggtggcggcggagagccggttgacgcatccggtggcggatgcgctgcgggcggcggcggtgcggcgggggatcgaggtgccggtgtgcgatgcgccggactataaagtggggcttgggatcgagggccaggtgaacgggcattatgttcatctggggagcgagcggttcctgcggcagagccagatccgggtgcagcaggcgagctccgatcgcgcgtcgctcgatgagcacgggtattcctgcctttacatggcggtggatgggaagctggcggggattattccctatgccgaccagattcggccggagagccggcaggttgtgcagcggctgcatgagatgggcattcgcaacacggtgatgctgaccggggacaacgcgacggtggcgcgggccgtgggtgggcggatcgggttgacgcggcagtatgcggacatgatgccttcgggcaaggcggaggtgatcgcgcagcttcagaaagaaggaaatgttgttgccatggtgggcgacggcatcaatgactctgtggctctcacgtattccgatgtcgggattgcgatgcggcatggcgcggaggtgacgcatgaatcggcgcatgtggttctgatggaagacagcctttggaagctggtgcaggcgatcgaggtgtctcggggtgctgtggggctgatcaagcagaattatgggattgtggcggtgttgaacacgctggcgctggggctggcgttgccgggtgggctggtgacgccgacgttcacggcgattctcagcaacgggtcggccattctggccagtcttaacgggttgcggcctgtgcttcggggccgatgagcggggcggttgccggtctgcccggggccgaccagcgggcgctgccacccgcggaccagcttgcgcttgaggaggctgttgctttgttgcagcagccgcggtttgcggttcggctggcggggttggcggggaagccgttcgagggggcggcgaagattctgccgcgcgccaacgggttgctgcagcgcgcggttgagcgggcgatgctggagtgtttgacgattgccattgagtctcgggtgggggcggattttgcgccttcggcctggcgggcgaaggcgttgaccgggatttccggcgggatcagcgggttgttcggcggcatgctgctgccggtggagatgccgttgacgatcacgctgatgctgcgggcgatcagcgatattgcgagccatgagggggaggatctgcggcgcctggaggctcggtttgcctgtttggaggtgttcgcgctcagcgatgtgcggggggtggaccggcgggcggggcctgctggggtgatcgggtattaccatgtgcgggcgacgcttgcgaagctttcgggcgccgtgctggcggcgatggtggagcggggggcgctggatacggcggcgccggtggttgcgcggttggtttcggaggtggtgagccggtttgggattgtggccagcgagcgggcggcggcgagcgggttgccgatcctgggggcgatcgggggggctgctttgaatgtgattttcaccgatcatttcgagcggatggcgcgggggcattttgccattcgcaggcttgagcgggcttatggggctgagcgggttcgggggttgtatcgggtggctttgggttaaggattctttcccgagcgataaacacaaaaaattccggcaatcactactgattccggggcgccgcatcggccaaacaatcaaagaacaatttctagatttaatacgcccggagcatctctgctccgggagcactatttacagtggttcgaaaaccaccttgccgtggctttcctaccgatttcccgtgctaacaaaatcattgattcgcatgtggcgtcaagcacgcattacgatcatgcattgttgacggagttttttgttgcatgatcgttcttggtttggatggtgggatcgcatctatcggttgggcgctgattgatgaggccgagcagcggatcattgcgtgtggggcacgatgcttcgatgcaccggagacggataaggaccgggtgccgaccaatcagataaggcggcagaagcggggcatgcggcgactgatcaagcggcggcggcatcgcatgcgggatatcaggcaacttttcgcggctcatgggctgcttgagcatggcgacaaagatgcgttgacccttggcatcgatccgtgggcagtgcgcagcgatgggctggagcgtgttctgacgccggccgaacttgccgcggcgcttgggcatatcgcggcgcatcgggggtttcggtccaatgcgaaacgggaccgggcggcgaatgctgcggacgatgcatccaagatgctgaaggcgattgatgataccaggggcaagctgacgcgttaccggacggttggtcagatgtttgcgaaggacccggactttgccttacgaaagcgcaaccggggcggcgattattcgcggactgtgaagcgggacgatcttgggcacgaggtcgcggttctgttcgagacccaacgcagacttggcaatcttgttgcgtccgaggcattgcaggaagacttcgctcggatcgcgttttttcagaacccgctgaaaaacagtgatgatctggtgggaaactgcctgttcgagcgcactgagcggcgcacggcgcgacgctcgccgagttttgagttgtttcgcctgctgtcgcggctgaacgcgctggagttggtcacgccgcatggcaaacaccgcttcaagccggatgaactccaaacgatcgttgcagatttcggtacgacgaagggcgtgacgttcacggcggtgcgcaggttgcttaagctcgacgcggccacgcgctttgccggtgttgggccggacgacgaaaagaatgatgtggccgcacggtctggcaaggcgttcgaaggcagtgcgaacctgcgtgatgcgctgggggaggccctgtgggccgcctgtctcgccgcgccagagattttggaccggatcgcggaaatcctgacgtttcgcgatgacgaggacgagatcagggcgggtcttgccgagatcgcctgtgaggccgctgtgatcgatgcggttatgaaggggctggccgctggcgcgttcacctcgttcaaaggaaccgcgcggatctcggccaaggcagcacgcgccattgtgcctggtttgctgcgagggctggtctattcggaagcatgcgcagacgccggttatgaccatgcggccgcgcgagtcgttggcatcggtgatgttcgtaatccggtggcacggaaggcgctggcagagatgatgcggcaggtgcggaccatcgtcgcgaagtatgggcggctcccggatcgcattcatgtcgagctggcacgtgacgtgggcaagagtgctgaggaacgggacgagatttcacgcggcatcgagaagcgcaacaagcagcgtgacaaggcgcgcgagcggtttcgagagaagctgcggcaggagccgtcggcggaggagttgctgcggtttgagctgtgggaggagcagaacgggcggtgtctctacactgatgactgcattccagtgaccgagttggtctcgtccagcaatgttgtgcaggttgaccatattctgccgtggagccgtttcggtgatgactcctatttgaacaagacgttgtgcttcgcgagcgcgaatcaacggaagctcgatcgaacgccctttgagtggttttcggcagaaaagacagcgaatgattgggtgcgcttcgagcgtgctgtcgaagggtgcaaggccatacgaggggcgaagaagcgcggcttttatctgcgccagaacggtgcggaggtggccgagcggttccgcaatcgtaaccttggcgatacgcgatacgccacgcgggtgctgatgggacttttggcacggctctatccgaaagaaggggagcggcatgtgctggcccggcccggggcgttgacctccaagctgcggcggggctgggggctgcaaggactgaagaaggatgaagacggcaaacgtctgcccgatgaccggcatcatgctttggacgctatcgttctggcggtgacgaccgaaagcatggtgcaggggttgacccgtgcgtttcaggaggcggaacggcgcgggctggcgcgggactttgctggtgaggcgatggtcgatccttggcccggatttcgtgtccaggccgaggaggcggttgctcgcgttgcagtctcccggcccgagcggcggcaggtgcctggcgaggcgcatgcggcgacgattaagcaggttcgtgtggtggacggcgcacaggtggtttttatccgcaaggcggtagaggcgctgacggagaaggaccttgagcgtgttccggtgcccgcgccttacggccggatcgccgatccggcgaagctgcgggccgcgatgattgaggcgatccgggcgtgatgggcgaacggcaagccgaaggatgcgatgccgcagatgccgaacggggatgtgatccgcaaggtgagggtgcaaagcactgacaaggtggcggtttcggttcgcggtggtacggcagatcgaggggacatggcgcgggtcgatgtgtttcgggagattgatcggaaggggaaggttcgttttcatttggtgccgatttatccgcatcagcttgccactcttaaggaaccgccgaatctggcgatagttcaaagtaaaaatgaggatgaatggacgaacgtaaggggtccggaatttgatttcctctttagcctctaccagaacagcctgattgaaattcagaaatcaaaagggccgatggttcgcggctatttcaagggggctcaccgaggaacggctgcgttatcgttggctacaatggtatcgcctaccgacttgacggacggcattggttccaagacccttttagatcttcggaagcttaagatcgaccgtttgggcatcatcagtgttgcaccagaggagcctcgaacgtggcgtggcgcggtctgcacataacccaggcggcgcggctgtctctggcggacgggcagatcgtaatcgatcaggccgacggcgccgtgcgtctgccgctcgaagatatcggatgggttgtgatcgacacgccgcaagcgatcctgacgacggcgttgattgcggcccttatgcaccacggcattgccgttgtgaccacagacgcgcggcatactccttccggcatcatggtgccgtttcatgggcattaccggcagggcgcggtcgcggcaattcaggccggggtgtccgtgccgctgcgcaagcggctgtggcaaagcgtggttcaggcaaagatcgcgaatcaatcagcggctctcggtcgatgcgggggcgatgggcgggcgctgtcggccatggcggcacttgtggggtctggcgatccggcgaatgtcgaggcgcgggctgcccgcgcctattgggcggggctttttcccgattttcggcgtgaggacggcacggaccggcggaacatgttgttgaactacggctatgccgtggttcgggcctgcgttgcgcgggcactggttggcaccggcctgctgccggcttttgggatcgggcacgccggtgcgagcaacgccttcaacctggcggacgacatggttgaaccgttccgtcctgtggtggacgttgctgttcatgcgatgtcggatggcggttgccgccgggatggtgaaccggagcggggagaccggcagcgactcgcggccttgccactggaacccattcggatggggcatgagaccatgtcggttctggccgcgacggaagcggtcgccgaaagtctggtgcgcgcgatggaggcgaggaagaaagagaagttgatgcttccggcgctgtgcccccctccatgaagccggaggacgctcggttcatgtggctgttcgttttcttcgatctcccggtgggcacaaaatccgagcgtcgggacgctggcaagttcaggatgtttttgaaggatgacgggtttctgatgctgcaatactctgtctatgcacgactctgccggggggaagacggtgcggacgtgcatatcaggcgcgtgacgagcgggcttccggcgaaggggagtgttcgggcgttgcttgtcacggatcgccaatacggtcggatgcggttgcttcttggatcgaaggggaaaaatgaagccgccgcgccgcttcagatggttctgctgtgacttcgggcacggcaaggagcccgaagtcacagcagaatcagcatgttatcaaagagcaagcctaccacggggaaatcggtagggaagccacggccagtaggcatggcgatgacgccagttgaggagcctaccacggggaaatcggtagggaagccacggccggcgtgagcacacaccttgcgcagccttgagcctaccacggggaaatcggtagggaagccacggcctttttggcatcgccccgaccgcaaacagcagcctaccacggggaaatcggtagggaagccacggcgaaga

SEQ ID NO: 4300 - DNA, 9312 bp, synthetic construct
  misc_feature 1..9312: note = Synthetic
  source 1..9312: mol_type = other DNA
tcgctgtcccgccctcgctgtcccgcctgggccgtcacgacgcggcccggtcgccggcgcccgctgcgtccgggcaggaagccggctaacgcccggcggcggcctgctccaggccgtacagcgccgcgcccagcagagcggcctggcaggtgatcaccctgaccggaattcgccccagcagctcggcgaatcgccccttgctgacgaaggcgcgcatgaagcggccgtcgtcgagctgcggcaggatgcgcggcgggatgccgccacctaggtagaggccgccggtcgccagcaccttcaacgccaggttgccggcctcggcccccatcgccttgatgaaaacatccagcgtcgcggcgcacagcgcatcgggcggctgcgcctgcgccgcccgcacgatcagcggcgtgcgatcggcggcggcggccagcgcggcggcgaaggccggcgcctccggcgcgtggccgctgtcgcgcaggaaatcgtagatgtttggcaggccgctgccggacaccacgcgctcataggcgacatgaccgtagcgttggaaaagataatgccacaggcccgcctgcagcgcgtcggccggggcgaagtcggcatggccgccctcggacgagccggcggcgtagcggtcgctgtgccaggtcaggaacgcctcgcccagcccggtcccgggcgcgatcacgccgatgggcccgtgcggctcggcttcgccctggttgagcacgtgcacgtcgtccggccccaggtgcggcacggcgtaggcaaccgccttgaggtcgttcagcagggtcacgcgctgcaggcccagcgtctgctgcatcgcgccttcgtccagcacccagggcaggttggtcaggtgcgcccgcccgccgatgaccggccccgccacgtcgaggcaggcgaagctgacgggacgcctggtctgcagcatgaaattgcgcaggatcgcctccaggctgggatagtcggcgctgacgaactccgcccgggcgagcggctggcgcgggccggcctcggccgtgaacagcgcgagcagggtcttggtgccaccgacatccccggcgatcagcatccgcttcgttctccctccgacgacgagcctgccgcgagcctgcgccacctgccggagcagatcaacgccgcagcgcactcgatccggcagcgcgacgcagacggcggcggcagcgggaatcggcgtgccggccgacggtgacgatgcaatcaggaaacggttgccgccaggctgcccgttgacacagatcaacgtcccgtcgccgcccgcgttctatcaatgaaatcaggtacatgaccgtgaggttcggccgtggtggacgccatcgccaggactctgacacggttgcccatgccgctgctgctggcgggtgcgtttctggccgccgccgtccgggtccggcggcgcggcttccgcaagcggccgatcctgcggttcgccgagcgaatgggggcgttactgggggtggagtgacgaccaaaaagaatccccccggtgctgcgagcaacgccgggggtaatccttcagtgatgaaaaccactttgccgtggctttcctaccgatttcccaaccgctagtcttatgtaatgatgtggccctgtcaaggccaattcgtccaaaaaggaaaattccatgcgtattctgggaatcgatggcggcatcgctacgatcggctgggcggtgcttgatctcgataccgaggcggccacgttgacggttgtcaacgcggggacgcggagcttcgatgcgcccgagacttccaaggaacgaacgccaaccgctgccgtccgcaggctgcatcgcggccaacggcgggtgatccggcggcggcggcagaggatgaacgagatccgccgcctgttccacaccgccgggctactgccggcggcgaaaagcgatgcgctcggccagaaaggtctcgatccctgggcgttgcgggccgcggccctggaacggacactgacagggccggaacttgccgttgccctcggccatatcgcccggcaccggggcttccgctcgaacgccaaacgagacgcggccgccaatgccgccgacgaaacatcaaaaatgaaaaaggccatcgcggcgacacaggagcggctgcaaggctatcgcaccatcgggcagatgttcgccaccgacgacgcctacagggaccgcaagcgcaacagaggcgattttacccgctccatcctgcgcactgaccaggaaagcgaggttcgccagatcttccgggaacagcgccagcggggcaatcccctggcatccgaggaactggaagcggacttcacccacatcgcgttcttccagcgcccgctgcaggacagcgagcacatggtgcagtcctgcccgttcgaaccggccgaaaagcgcgccgcccggcggagctatgcgttcgaaatgttccgcctgctgtcgcggctgacggccatttcgctgtcggcaggcggacaggagttgcgcctgactccggaacagatcgcccaggttgccgaggatttcggccggaccaaaggcatcacctacaaatccgtccgcaagaccctggatctcgacagccgcacccgcttcgtcggcgtatcggaaaaggacgagaagaacgacatcgtcgcccgccatggcaacgccgcggaagggacccacacgctgcgcgagatcgtcgggccgtcgggctggcgcgtgctgatgcacaacccggtcatgcgcgaccgtattgccgaagtcctgactttccgtgaagatccggcttcggtgcaggccgggcttgcggaggcagggctgcaggaaccactgctggcggcggtgatgcaaggcgtccaatccggcgcgttcgccgaattcacccgcgccggccacatctcggccaaggcggcacgcgccctgatcccgtccctgcagcgcggccgggtctattccgaagcctgcgaggatgcgggatacgatcacaccgcccgcgccgcagtctcgctggaggacgtgcgcaatccggttgcccgcaaggcagtctgcgagatgctgaagcaggtccgcgccatcgttcaggcttacggcctgccggacatgatccacgtcgagttggcccgcgacatcggcaagagcgccgaagagcgcgacaagatcagcaaaggcatcgaggaccgcaacaagcagcgtgaaacagccaggaaagagctggcggatttactcgagcgcccggcgaacgacgaggaactgctgcgctacgaactgtggaaggagcagaacgggcgctgcctttataccgatacggcaataccgccgcactggctcgccgccggcgacaaccgggtgcaggtggaccatatcctgccgtggagccggttcggcgacgacagcttcatcaacaagacactgtgcaccgccaaggccaaccaggacaagagaggccggacgccgtttgagtggttcgaggcagaaggcctggactgggcactgttcgcgacccgcgtcgaaggctgcaaggagatgaagggtcgcaagaaaggcggcttctatctccgcaagaacgccaaggaggtcgaggagacgttcagaaaccgcaacctgggcgatacgcgctacgccacgcggctgctgctggacatgctcgcccgtcagtatcccaaggacgggtcccgccatgtcctggcccggcctggccagttgacggccaagctgcggcgggcctgggcgctggatgacctgaagaaaggcccggacggcaagcgcctggaggatgaccgccaccatgcgctggacgccatcgtcattgccgcgaccagcgaatccatgctgaaccgcctgaccaaggcggcgcaggaggccgagcggcagggactgccgcgcgggtttgatttcacgcagatcgacccgccggcggctgggttccgcgaggtcgtgcgggatgtcgtccgcaacgtcttcgtatcccgggccgaacggcgccgcgcgcggggcgaagcccatgccgccacgatcaagcgcgtggagaccgtcgatggggtcgctacggtgttcgagcgcaaggcggtcgaggcgctgacgctgaacgacctcgcgaacatcccgatccccgatccctatggaaaagttgtcgatccggcgaaactgcgcaacgagctagtggaaagcctgcgctgctggatcgaggccgggaagccgaagaacgcgccaccccggtcgccgaagggggacgtcatccgcaaggtccgcttggcgaccaaggacaaggtcgcggttccggtgcgggagggctcggccgatcgtggcgatatggcgcgggtggatgttttcgccaaggccgacaggaaggggaagctacgccactatctcgtgccaatctatccgcatcagatcgccgatcggcagacttggccggaaccgccgaaccgggcggtggtggccgacaaggccgaggcggactgggctgtggttgattcggactatgaattcctgttcagcctgtactcgcacagcctgctggaagtagcaaaagctgacggggtcgtcctgaaagggtatttcaaaggaatggaccgcagcacgggtgcgattgcgattgctgctccagagagtccacgggcgttgaccaggggcattggcgccaagactctggcgcatttcagaaaactccaggttgatcgcttgggccgtgtgacagcggtcaataaggaggtacgcacatggcatggcgtggcctgcacgtaagccggccgacccgcctgtcgctggcggacaaccagatcgttgccaggcaggacgagacggaggcacggatcgcgatcgaggacatcggctggatcgtcctcgactcgccgcaggtgacactgtcaacggccctgatcgcggcctgcatggaggccggcgtggcggtcatcaccaccgaccggacccacacgcccagtggactgctgctgccgtttcatcgccatcaccggcaggcggaaatggcggccttgcaggccgggctgccattgcctttgaagaaacggctctggcaggccctggtgcggacaaagatcgacaaccaggcggcctgcctggccacctgcggacaggatgcaaccgccttgcgcgccatggcacatctcgtcgggtccggcgatccggacaacgtcgaggcgcgggcagcacgcgcctactggccgcgcctgttcagcgagtttgtgcgggaggacgatacggacaagcgcaacgccctgctgaactacggctatgccgtcgtccggtccgcggtggcccgggcgctggtcgcggcgggcctcgttccggcattgggacttaaccacgccagcatgaccaacgccttcaatctggccgatgacatggtcgagccgttccggccgttcgttgatcggcaggtatggcagctttcggcaaaaggaacggtacggaatgggcaaacgacggtcgaggagcggcgcacgctggcctctattctgacagaaacaacggtcttcggcacggataccgtgtccttgctgacggccaccgaacaggcggcggagagtctggtgcgagcgatgcagacaagcagcgcggcggtgctgcagatgccgcggatggtcgcgtgatgccggaggcggaggcgcgtttcatgtggctgtttgtgtttttcgacctgccggtagggaccaaggttcagcgacgcaacgcaacccggtttcgcaacttcctgaaggatgatggcttcatgatgctacagttctcggtctatgcacgggtctgccgcggcgaggacggggcaaccaagcatatcgcaagggtcacccgaaatctgccaagcgagggaagcgtacgggcgttgcaggtgacggatcggcagtacgaaaggatgaaattgttgctcggtgaggcgacaaaaaccgagtcgcttggctcgcgccagatgattctgctgtgattttcgaggtggcaaatctcgaaaatcacagcagtttcagtcgcttgttgtgctccgatcctaccacagggaaatcggtagggaagccacggcgaagatgaccgaggggcgcaggtggcgctcatcctaccacagggaaatcggtagggaagccacggccgcaggccgtcggcccgggcacaatcacccatcctaccacagggaaatcggtagggaagccacggcgtcatcccggagcacccgcgccacccgaacatcctaccacagggaaatcggtagggaagccacggcctggcccgcgcggccctgcgtatgcggacaatcctaccacagggaaatcggtagggaagccacggcctgtcggcgcgggttctgcagccggctgtgatcctaccacagggaaatcggtagggaagccacggcgccggccatatcgttctcctctacattctcatcctaccacagggaaatcggtagggaagccacggcgtggacaccgccgctgtgggcgacgcggtgatcctaccacagggaaatcggtagggaagccacggcagactcacaagcgccagtctcatattccttatcctaccacagggaaatcggtagggaagccacggctcggaacattatgttgtggcaatcgccgtaatcctaccacagggaaatcggtagggaagccacggccgcgtaaatgtccttgatgaactggccgagatcctaccacagggaaatcggtagggaagccacggcctacaccgccctcaccctgccgcccgtggaatcctaccacagggaaatcggtagggaagccacggcgagacaatcgctttcgctaacggagagtatatcctaccacagggaaatcggtagggaagccacggccggggttgtataccgcccccatacgtccgtatcctaccacagggaaatcggtagggaagccacggcgctcacaacgcgcggctggatacgatggcgatcctaccacagggaaatcggtagggaagccacggctccgccaatcaaacaatcaaagcatggccgatcctaccacagggaaatcggtagggaagccacggcccccgccatcttcggaccatgggccagataatcctaccacagggaaatcggtagggaagccacggcacaacgcccgggcaagccggaggctttcggatcctaccacagggaaatcggtagggaagccacggccggggttcggtgccagacggtgacaatagtatcctaccacagggaaatcggtagggaagccacggcctgacatttctggtgccctttcgtggtttgatcctaccacagggaaatcggtagggaagccacggcacgaagctgcctattggcctagcgcactgtatcctaccacagggaaatcggtagggaagccacggcgaggtcaaccgtcttgtcgttggggccgaaatcctaccacagggaaatcggtagggaagccacggcgacatgggtgaagtcgaagccgttcgggaaatcctaccacagggaaatcggtagggaagccacggctcgcgtaggccaacatcgtcggctcggtggatcctaccacagggaaatcggtagggaagccacggcttcaagacggccgtcatcgacaagctcaagatcctaccacagggaaatcggtagggaagccacggcccacgacttgacggtgacctgaacgtctgtatcctaccacagggaaatcggtagggaagccacggcacggcgcacgcggtcaaaacatcccgcaagatcctaccacagggaaatcggtagggaagccacggctcatgtcacgtgctccaaagcgtttcgatgatcctaccacagggaaatcggtagggaagccacggccgatgatgcgaagtcgtgcgggatgtattgatcctaccacagggaaatcggtagggaagccacggcgacaccgtccggtggcgggagggggatttatccccctcccgccaccggacggcatagctgtcgcaccggctgacaaggcccatcttgactccccccgccccctcggccaaagccccgccatgcaatcccctggcctgatcgacctgcaggtgaacggctacgccggcatcgacttcaacgatgccgccctcacccccggcgcgctcgaccacgctttgcgcgccatgctgcgcagcggcgtcaccacctgcctgcccaccctggtcaccgccgacgagatcaccctcacccgccgcctcgccgcgctcgacaaggccgtcggcggcagcaagctggggcggctgatggtgccgggcttccacctggaaggcccgttcctcaaccccgcgcccggctacgccggctgccacaacgccgccgccatggtggcgccggacccggcgctgctgcaccgcctgggccggcacctcaagcggccgatcctgctgctgactttggcgccggagcagccgggggcgctggcgctggtcgccgaggcgtgcgcccgcggcatcgccgtcgccatgggccacaccgccgccgacgccgagaccgtggcgcaggcggtgcaggccggggtgacgctgagcacccacctcggcaacgccctgccgcagccgcagccgaagttcctcaacccgctgatggcgcagctggcggcggacgcgctgcacgccagcttcatcgccgacgggctgcatgtcccgccgccggtgctgaaggtgctggtgcgcgccaagcgtcggctgcgctcgatcctggtcaccgatgccaccgccgccgccgccgcgccgcccgggcagtacggcttcgccggccaggcgatcgagctggccgcggatggcgccgtgcgctaccccggcaccgccagcctggccggttcggctttgcggctggaccaggcggtgcgcaacgtggtcgcctggggcatcgccgacgccacctcggccgtggcgatggcgacgctgcatccggcgacggtgctgaccccggccctggcccaccacggcatcgccctgtcgcccgccgccgtcacctggaccgagacgctgcagcccgagtcggtgatcctcgggggcacgcattttcccgccggctagagcgttttcagcccgactggaaacgctccagctcataatttcacgagcaatttcatcggcctgaaatcgctccgcgatttccagtcaggccgatattgctctagaaacctttcgtttaccatttcgcgctagtgtccccgccgcgaagagcgcgacggtgtcaggcctggtgggcagaacggaccattccctggcttactaacaagggaaaggtcggacagcagccgtgatgacgtgttcccacgcgccgcggtcaccgggccgcgccgtgatgcccgccccgccggccaccaccatgcccgcccccatac

SEQ ID NO: 4301 - DNA, 9097 bp, synthetic construct
  source 1..9097: mol_type = other DNA
  misc_feature 1..9097: note = Synthetic
tgaccgtttgctgtgcgctctccccggagggctcggagcaaacggatagaagttttttggttctttttttcaaaaaaagaaccgcttccttatcttctacgcgctcgtatccaccggcgcgatctcccgcggcaacccgttgcggtagctgtaattgctcccggccgcatcgccgtgtggcaccgtgcagccggcatagctgccgtcctcgaaatggaaatgcgcccggtgatcctccacgctcccccacaccgttccgatctggtgatagtgatactgcaccgcccggcggcgcgtattggaggtattgggcgcggtgtagtggtggatcagcccgtggaacaccagcgcatcgccgggctgcatctcgattgccacccgctcgtccttccgcagcttctccggcacgatctggcacaggttgaagtcattctcatgcacatgcggcaccccgccgccgagatggctgccgggcaccagctccatgcagccgttcatctgtgatgcctcatcgagcgcgatccacacgccgaccacgagccctgggtccttgatgcggaaataggaggcgtcctggtgccacggcttttcgctgccgatcctcggcggcttcaccagcgccatctcctggaacagcacgcgcccctgtccgagcagctggtcgagcaccccatgcaggcgccggctgaaggcggcggctttcagcgcgtccgatgcctcgcagaaatccatgtatttacggatggcgaactcccgctcctccggcgtcatccgctccacatcgatgccggtctcatacatcaacttggtatcgccggcgggaatgcggcccagcgcgaggtcggtcagcgcatctttgcacgcctcgatatgggcggggccgagcagattgcggaccacaacatagccgtcgcggcgatactgcccgatctcggcggcggtgagcaaagcgaggtcctggctgggggcgatgtccattgcggttcctccaaagcgattttccgcaccatggcgcaaattcaacttcgcgtaaaacgcttggcattgagccgcttctgtcactaacctcgcctcccaacccgaggcgcccgcatgagcagctccctccctccggcccgcggcaatgcgccgcatgatcgccgccccatcgtgctcacctcccaccccaaccagggcggcggccaactcgcgctcaagtggggagcacccgaccccgacacccgcggccccattgtcgccaccctcaacaaccccggcggccgcaacgccatcggcacccattccggcgcctactccctctaccgggcgctggccgtcgccgccggccagctcgacgcgctgcaccggccggacctcaccaacaccgcccccgcggccgagatcggccctttcccgcaatggggcgaccccgacaagatcgtctcgctcgatcccttcggccacatggtcggccagatcttccccgaggccctcgccgccggatgggacgtccgccccaccatcgcgatcaccaaagcccgcatcaacatgccggaaatccgcgacgccatcgccgccttccgcctcacccccgatggcgacatcctcacccaagccggtgacgcccgggtcaccaaggtcgccatcgagccggtctggcacctcccaggcgtcgcccgccgcttcggcatctccaccaccgcactgcgccgcggcctgttcgaacagaccggcggcatgttccccgaactcgtcacccgccccgacctcgacatcttcctcccccccatcggcggcatgaccgtctacctcttcggcgacaccacccgcctcggcaaaccagccaccaaaatcgcctgccgcgtgcatgacgaatgcaacggctccgacgtcttcggctccgacatctgcacctgccgcccctacctcgcccacggcatcgaagtctgcatcgaaaccgcgcaggccggcggcgtcggcgtcatcgtctacaaccgcaaggaaggccgcgccctcggcgaggtcaccaaattcctcgtctacaacgcccgcaaacgccaggaaggcggcgacagcgccgccacctacttcacccgcaccgaatgcgtggcaggcgtcaccgacatgcgcttccaggaactcatgcccgacgtgctgcactggctcggcatcacccgcatcgatcgcctcgtcagcatgagcaacatgaaatacgcccccatcgtcgatagcggcatcgaggtcgtcgaacgcgtccccatccccgacgagctcatcccggccgacgcctccgtcgagatggacgcgaagaaggcggccggttacttcaccaccgaggtgcccggcgaggatgaactccgccaggccaagggacgagggctggaagaatgaacgacaaaaccatcgtgctcgatcacccgctgatccagcacaagctgaccctgctgcgcgacaaggacaccagcaccaccggcttccgccgcctcgcccgcgaactctccctcctgatggcctacgaagtcacccgcggcctcccgctcgaaaccatccgcatcgaaacgccgctggaggcgatggacgccccccaactctccggcaagaaactctgcttcgtctccatcctgcgcgccggcaacggcctgctcgacggcatgctggaaatggtccccggcgcccgcgtcggccatatcggcctctaccgcgacccccacaccctctcccccgtcgaatactacatcaaactccccgacgacatcggtgaccgcctggtcatcgtggtggaccccatgctcgccaccggccactccgccgccgccgccgtcgcccgcctcaaacaagccggcgccacccagatccgcttcgcctgcctcatctccgtccccgaaggcctcaaagccttccacgacgaacacccggacgtggatgtctacacctgcgcgatcgaccgccaactcgacgaccacggctacatccgccccggcctcggcgacgccggcgaccgcctctacggcaccaagtaagccaacccaaggaagcgtcttctttctttgaaaagaaggaagcaaagaaactttcacccgttcactgccccctctcccgccctcacgagcatggcagcaaagctgaccaggaccggagtgaagtccccaccgccgcccccttctccctctcccgcgttcgcgggagagggtcggggtgagggtggttcaacccgaagatttttgctatttcatacgatatcggaacaataaagacacaccaacccacctcaatcccgcggcaaccgcctaggcaacaacctcatcggccgcccctccaaattcggataccaaagcgccgcctccctctccttccgcgtaacccgcttcacccgctccctcaccggccgcgccctgcgcacccgcttcggcaacttcggaatcgatgccggcgcaatccccaacatatggcacaacggccgcaacatccgcgccgcctgcggatacagcgcaataatccccgccacatccggccgcgccagcaaattctccaactgccccgccaccccggccgcccgataccccgccgcatcaaccacccaggcccgctgcatcggcaaccgcacccgcgccccatcccgcacggcatccttgcgcaccgcccgcacccgcttcaccggcggcaccatcgtgcccgcctcatgccgcgccaccaaccgctcgaaccgccgcaatacccgccaggcataatccgcaaacggccccaacatcgccgcccgccgatgcaacggattcccgaaccccaacaccccacgcagccgcgtaatcacgtcgcgcagcagcgacgcaatcagcacgaccggcaaaggggttggatcggcgaacatgaaaatcataaattctttctaacctgtctgtttttgccggtcaagagaaaaattgcgctatctctagaaaaatttctggccacccgccaacgcaacccaccacccccggataaaccctctcctcccgccctcgcgggaggagagggttgggtgaggagggcggcgccacacgcgataccccgcacagcgcccccaccccccatcacctccgcttgagccccaacggcaaactgccataagccaccgcatgcagcccatgcagcgccgaaatcccgccaccagccggccccgcccccttcggctccggcaccggcaccgtgctcgacgaaaaccccggcctcatctgcctcatatccttggccgaaatcttcttcggctcagacacaatcagcagccccttgccctgctgaatccgcggtagattacccatgatgccctccttggcatgttgaaacgccacggattatccacctaggatttttcgctgcaaacgaatttcggagcctcgtcaaaaaaattctcgcctacccccgcgtcatcgcgaggcacaaccgaagcgatccagccacgccgcaaggagatttcggcaaacaacaaaaaaaccccgggccatcgctgacccggggtagcttttacagtggttgaaaaccactttgccgtggctttcctaccgatttcccgcaaccactggacctcaaatcgatcttgccgtcaagcggaatgcgcataagatcgtaaagattacgcgggagcatctgtcatgcgggttctggggctggatgccggcatcgcctcggtgggctgggcgctgatcgatacgccggaggaggatggcgaggggcggatcatcgcctgcggttcgcgctgcttcgatgcgccggaaaccgacaaggaacgcacacccaccaaccaaatccggcggcaaaagcgggccatgcgccgggtcgtccggcggcgagcgcaacgcatgtccaaaatacgtcttatcctgcaccaccatggcctgattgccgcgcccgcgcgggacgcgctggcactcaaactcgacccctggacactccgggcagacgggttggagcgaacgctcaccgccccggaactggccgccgcactcggccatatcgccgtgcatcgcggcttcaaatccaactccaagcgggaccgcgcggcaaacgcggcggatgacagctccaaaatgttgagcgccatcgccgcgacgcaggagcgcttggcgcagtaccgaacgatcggcgagctgttcgcacgcgacaagacctacgccgagcgaaagcgcaaccgcaccggcgactattcgcgctccatcctgcgcgacgaccaggcggccgaggtccggcggctgttcgccgagcaacggcggttgggcaatggcatggccagcgaggctttggaggcggaattcagcgaagccgcatttttccagcggcccttgcaggactctgatgccctggtcggcttctgcccgttcgaacgtggcgagcggcgggccgcccggcgaggctattccaacgagctctcccgcctcctgcaacgcttgaatgccctcaccctggtgtggcgcggtggcgagcggcgcatcaccgaggacgaaatcgcgctgctgagccgcgacttcggggcagtgaagaaaatcaccttcaagtcagtccgcaaggcgctggacctcgacccttccgtacggttcgacggcatcaaggaggaggacgagaagcacgacgtggtagcccgctcgggcaatgccgccgagggcaccgccacgctccgtgccgcccttggcacggattgggccgcactggccgcacgcccggaggtgctggacgcgatggccgcagtgatcaccttccgcgatgacctcgagtcgatccacgccggcctcgccgccaccggcgcgcccgcgtcggcggtggccgccgtcatggcggcggtggagcgcggcgcctgcgccgagttcaagggagcggggcgtatttccgccaaggcggcgcgggcgatcattcccgggttgcgtcgcggtctggtctattccgacgcctgcgccgatgcggggtacgaccacgcggcgcgcatggcggtcggggtggcggatatcaggaaccccgtggcccgcacggcattggcggaaatcatgcgccaggtgcgcgccgtggtagaggcgcacgggctgccggatcgcatgcacgtcgaactcgcgcgggacgtcggcaaaagcaccgaggaacgcgacgaaatcacccggggcatcgagaagaaaaacaaggaacgcgacaaaacgcgggcacgatttgaagaactgctcggccgcaagccgcgcggcgatgacatgctccgcttcgaactctgggaggagcagaacggtcgctgcctctatacggacgccgagattccggtcgggctggtctcggcctccgagaacggcgcccaggtggaccacatcctgccatggagccgcttcggcgatgattccttcgccaacaaaaccctgtgcctcgccaaggcgaaccaggagaaggcggggcgcaccccctatgaatggctcggcgaggggccgcgctgggagcacctcgtcgcctgcgtggagggctgcaagtccatgaaaggccgcaagaaacgcggcttctatctgcgcaaaaacgcggccgaggtggaggagactttcaggaaccgcaacctcggcgatacccgctacgccacccgcgtggcgctcgatctgctggcgcgtatgtatcctgatgacggcaccaagcacgtgctggcgcgcccgggcgcactgacgtccaagctcaggcgcggctggggtctgcaagggctgaaaaaaggcgaggacggcaagcgcatcgaggatgaccgccaccacgcgctggacgccatcgttctcgccgccaccaccgagagcatggtcaaccggctcacccgcgccttccaggacgccgaaaagaagggctcggcccgcgaatttgccggcgaattcgtcccgccgccctggcccggcttccggcttgatgccgaggcggcggtggaggccgtagtggtggcgcgcccggagcgccgcaaaattcccggcgaggcgcatgccgccaccatcaagcaggtgcgtgaagtggatggcgcggcggtggtgttcatccgcaaggacgtcgagaaactaacggaaaaggatatcgacctcattccggtccccgcgccctacggccggatcgccgaccccgcaaagctgcgcggcctgatgatcgaggcgatccgcgcatggtgggccgccggcaagccgaaggacgcgccgccgcggatgccgaacggggatgtgattcggaaggttcgggtgcagacgagcgacaaggtggcggtgtccgtgcgtggggggacggcggatcggggagacatggcgcgggtggacgtgttcagggagacggatgcgaaggggcgggtgcggttccatctggtgccgatttatccgcatcagattgtggggatggagacggcgccggggcgtgcggtggtggcgcataagccggagggggaatggctggatattggtcgaccggagttcgaatgccgcttcagcctctacccgaacagtctgttggaggtaacgaggtcggatggagaagtgatttccgggtatttcaaggggctcgatcgatcgacgggaaacatcgcggttgccgatgtcagaagccaaacgactgtcacgcgcggcattggctgtaagacactgctctccttccgaaaacttaacattacacgtctaggctccgtttccgaggttctccaggagacccggacatggcgtggcgaggcgtgcatgtaaccaacccggcgcggctgtcactggccgacgggcagatggtggtggatcaggcggacggcgctgtgcgcctcccactggaagatattggctgggtggtggtggataccccgcaagccacgctcacggcggcgctgctctcggcctgcatggcggcgggggtggcggtggtggcgacggacgcacggcatacgccaagcggggtaatgctgcccttccacgggcattaccggcaaggcgctgtggcggccatgcaggcgggtgtttcggcgccgctgcgcaagcggctatggcaggcggtggtgaaacggaaaatcgagaaccaggcggcggcccttgcccagtgcgacggcgacgggaaggggctgcttgcgatggccgccctggtcgcctcgggtgacagcgccaatgtcgaggcgcgcgcggcgcgggagtactggggccgcctattccccaacttccgccgggaggacggcacggacaagcgcaatatgctcttgaactacggctacgccgtggtgcgggcggcggtggcacgcgggttggtggcggccggcctgctgccggccttcggcatcggccacgccagcgcctccaacgccttcaacctcgcggatgacatggtggaaccgctgcgcccgctggtggatgtggcggtgtggcgcatgagcgatgccgggcgggcgcgggagggcgaaccaaacatcgcggagcgccgagccttggcggcgcttccgctggattccgcgcgcatggggcgcgaaaccatgagcatcctcgctgccaccgaggcgatggcggaaagcttggtgcgtgccatggagggcaaacgcccggcagccctggtgctgcccacctttgcagcgccgtgaaagcggaggaggcacgcttcgtgtgggtgttcgtgttcttcgatttgccggtcggcaccaagtcggaacggcgcgccgcctcgaaattccgcctgttcctcaaggatgacggcttcctgatgctgcaatattcggtatatgcccgtgtgtgccgcggcgatgatggcgccgaggtccatatcaagcgggtcgccagcgggctgccagcgaaagggagtgttcgcgccttgcaggtaacggaccggcaatacgggcggatgcggctgatgctcggtacggcgccgaaaaacgagcgtgcggccagccagcaaatggttctgctgtgatttccgccccggcaaaagggcgaaaatcacaacaaaaacagcgttttaggcggaacgtagcctaccacagggaaatcggtagggaagccacggcccagaccaccaaggacgcgctcaaccgtctagcctaccacagggaaatcggtagggaagccacggcctggtgcaactggcgccgcaacgcgacatcctggacacgagcgccagccgtcatcgcctccgccgcaaccatccg

SEQ ID NO: 4302 - DNA, 6283 bp, synthetic construct
  misc_feature 1..6283: note = Synthetic
  source 1..6283: mol_type = other DNA
gtagaaagttggagcgggcgatcgggattgaaccgacgacattcagcttgggaagcagtttttgatcactcgcagtcggacgctgctggacgaacgggacgaagaaaaaacatttttaatcagtacgttatgtctcgcatgaagtccaaggttgccgtgggctgtccagagcaatccgagcacttttggccaccatgacgccaccacagatcgctgcgaggagcaagatgcgcaaacaattcacgacccgatttctcgacacagtgacttccgaaggggagcgtgccgagtactttgatacagcagaagacgggctgatgcttcgggtgtcgggcgaggggaccaaatcatttgccttccggtatcggcgtaagtccgacggcaagcgaaagttcgtctccctcggacgctaccccgatctgtctcttcaagcggcccgccttgcggcagtgaaaggtcggatcgctgttgcagaggggggcgacccggcttcagaagttcaactccgccggtccgcgccaaccttcgagggcatcgtcgatgactgggcgcaaggtcatgccttggccaatcgatcgcctagagtgcgcgctgacgatcaatcgatgctcaaacgctatgtcctgcccgagatcggcgccatgaaggtccgggacattacccggcgcgaactgacattgatgctcggcaaggtgcgaaccgcaaaggacggtcgtaagggccacgtaaagaagggtgttgagccgcgtgctctgacacaccgtccaaatcgggtctttcaattgactcgtgcaattctgcgctgggcgcattcagaagggataatttgcgcggacccgactgcgggcatgaagcgaccaatcaagaaggaagcagaacgcgagcgcacgctgagccttgatgagatcaaggtcttctgggccaatgtcaccgatctaccgacgacgcccgcccttcaaatcgcgatgaagttgtccctggtgacagggcagcgcatcggtgaagtgtgcggtatcgcgaagcaagagttgatcctcgacgagggggcgccggtttgggtaattcctcgtcggcgaacgaagaattcacaaggccaccgcgtgcctctgtcacccttggctctgggattgatccacgaagcactgaagttacaatcgccactccttcacgaatcgaccgggtttgccgagagtccatatctcttcccggcgcgcgcgaagcgcgaccggtcgcacggtccgatactgccgggcgctgcagcagtcgcgatgttccgtggccgagatatgctcggcatcaacgatttccgcgtccacgatctgaggcggacggccgcaacccacatggctgaactcggcgtcagtccccatacgatctcgctgatcctgaaccacgtgagcgcaagcaagcgcacagtcacgagcaaggtctatgtccaatactcgtatgatcgggaaaagcgtgaggccctcgaccgatggagccaattcctggaaagacatgttgacggagcgcagcattctaggcagcgggagaatagcgctcccgcagtaagggaatgatcaccggccgacgacaatgatgaagggctcatctgcagggggcatcccctgatggccgaagccatcagggtaatccctcgaaggaaaaccttcttgccgtggttttcctaccgacttcccatcgtcaggttgcacaaaatctcgtgcgaatcaataatcatccgtcggcttccaggcaatttgcacaaggcaagcatcgaatggaggatttggtcgaaagaattctagggattgacctcgggatcgccagctgcggctgggctgtgatcgagatgtcggacggcgatggtcgcatccttggtgcaggtgtccgctgctgggaggcgccggaagttccaaaaacccgtgaacccaagaaccatgaccgtcgacttgctcgcggccagcgacgcgtaatccgtcgtcgtcgccagcggatgggttcgatccgaaagttgtttgcaaaggctggcctgttacccgactcgaatcacgacgcgctgagaacgcccggcattgatccatggcgcgtccgagcagaggggctcgatcggttacttgcgccggccgagtttgccgtcgcgctgggacacatcgctcggcaccgtggttttcgctctaacagcaagcgtgatcacggcgccaatgcgccaagcgaaacgtctttgatgctcaaggcgatggaagcgactcgcggaaaactgtcgaagtaccgaacggtcggtgaaatgttcttgctcgatccggaattcgagatccgcaagcgcaaccgtggagactacacacgctcgattttgcgccgcgatctcgaagacgaggtgaccaagcttttcgagcgccagcgcgcgcttggcaacacgggcgcaacagaactactgcagcgcgaatactccgacatcgctttctttcaacggcgcctcgctgatagctgggacaaagtaggtctctgtccgttcgaattagaagaaaagcgtgctgcgaagcattccccttcgttcgagttgttccggttccttgcgcggctgaacacgctccgcgtcggaaccggccgcacttatcgcgcgttgaccgaggcagagatccgagcagccatggccgactttgccagcacgaagggtatgaccttcgcacgtctgcgcagggttgccgcgatcgcagaagacaggttccagagtgtcgcaccggacgacgagaagacgcgcgatgtcgtcactcggacgaaagacggagcggcaggcacggtcgctctcaaggaatgcctgggtgacagcgtgtggtccggccttctccaacgccccgaggtgctcgatcgcatcgccgccatcctcacgttcttcgagtctcccgagagtatgcagcccgagttcatcaggcttggattggatccaatcgtcgcagcagcccttaccaagggcgtggccaacggcgccttcgccaagttcaagggtgccggccacatttctgcgaaggcagcacgcaatgttatcccgcacctgatgcgcggactgacctacgacaaggcttgcgccgaggctggctacaaccacacccaacgcatcgagaccgagattactaatccggtcgcgcgaaaggccgtactcgaagccgagaagcagatccgggccatcgtgcgtcagtacggcatgcctgaccgcatccatatcgaacttgcgcgcgacgtcggaaagagcgccgaggagcgtaaggagatctcgaatggaatcgagaagcgcaacaagcaaaaagacaggctgcgtgacgtcgagttcccagatgcagtcggccggccgccgcacagcgctgaggaaatgctgcgcttcgaactctggaaggagcaagcgggaaaatgtctctataccgacgagaatatctcacccggacagatcgcagccggcgacaattcggtgcaggtcgatcacatcttgccatggagccgtttcggcgatgacagcttcatgaaccgcacgctgtgtacggcacgagccaaccagcagaagaagggacgcacaccattcgaatggttcaaggctgacaagactgaagcggaatgggaggcctttcgtgcccgcgtcgagaccaacaagcatttgcgaggatacaaaaagcgcaactatctactactgaacgccgaggaggttgaggagcgtttcaagacgcgcaatctcaacgacacgcgctacgcggcgcgcgcgttgatggcgcggctcgacgcctcgtatccacctgagttgaagagtcgccgcgtgtttgcgcgacccggtgcgctgacacaaaaattgcgacgagcatggggcgtcgatgacctgaagaaggacccggccacgcgagcgcgcgtcgaggacgatcggcatcatgcgctcgacgccatcgtgcttgccgccacgagtgagagcgcgctcatcagattgacgcgcgccttccaggaagcggaacgcaaagggttggcgcgcgaattcgggggcctcgacttgccctggcgaagcttcattggcgatgcgcgtgctgcttatctcggcgtgttcgtttcgcgtggcgagatccgacgcgcgcgcggcaaagcccacgatgccaccatcaaacaggtgcgcgaagccaatggcgagcaggtcgtctacgagcgtaaagcagtcgacaagctgacgctcgccgacctggatcgcataccggtccctgagccgtacggcaggatcgccgatccgagcaagctccgcgacgggacagttgccgcgctgcgcgcctggattgacgccggtaagccgaagagcgcaccaccacgttctccgcgtggcgatgtcatccggaaagtgcgcgtcgcgacgaagagtaatgttgctgtcggcattcgcggcggcacggcggatcgcggtgagatggtccgggtggatgtctttgttaagccgaatgccaaaggtattcgtcagttttttctagtgccgatctacccgcacgaggttgctaccctcgacaaaccgccgaaccgcgccgtgcaaggcggtgccgaggagagcagatggccgctcatggacagcagttacgaattcttgtggtcgatctacccaatgtcattgctagaactgaccaaagcggacggcgtgaccatcgaagggtacttcaaggggctcgatcgaagtacaggggccatcaatgtcgccgaagtgacaagcaatcagaaattggcaggccgaagcattggtgcgaggagccttgcgagcttccgcaagctgtcggtggatcggctcggccgtgtaagcgaagtagcgcgtgagacccgcacatggcgtggcgtggtgtgcatctgacgcgccccgcgcgtctgagtcttgctgatcaacagatcgtcatcgcgcaagacgatggcgaagtgcgactgccgatcgaggatgttggttgggttatcctggacacgcagcaggtctcaatcactggtaggttgctcgctgcttgcctggaagctggcgtcgtgatcgttgcgtgcgaccgaacgcatacgccgtgcggcgtggcattgccatttcacgcacattttcgtcaaccggctatcgcccgcgcgcagttggacatgagtgagccactgaagaagcggctgtggcaggcgatcattcaacgcaagatcgcgaaccaagccgaagttcttgagcgaaccgctcatgaggaagcaggtgcgctacgggagatggttcgctgggtgaagtccggcgatcccgacaacgtcgaggcacgcgctgcccggttctactggtcgcgtctgttcgaaaacttcacgcgcgccgacgacgatgatcgccgcaacaagcttctgaattacggttacgcaatagctcggtcggcagtcgcgcgcgcactcgtggccgttggatttctgcccgcgttcgggatcggtcatgcaagcgagaccaatgcgttcaatttagcagacgacttggtcgagccgtttcggcctcttgtcgaccgcgtggctcttgaacttgccggcccacctgcaacgtggcgcgatgcgctcacggtcgctgatcgccaggcgatggcgaacgtcctattcgcgaactgttggattgaacagcagcgaatatcgttgctcgtggcagtagagatgtcgatcgcgtcacttgcccgcgctgtcgagcaaaaatcggtcgatctgctgcaattaccgaaagcaatcaacatcgaggggccagacctcgatgatgactgaagaggtaaggatcatgtggctgttcgtgtttttcgatctgcctgtcggcaccaagcccgagcgcggcgcagcggcccgtttccgcaattttctcaaggacgacggctacatgatgatccagttttcagtgtatgctcgtgtctgccgcggtgaggaggctgtagacaagcatatcgtgcgcgtgaccaagaacctgccgccgaaaggcagcgtgcgcacgctgcaggtcacggaacgacagtatgcgcgaatgaagcttctgattggggagcgcaagaaaaatgaaaaactggcgtcccaacagatgctcctcctctgattttcgccgaggcaagttggcggaaatcagaggggcatcaagagcctacgagcaagctagcctaccagtgggaagtcggtagggaaaccacggctcgacttatcgcgcaccctggcgagggcggagcctaccagtgggaagtcggtagggaaaccacggccttcggatagatgccatgcacgccgtcgttagcctaccagtgggaagtcggtagggaaaccacggccc

SEQ ID NO: 4303 - DNA, 5834 bp, synthetic construct
  source 1..5834: mol_type = other DNA
  misc_feature 1..5834: note = Synthetic
  variation 237..498: note = note, n is a, c, g, or t
taagcagggatgaccgccgtttcaaggaccgcgcggccttccgtttgcagcgccgccgcggtttttttcggcacgcccgccggaatgcgcgtgaacggctcataaagcggatgatccgccggcgcggggtccgcctgcgcgtcgaaggacgggagaatcccggccatgatctctttcggctgcgcaaagccgtcagcgagccctttccgcatgttctcgatgttctggtcgatatannnnnnnnnnnnnnnnnnnnnnnnnnnnnnnnnnnnnnnnnnnnnnnnnnnnnnnnnnnnnnnnnnnnnnnnnnnnnnnnnnnnnnnnnnnnnnnnnnnnnnnnnnnnnnnnnnnnnnnnnnnnnnnnnnnnnnnnnnnnnnnnnnnnnnnnnnnnnnnnnnnnnnnnnnnnnnnnnnnnnnnnnnnnnnnnnnnnnnnnnnnnnnnnnnnnnnnnnnnnnnnnnnnnnnnnnnnnnnnnnnnnnnnnnnnnnnnnnnnnnngctttcgcctggtcgaggcggcgcgcctgatcggcgggcgcgacgcccgggacgcggtcatcataatcgctgacgccagcgctcgttgcggcgaaaggatcctcttcaagcgcggtcttccagtaatcttcgaatatcgccgagggcggctcagcgctcgccgctcccaataagcaaagcacggcggcggcggcggcgaagcggcggctcatgacgaagaccccgaattgcgattcgcggaccatagcggcgccgcgccgcctgccaaagagcgcaaggcaagcaaggcgcggaagcccctcccccaagcgggcccccgcgcctttggcgtcccgacggagcggtttcgttgggcgactatccgccgccgggacaccttcggcgctggctggctgccgcccggtccgcaaggaccgcgcgaaaggccgccgcagggctgaagtgcgggcagcctcgccaagtgtggcgcgaacgcgccagcgccgattcagttcatatcctgatcgaaaaagcccttgcccccggggcagcttcgcatggcgcgcggcccgcgcctgtgaaccatgtcacagaaggggccgcattttcgccttgcgcaacggcggtcgccggcttgtgaaaatgcgtgaattggccgctggcgcgcggcctgaacgacgacagcggcggcaagtcgaaatcgccgcaagaccccgacggcttcatcaagaaagccgacgctggaccggccgagcgcgcttggtaagtaaaatgacttaggcaggccccaaaaggaatcccccgtccggtttcccgaacggggtcatcctgcagtaggtaaactactttgccgtggctttcctaccgacttcccagtattgatcatgattgaatgtcgacacccggttgtcaatactccccttcgccgatgataaaatgcgagggaaaatgccggaacgggtgcttggacttgacgtcggcatcgcctcttgcggttggggggtgctggatgtcgaaaacggacggctgatcgccgctggcgtccggtgtttcgacgcgccgctcgtcgaaaagaccggcgagcccaaaagcgccgggcgccggctggcgcgaggccagcgccgcatcatcaggaggcgccgccagcggatgaacgccgcgcgcaaactcctcgtcgattacggccttctttcatcttcagatcgcgatgcgcttcatgcagcggcgcagtcggccgcgccgcactccccgtgggctctgcgctccgccgcgctggagcggaagctgtcgccgccggaatgcgccgctgttctcgggcatatcgcccgtcatcgcgggttccgttcaaacgcgaaaactgtcgccggcaacgccgccgacgaaacttcgaaaatgaaaaaggacatggcgaagacgagcgagaagctcgcgcaataccggtccttcggcgatatggtgtcaaacgatccggtgttcgccgccagaaagcgaaatcgcgacaaggactacgcgctcacgccttatcgaagcgatcttgagcaggaggtgaatgcgattttcaccgcgcagcgccgcttcggcaatgacgcgatgacggtagacctgcaaagccgattcgcacagatcgcgttctcgcagcggccgcttccggatagtgacggtaaggtcggcgactgtccttttgagccggccgagaaacgcgccgcccggcggtcgccgtcgttcgaactctttcgcttcctgtcgcgcctcaccgcacttgaactttcgatcggccgggcccccgcgcggcgcctcaatcgcagcgaaatcgcggctgctgtaaagctgtttggcgtcaacaagtcgctcacctttgcagcgctgcgcaaggcgctcgaaatcgaccccaacgccagattctccgttccagaaggcgacaagaaggggaaatctctcgatgtcgtcgcccgcgccggcgccgcagcggaagggacaaagacgctgcacgacgcgcttggcgaggcggcgtgggcatcgttacgcaaaacgcccgagcgtcttgaccgcattgcggaggtgctttcgttccgcgaagaccttgacagcatccgccaggggctggccgaagccggcgccgaacccgctatcgccgatcgcctcgtcgaggccgccgggcagggcgaattcagggagttcacccgcgccggccatatctcggcgaaggcgtgccgcgccatcattccgcatctgatggagggtcttgtctactcggaggcgtgcgaacgcgccggctatgaccacgcagcgcgcccgcaaacatcgctgaaggacatcaacagccccgtgacgcgccgcgcatttctggagacgataaaacaggtccgggcgatcgtccgggaacacggtccgatcgacaatgttcacatcgagctcgcgcgcgccgtcggcaagagcgcggaagaacgcaagaaactaaaagacggtcttgaagaacgcaccgccgagaaggagcgccggcgtgaagaggcttccggcattttgaagcgccgcgcgactgacgacgagctgttgcgctacgaactcgcgttcgaacagcagtggaagtgcatctacagcggcgaaccgatcgccggcgacggatttgccgccaacgatacgcgctatcaggtcgatcacatcttgccttggagccggttcggcgacgattcctatttgaacaagacgctgtgcacgacgcgcgccaatcaggaaaagcgcggccgcacgccttatgagtggtatacggctgacaagccggaggacgattgggcgctctatgaggcgcgggtcgaaagtctgtcgcgggatcaggtgaaaggccggaagaagcggaatttccttctgaaaaacgcggaggccatcgaggagcgattcagggcgcgcaatcttcacgatacgcaatgggtgacgcgccttctagcggacgaactcgcgcgcatgttccctccgcgcgacgcacggcggaccggcgacagcgatgaacggcgcgttttcgcgcggccgggcgccgtcacttcgaagctgcgccgggcctgggggcttgaggggctgaagaaaaatgaacagggcgagcgggtttcagacgaccgccatcacgccgtcgacgcgcttgtgctggcggcgacgaccgaaagcctgctgcagaagatgacccgggaaatccagcagcgtgagcgcgaaggccggcaggacgacatttttcatgtccagcagccatggccgggatttcgaatggatgtggaaaaggccgtctacggagaaaatggcggcggcggtgtcttcgtaagccgggcggaacggcgccgggcgcgagggaaggcgcacgacgcaacaatcaagcaggtgcgcgagatcgacggcgaacagcgcgtttacatccgcaaggacgtgctgaagctgaccgccgcggaccttgacctgatccccgttccggcgccttacggcaaaatcgcggacccgcgaaaactccgcgacgaaatggtggagtcgctgcgcgcatggctcgaagcgccgcttgccgagcgcaagaagactccgccgctgtcgccaaagggcgaccccatccgcaaggtgcggctcttatcaaaagacaaggtcgccgtcgaacttaacggcggcacggtcgatcgcggcgacatggcgcgcgtcgacgtgttccggaagcagaacgccagggggaaatgggaattctacgtcgtgcccgtgtatccgcaccagatcgcgacgatggatacgccgcccgagaaatatgtgcgcggcgcgactgacgaagccgaatggccgatgctcgatgggtctttcgagttcttgtggtcgctcaatcccatggactggcttgaaatcgtgaaatcaaatggcgaagccgtcgaaggatattaccggagcctcgaccgcgccaccggcgcgatcaatttgtctccgccccacacgaaggacgcaatgataagaagcatcggcgtcaaaaccctttcttcatttcgaaagttcaggatcgaccgcttgggccgcaaatcggaagtgttgcgtgaggtccggacatggcgtggaaaggcctgcacctgacgaagccggtccgcctgtcgctcagcggcgggcagatcgtcgcggcgcttgacgagggcgaggtgaaagcgccgctcgaagacatcgcgtatgtcattatcgacacgccgcaggcgacgctgacgagcgggcttgtttccgccgcgatggacgccggcgtcgccatgctgttcgctgacgcgcgccacgcgccgtcaggactcctgctgccgtttcacaggcaccacctgcaaggcgcggttgtgcggcttcaggtcgaggcgcgcgagagcctgaagggtcgcctctggcgcgacatcgtgcgcgcgaaaatcctcaaccaggccgccgcgctcgccctcgccgggcgcgacggcgcggagatgctgaaggaaacggcgcgccacgtcgaacccggcgaccccggcaatgtcgaggcgcgcgcggcgcgcaattactggggccggttcttcgacggttatacgcgcgacagcgaaggcgatcttcgcaacaagctgctgaattacggctacgccgtaattcgcgcgagcgtggcgcgcgcgctggtcgccgttggccttgttcccgcgatcggcctcaaacatgacggcgccgccaacgctttcaacctcgccgacgatctggtcgaaccgttccgcccgtttgtcgatctgctcgcccggaagacggcggcggaccgggatgccgtcagtgagctgacgattgacgatcgccgcgcgatggccggcgcgctgatgctgaacgccgccctgcgcgatggaaagatgacgctgctcgccgcggcggagaagagcgccgcaagcctcgtccgcgccttcgaagccggccagccggctctgctcgacctgccctcgctggaagacgcgccgtgaaggcggaggaagcgcggttcatgtggctgttcgttttcttcgacctgcctgtcggcacgaagaccgaccgccgtaacgccacgcgcttccgcaaattcctgaaagatgatggcttcatgatgctgcaatggtccgtctacgcacggatttgccgggcggaggaaggcgccgaaaagcacatggggcgcgtgacgaaaaacttgcccccgcgcggcagtgtccgtaccttgcaagtgacggacaagcagtatgcgcgtatgcgactgctgctcggcgaagcgaccttcagtgagaaaaatgcgccacagcaactcgttctcctctgaaatccgcgccggcaaaagcgcgggtttcagagaaggaacaaggacttcggcgactcagagcctaccactgggaaat

SEQ ID NO: 4304 - DNA, 5754 bp, synthetic construct
  misc_feature 1..5754: note = Synthetic
  source 1..5754: mol_type = other DNA
catcgaccgctggtaccacaacatgacctcggtgaagcaggccggcgtcgccgcgatgaccaaccagctcgaatacgacgacgaggtggcgttcctcgccacccggcgcatcttcgatttcgcccgctacgaacgaggcgcgccgttctgcctcgtcgtgtcgttcacccacccgcacgacccttacgcgcagcgggcgaagttctggaacctctaccgcgacgacgacatcgacctgccgcagaccgccgccatcgcccgcgacgatctcgacccgcacagccgccgcctccacgccatgtcggccatggacgactacgaggtgacggagcgcgacatccgccttgcccgccacggctactacgccagcatctcctatgtggacgagaaggtgggcgagcttctcgccgcgctcgacacctgcgggctgagggaaacgacggcggtgatcctcacctccgaccacggcgatttcctcggcgagcggggcctgtggtacaagatgtcgttcctcgaacccgccgccgccgtaccgctgatcgtgaacctgccgtcgcggttccccgccgcccgcgtgacgacgccggcctcgctcgccgacatcgcgcccaccctgtgcgacctcgcccgccccgggcttgccgacgagatggcccgcccttcggacgggcgcagccttctgggcgagctcgacggttcggcgccggagcccaccgcgccggtctacggcgaatacctggccgagggcgtggtggagccgatggtgatgatccgccgcggccggtggaagttcatcgcctgcccgggcgaccccgaccagctgttcaccatcgacgccgacccgcaggagcgcgagaacctcgccgggcgcggggccttcgaggacgtgcaccggcggttcatcgccgaggccgcccgccgctggagcctcgacgagctgcgcgatcaggtgacgcagagccagcggacgcggcttgtgctgttcgaggcgctgaagcgcggcgcgcgcttcccgtgggattttcagccgctcagggacgcttccgagcagtacacgcggaaccacatggacgtgaccgcccgcgaccagctctcgcgcttccccccggcccctgagccggggaagcggaaggaccggtaacgacggggggttaaacgtatcccgaaaaggaatttcccccgtgcagtttcccgcacgagggatcatccttcagtggaataccactttgccgtggtttcccaaccgacttcccacctttggttgccacgttgcacggcgcgcgtcaatattcagagagcgcccttcgaccatacggacagccatgaaagttctcggccttgattgcgggattgccagcgtcggctgggcagtgctgcacctcgatgacagcgaaaccacgggcgagatcatcgccgccggcacccgcatgttcgacgcgccggagaccgaaaaggaacgccgtccgaagtccgaacagcgtcggatgtatcgcggacagcggcgcgtcatccggcggcggagacagcggatgaatgcggttcgccagcttctccatcgtcacggcctgatccccgacggggaacgggacgcgctacgttttcaaggtctcgatccatgggcgctgcgcggcatcgcccgcgaacgtcttctgacgccctatgagttcgccatcgtccttggccatatcgcgcgacaccgcggcttcaagtcgaacgccaagtcgcgcggagaaaacgccgccgaagactccaggatgaagaaggcgatggccgaaacgcaggcgatgcgcgccgggcgcacctttggggaaatgctggcgaccgatcctcgctttgccgaccgcaagcgcaatcgcgtgggcgactaccaccaaacgccccagcgcgccgaccttgaagcggagacgcggcagatcttcgccgcccagcggcggctccaaaacccggcggcgatacctgaactggagcaagacttcgccgccaaggccttcttccagcgtggccttcaggacagcgaaaatctcgtggcagcctgcgcgttcgagccgggcgagaggcgcaccgcaaagcgtgcgccctccttcgagttgttccgctatttgtcgcggctgaacacgctcgaaatccgcgaggggcgaaggggacggcggctggctgcggaggaactcgcgcgcgccatggccagcttcggagcgacgcgcaagatcacttacaaggccctgcgcaagatcatgaggctgcgcgcggaggaaacgttcgcgaatgtgcgcgtcgaggatgagaccaaagacgttgtcgcgcggcatggcgaggctgcggccggaacgaccgtgcttcgggacacgcttgggcagcacgcatgggaagcgttgcgcgacacgccggagaagctggatcgcatcgccgaggttgtctccttccgcactgatcacgccagcatccgcaaggggcttgaggaagcgggactcgatgcgcccacaatcgagcggttgatggcggcggtcgccgacgggacgttcgacaagttcaccggcgcgggtcacatctcagcgaaggcgtgccggaacatcgtcccgcatctggcgcgcggcctcgtctactcggatgcggccgcggcctgcggcgatgaccataccgccagccgggagcggaacgccttcagcgtgggcgtaagaggcaaggccgctctggcgagaatcctcagcggcgaggtgatcgatcgatcgctggtgggaagccccatcgcccgcaaggcgctgatcgaagcggttaagcaggtcaaggcgattgtcgaggagtacggcatccccgacgccatccacgtcgagcttgcccgcgatgtcggcaagggcattgaggaacggcgcgagatcgagcgcggcatcgaaaaacgcaacaaggaaaaggaaaagctgcgcgagcggttcgccgaggatgtcggcgtgccgtgtggttcagcggaagacctgctgcgctacgagctgtggctcgaacagagcggacgctgcgtatactccgacgcccccatctcaccgcgagacatcgtcgccaccagcaacgccgtgcaggtcgatcacattctgccgtggagccgtttcagcgatgacagcttcaacaacaagacgctgtgcacggcgcgcgccaaccaggagaaacgggggcgcacaccctttgagtggttctcgcaggagaagccggaatctgactgggacgcatacgtcgcccggattgcggcgctgaagtcgctgcgcggtttcaagcggcgcaactacacgatcaaggatgcggtgagcgtagaggagaagttccggacccggaacctcaacgacacgcgctggacatcccgcctgctcgcggaagtgctgaggcagctttacccggtggacgaggaccagcggcgtgtgtatgcgcggcccggcgcgctcactgaccggctacgccgcgcgtggggcttgcaatggatcaagaaggatgaggggggcaagcgcatcgccgacgaccgccaccacgcgcttgacgccattatcacggcggcctgttcggagagccagcttctaaggttgaccaaggcgtttcaggaggaagagcgcaagggaagcccgcgggacttccggtcgtttgagcctccttggcccggcttccgagagaaggcgcttcaggccgtggagaaggtgttcgtctcgcgcgccgaacggcgccgggcgcgcggcgaagcgcacgccgcaaccatccgctcggtgtcggagcgcgacggcgaggcgctggtgttcgagcgccgttcggtggccgatctgaaactcgccgatctcgaccggatcaaggacaaggagcgtaacgccgcgatcgtgcaaagcctcaaggcatggatcgacgcggggaaaccgaaggacacgtcgccacgctcacccaagggcgatgcgatcaccaaggtgacgctgctcaccaacaagaagccggaggtgatgatgcgcggtggcgtcgtggatcggggcgagatggcgcgcgtggatgtgttccggaagcgcaaccgcaaaggtgcatgggaattcttcctgattcccatctaccctcaccaaattgcaaatgatgaactcccaccaatgaaagcggctcaaggaggcaagccggaagccgagtggccgacaattgacgcgtcgtttgactttctatggtcgctgaacccaatggcttaccttgagatcgaaaccagcaagaatgatctcattgcaggctactaccgaagtatggatcggagcaccggcgccatcgtgctttcaaaccatgaaaaccccaatgcgatcacaaggggaatcggcgcgcggaccctgaaggtgatgaacaagtactcggtggaccgcctcggccgtcgtcatctggtcgagcgggagcagcggacatggcgtggaaaggtgtgcacataagccgcccggcgcggctcgcctgtcatgacggccagttgatcgtctcgcaagaggacggcgaggtgtcgatgccggtcgaggacgtggcgtggatcgtcctcgacagcatgcaagtcacgctcaccgccgcgctggtctcggcctgcatggaggcgggcgtggccattatcttctccgatgcccggcacacgccttcaggcatggccctgcccttccaccggcatcaccgccaggctgcggttgccgcacttcaattgggcgcaacccacccattgaagaaacgcctgtggcaggcgctggtcgtcgccaaaatcacaaatcaggcgatctgtttgtcaggctgtgggcgtcaggccgatgccgtttccgcgatgacccggctggtgacatctggcgacccggacaacatcgaggcgcgagccgcgcgcgcttactggagcgaactctttccccggttcacccgcgccgatgaagccgatttgcggaacaagatgctgaactacggctacgccgtgatcagggcgggcgtcgcccgcgccctggtggcgagcggctttcttccttgcgtagggttgtttcatgcgaacgcggcaaacgcgttcaacctcgccgatgatctcgttgagccatttcgcccgatcgtggatcgacaggttttcgagctgacggataagggcgcgactggtgagggcgaactgacggtcgaacatcgccggcgcctcgccgggctgttgaccgcggacatccggatcggagaggaaaccgtcagcgtgctgacggcaacggaacgggcttcggccagccttgtgcgggcgatggaggcgtcatctccagctatgctgtgcctgccgcgtttgtgagtgagcgttgagcgatgaagtctgttgaggtgcgttacatgtggttgttcgtattcttcgacctgccggtcggcaccaaggccgagcggcgggctgccacccgcttccggaactttctgaaagacgatggattcctgatgctgcaatggtcggtctacgtgcgcgtctgccggggtgatgaagcggtgaccaagcacgagacgcgggtgacaagaaacttgcccggcaagggaagcgtgcgaatgttgcaggtcaccgagcgccagtatgggcgcatgaaactgttgctgggcgaatcgaaaaagagtgaaagggaagcgccaaaccagttggtgctgctctgattttcttcctgtcagagaagaaaatcagagcaatgacaaccatttgcgggcagtgcagcctaccattgggaagtcggtagggaaaccacggctcgcccaaaaaaccatacgaccgagcgacaagccaag

SEQ ID NO: 4305 - DNA, 5450 bp, synthetic construct
  misc_feature 1..5450: note = Synthetic
  source 1..5450: mol_type = other DNA
cgatgctggagtgtttgacgattgccattgagtctcgggtgggggcggattttgcgccttcggcctggcgggcgaaggcgttgaccgggatttccggcgggatcagcgggttgttcggcggcatgctgctgccggtggagatgccgttgacgatcacgctgatgctgcgggcgatcagcgatattgcgagccatgagggggaggatctgcggcgcctggaggctcggtttgcctgtttggaggtgttcgcgctcagcgatgtgcggggggtggaccggcgggcggggcctgctggggtgatcgggtattaccatgtgcgggcgacgcttgcgaagctttcgggcgccgtgctggcggcgatggtggagcggggggcgctggatacggcggcgccggtggttgcgcggttggtttcggaggtggtgagccggtttgggattgtggccagcgagcgggcggcggcgagcgggttgccgatcctgggggcgatcgggggggctgctttgaatgtgattttcaccgatcatttcgagcggatggcgcgggggcattttgccattcgcaggcttgagcgggcttatggggctgagcgggttcgggggttgtatcgggtggctttgggttaaggattctttcccgagcgataaacacaaaaaattccggcaatcactactgattccggggcgccgcatcggccaaacaatcaaagaacaatttctagatttaatacgcccggagcatctctgctccgggagcactatttacagtggttcgaaaaccaccttgccgtggctttcctaccgatttcccgtgctaacaaaatcattgattcgcatgtggcgtcaagcacgcattacgatcatgcattgttgacggagttttttgttgcatgatcgttcttggtttggatggtgggatcgcatctatcggttgggcgctgattgatgaggccgagcagcggatcattgcgtgtggggcacgatgcttcgatgcaccggagacggataaggaccgggtgccgaccaatcagataaggcggcagaagcggggcatgcggcgactgatcaagcggcggcggcatcgcatgcgggatatcaggcaacttttcgcggctcatgggctgcttgagcatggcgacaaagatgcgttgacccttggcatcgatccgtgggcagtgcgcagcgatgggctggagcgtgttctgacgccggccgaacttgccgcggcgcttgggcatatcgcggcgcatcgggggtttcggtccaatgcgaaacgggaccgggcggcgaatgctgcggacgatgcatccaagatgctgaaggcgattgatgataccaggggcaagctgacgcgttaccggacggttggtcagatgtttgcgaaggacccggactttgccttacgaaagcgcaaccggggcggcgattattcgcggactgtgaagcgggacgatcttgggcacgaggtcgcggttctgttcgagacccaacgcagacttggcaatcttgttgcgtccgaggcattgcaggaagacttcgctcggatcgcgttttttcagaacccgctgaaaaacagtgatgatctggtgggaaactgcctgttcgagcgcactgagcggcgcacggcgcgacgctcgccgagttttgagttgtttcgcctgctgtcgcggctgaacgcgctggagttggtcacgccgcatggcaaacaccgcttcaagccggatgaactccaaacgatcgttgcagatttcggtacgacgaagggcgtgacgttcacggcggtgcgcaggttgcttaagctcgacgcggccacgcgctttgccggtgttgggccggacgacgaaaagaatgatgtggccgcacggtctggcaaggcgttcgaaggcagtgcgaacctgcgtgatgcgctgggggaggccctgtgggccgcctgtctcgccgcgccagagattttggaccggattgcagaaatcctgacgtttcgcgatgacgaggacgagatcagggcgggtcttgccgagatcgcctgtgaggccgctgtgatcgatgcggttatgaaggggctggccgctggcgcgttcacctcgttcaaaggaaccgcgcggatctcggccaaggcagcacgcgccattgtgcctggtttgctgcgagggctggtctattcggaagcatgcgcagacgccggttatgaccatgcggccgcgcgagtcgttggcatcggtgatgttcgtaatccggtggcacggaaggcgctggcagagatgatgcggcaggtgcggaccatcgtcgcgaagtatgggcggctcccggatcgcattcatgtcgagctggcacgtgacgtgggcaagagtgctgaggaacgggacgagatttcacgcggcatcgaaaagcgcaacaagcagcgtgacaaagcgcgcgagcggtttcgagagaagctgcggcaggagccatcggcggaggatttactgcggttcgaactctgggaggaacagaacgggcggtgtctctacactgatgactgcattccagtgaccgagttggtctcgtccagcaatgttgtgcaggttgaccatattctgccgtggagccgtttcggtgatgactcctatttgaacaagacgttgtgcttcgcgagcgcgaatcaacggaagctcgatcgaacgccctttgagtggttttcggcagaaaagacagcgaatgattgggtgcgcttcgagcgtgctgtcgaagggtgcaaggccatacgaggggcgaagaagcgcggcttttatctgcgccagaacggtgcggaggtggccgagcggttccgcaatcgtaaccttggcgatacgcgatacgccacgcgggtgctgatgggacttttggcacggctctatccgaaagaaggggagcggcatgtgctggcccggcccggggcgttgacctccaagctgcggcggggctgggggctgcaaggactgaagaaggatgaagacggcaaacgtctgcccgatgaccggcatcatgctttggacgctatcgttctggcggtgacgaccgaaagcatggtgcaggggttgacccgtgcgtttcaggaggcggaacggcgcgggctggcgcgggactttgctggtgaggcgatggtcgatccttggcccggatttcgtgtccaggccgaggaggcggttgctcgcgttgcagtctcccggcccgagcggcggcaggtgcctggcgaggcgcatgcggcgacgattaagcaggttcgtgtggtggacggcgcacaggtggtttttatccgcaaggcggtagaggcgctgacggagaaggaccttgagcgtgttccggtgcccgcgccttacggccggatcgccgatccggcgaagttgcgggccgcgatgattgaggcgatccgggcgtggtgggcgaacggcaagccgaaggatgcgatgccgcagatgccgaacggggatgtgatccgcaaggtgagggtgcaaagcactgacaaggtggcggtttcggttcgcggtggtacggcagatcgaggggacatggcgcgggtcgatgtgtttcgggagattgatcggaaggggaaggttcgttttcatttggtgccgatttatccgcatcagcttgccactcttaaggaaccgccgaatctggcgatagttcaaagtaaaaatgaggatgaatggacgaacgtaaggggtccggaatttgatttcctctttagcctctaccagaacagcctgattgaaattcagaaatcaaaagggccgatggttcgcggctatttcaagggggctcaccgaggaacggctgcgttatcgttggctacaatggtatcgcctaccgacttgacggacggcattggttccaagacccttttagatcttcggaagcttaagatcgaccgtttgggcatcatcagtgttgcaccagaggagcctcgaacgtggcgtggcgcggtctgcacataacccaggcggcgcggctgtctctggcggacgggcagatcgtaatcgatcaggccgacggcgccgtgcgtctgccgctcgaagatatcggatgggttgtgatcgacacgccgcaagcgatcctgacgacggcgttgattgcggcccttatgcaccacggcattgccgttgtgaccacagacgcgcggcatactccttccggcatcatggtgccgtttcatgggcattaccggcagggcgcggtcgcggcaattcaggccggggtgtccgtgccgctgcgcaagcggctgtggcaaagcgtggttcaggcaaagatcgcgaatcaatcagcggctctcggtcgatgcgggggcgatgggcgggcgctgtcggccatggcggcacttgtggggtctggcgatccggcgaatgtcgaggcgcgggctgcccgcgcctattgggcggggctttttcgcgatttttggcgggaggacggcacggaccggcggaacatgctgttgaactacggctatgccgtggttcgggcctgcgttgcgcgggcactggttggcaccggcctgctgccggcttttgggatcgggcacgccggcgcgagcaacgccttcaacctggcggacgatatggttgaaccgttccgacctgtggtggacgttgctgttcatgcgatgtcggatggcggttgccgccgggatggtgaaccggagcggggagaccggcagcgactcgcggccttgccactggaacccattcggatggggcatgagaccatgtcggttctggccgcgacggaagcggtcgccgaaagtctggtgcgcgcgatggaggcgaggaagaaagagaagttgatgcttccggcgctgtgcccccctccatgaagccggaggacgctcggttcatgtggctgttcgttttcttcgatctcccggtgggcacaaaatccgagcgtcgggacgctggcaagttcaggatgtttttgaaggatgacgggtttctgatgctgcaatactctgtctatgcacgactctgccggggggaagacggtgcggacgtgcatatcaggcgcgtgacgagcgggcttccggcgaaggggagtgttcgggcgttgcttgtcacggatcgccaatacggtcggatgcggttgcttcttggatcgaaggggaaaaatgaagccgccgcgccgcttcagatggttctgctgtgacttcgggcacggcaaggagcccgaagtcacagcagaatcagcatgttatcaaagagcaagcctaccacggggaaatcggtagggaagccacggccagtaggcatggcgatgacgccagttgaggagcctaccacggggaaatcggtagggaagccacggccggcgtgagcacacaccttgcgcagccttgagcctaccacggggaaatcggtagggaagccacggcctttttggcatcgccccgaccgcaaacagcagcctaccacggggaaatcggtagggaagccacggcgaaga

SEQ ID NO: 4306 - DNA, 5317 bp, synthetic construct
  misc_feature 1..5317: note = Synthetic
  source 1..5317: mol_type = other DNA
gatcggtgtcgagcttctcctctatcgcggtgcggctgacttcgagctcgcctgcgctccattcgccgtctgcgttttcctcaggcgccggctgctcgaccgccgccggctcgccgtcgccggcgcgttcgagcagggggttgcgctcgagctccccctccacataggcggcgagatccaggttcgagagctgcagcagcttgatggcctgcatcagctgcggcgtcatcacgagcgcctggctctgccgcaattcgagctttggcgtcagggccatggggccacgcgaattggtccgaatcttgcttctatggcttatcgcgttccggacccgctgtacaccgccttgctgtggccgtcgttaacgggcgagggcacggggaatttggcggatacggcgggttaccgcaccgctctccgctgatcgagcacgaattaatttatccggcgtacccgaatgtccgaaaaggaatcccctccggcgttgccgccggagggtgatccttcagtggtgaaaccactttgccgtggcttcccaaccgatttcccctaacaaacaacaattattgatgatggatgcatgcccgtcaataatcatctgctggttgtgcatattggaagggggcgcacatggaaggcagcgcgcgcatccttggcatcgaccttggcatcgcctcgtgcgggtggggcgtgatcgaggtcaaggatgagacgggaagggtcatagcggcgggtgtacgatgtttcgaccctccgctggtcgaaaagacaggcgagccgaaaagcgcggagcgtcgcgcagcgcgtgggcaacgccgggtcatccgtcgacgccgacagcgcatgattgccatacgcaaccttctgcacaagcacgctctcctgccggatgcgaaagatgatgcgctcgcgcatgccctcaggcgcatttcgccgcccggacgcaatccgcaagttacgccctggatgctgcgcgcggtggcacacgatcgtctgctgaccgacgatgagtttgccgtggtgctcggccatatcgcgcgccatcgcggctttcgctcgaattcaaaacgagaagcaaccaccaatgccgccgacgaaacctcgaagatgaaaaaggcgatggaggagacgcgcgagggactggccaagtatcgcagctttggcgagatgctcgcgcttgatccgaaattcaccgagcgcaagcgcaaccgcgacaaggattattcgcacacagcaaagcgttccgatctcgaagacgaggtgaaaaaaatttttcaggcgcagcgacgattccaaaatgcgcgcgccaccgaagaactggagcggcagttcatcgacaaggcgttctcgcagcgaccattgcaggacagcgaggataaggtcggcaactgtcccttcgaaccagatcaaaagcgcacgagcaagcgcgcgccatcgttcgaacaatttcgttttctccagcgcctggtcaatctacggatcacggtcggtcgcgccgagcggccactgacggccgatgaaatcggcatcgttctgaaaagatttggggaacagaagtcctacacatacaaaacactgcgcaaagacctcgaccttgatcccaacgcacgcttctccgccgtcagtcgcaataacgagaatctggatatcgctgcgcgtaagggacaatccgcctatggcacctgcacgctgcgtgacgtactgggcgaagcgccctggcaatctttgttgaagacacccgaaaaacttgaccgcattgccgagattttgacgttccgcgaagacctcgaatcgattcgtcgcgggcttgcggaactcggcctcgacagtgccttgctcgactgcctgatgaatgcagcacgcgaaggggcgttcaccgagttcaagggcgcggcgcacatctccgctctcgcggcgcgcaagctgattcccggcctgcgcgaggggctcgtctattcggacgcctgcgcgcgggtcgggtacgaccacactgcgcggccggccatttcgctcgaccagattggcagtcccgtcacccgccgcgcgttcgccgaagcgatcaagcaggtccgcgcggtcgcacgcgaatatggcccgttcgatgcgattcacgtcgagcttgcccgcgatgttggcaaaagcgccgaggagcgcgccgagattacgagaggcatcgaggaacgcaatgccgaaaaagatcgtcgcaggaaagaagctgccgatttgctcaaacgggacatcagcgacgatgaattgctgcgctacgagctcgccaaggaacagaacttcaaatgcgtctactgcgacggtgcgatcgcacccacgggctttgccgccaacgacacgcgctggcaggtcgatcacatcctgccgtggagccggttcggtgacgactcctatctgaacaaaacgctgtgctgcgtcaaatgcaaccaggacaagcgcgggcgcacgccattcgaatggttctcggaggacaagaccgagaaagattgggagtcgttcgtcgcgcggctggacaatcttaaggagatgcggaaggggctcaagaagcgaaactttaagctgcgcgacgccgcgtcggttgaagaaaaattcaaggaacgcaacctgacggataccaaatgggtcacgcgcctcttggccgacgaactgaagcgcatgttccccgcgccggaaggtaagcgacgggttttcacccggccgggtgcgatcacatcgaagctgcggcgcgcctggggcctcgaaggcgcgaagaaggagaacggcgagcgcgttcccgacgaccgccaccatgccgtcgatgcgctggtgctggcggccacgaccgagagcctgttgcagcgcatgaccaaggaaatccagaagcgcgagcgggaaggccgggcggatgatattttccatgttcagcaaccgtggccaggtttccgcctcgacgtcatgcggacggtctacggggagaacggcagcggcggcgtgttcgtctcgcgcgccgagcgccgccgcgcgcgcggcaaggcgcatgacgcgacgatcaagcagatccgcgaaatcgacggcgaacaggtcgtgttcgagcggcggccaatcgagaagctgacagagaaggacctggagcgcatcccgattccggagccttacggcaaggttgtcgatccgaagaagctgcgcgaccagacggtggaagcgctgcgcgcctggatcgcggctggcaagccgaaggacaatccgccgcgctcgcccaagggcgacatcatccgcaaggtgcgcgtggcgacgaaggacaaggtggcactggaaatcaacggcggcaccgtggatcgcggtgagatggcaagagtggacatatttcgtaaagcaaatcacaaaggccagtgggagtattttgcggtgccaatctatccgcaccagattgccacgatggaacagccgccgaacaaatatgtgaagggtgccactaacgaggatgaatggcctgttatcgattcttcctacgagtttctgtggtcactgcaaccaatgaattatttggagatcgtaaagggaaatggcgaatgcgttgagggttactatcgcagcctggatagagcgaccggcgcaatcaatctttctcccatgaagactaatgatgaactaatcagaagcatcggaattaagacacttgccaatttcaaaaagttcatgatcgaccgcctcggtcgcaagttcgaagtacagcgtgagttgcgtacatggcgtggaaaggtgtgcacctgaccaaggccgcccggctttcgcttgccgacggccaatgttgcgtgaagcaggatgacggcgaggtccgtgtcgccatcgaggaccttgcctggatcgtgatcgacacgccgcaggcgacgctctccagcgctctgttgacggcatgcatggatgccggcgtcgtcgtcgtcgtcaccgacgcccgccacacgccgtcgggcctcgtgcttccctttcaccgccatcaccgccagggcgcggtggcgcgactgcaggcgaacgccaaggaatcgctcaagaggcggctctggcagctcctggtccggcgcaagattctcaatcagtcggcggtgctggaggccatcggcgtcgccgatgccggcacgctgaaggaaatcgcgcgccacgtcgagccgggcgaccccgacaatgtggaggcgcgcgcggcgcgtttctattggggccggctctttcccgatttcgtacgcgaggatgctgccgaccgccgtaacaagctgctcaactacggttacgcggtggcacgggcgggcgtggcgcgggcgctggtcgccgccggccttgtgccggcgctcgggctcggacaccagggtgcggccaacgccttcaatctcgccgacgatgtggtcgagccgttccggccgtttgtggattacctcgcctggaagacgagcgcgaatggtttgggcaaggagggcgatctgtcgatcgacgatcgccgcgccatggccggcgtgctgctcagcgacgcgcgcaccggtgaagacacagtgacgttgctcgtggccgcggagacggcggcgcagagtctggtgcgcgccttggaggacgagaaacccgaccgcctgctgctgcccttcgtgcccgcaccgcaagcggagctgctgccgtgaagagggatgaggttcgtttcatgtggttgttcgtgtttttcgatctcccggtaggaacgaaagccgagcgccgctgggcgacacgattccgaaaatttttgaaggacgacgggtttctgatgttgcagtggtcggtgtatgcccgcgtgtgccgtggcgaagacgctgctgaaaagcacgctcagcgcgtaatgaaaaacttgccgccgaaggggagcgtgcgtacgctgcaggtgaccgacaagcagtacgcacgcatgaaactcctgctcggcgaggccagtttcagtgagaagaaagcgcctgaacaaatggtgctgctctgatttccggctgcattgtcaaccggaaatcagagtgattccgcatgtttgcgccgctcgcagcctaccacggggaaatcggtagggaagccacggccctgtactcaaacacctcatccggcatgccagcctaccacggggaaatcggtagggaagccacggcccatagggagatatgccatggccgaaaaactagcctaccacggggaaatcggtagggaagccacggcccgaccatgacatctcctttttgccacatgagcctaccacggggaaatcggtagggaagccacggccacgtcgtacggagtattcccggaccccgaagcctaccacggggaaatcgaa

SEQ ID NO: 4307 - DNA, 5305 bp, synthetic construct
  source 1..5305: mol_type = other DNA
  misc_feature 1..5305: note = Synthetic
aagcccgggatcaaacacctagaccattttagccttttagcctttgctcgatcaggcgttctcgccccggttgccactgcgccgcgcgacaagtcgttcattatcactatcgagcgcagcagcgatcctttgcatgaccaaagccgttggattgcgcttcccgcgttcgacgccgcccagatacgtctgatggatgcctgagcggaacgccaattcctcctgcgacaggcctttttcccgtcgcaagttctgaagattcaggccaatccgctcccgcacgtccatccgcgcaggtcaggtgattgcctataatcaggccatagactatcagtcataatatgactgatagtctgcctattcgggctgcacgaacattgacggacttcggattcgacggccataccgcgctcgaatcgctgattgttgcctcgccaacctgtgcatcacgccgtcattcttggctaagctgactgacacgaacccactggtccgggatatgctccggtacagggtatgggacatatatggatggcatccccgtcgcgcagaggaacccagagaaccaaacgggtatcgcgatttgaattgggctctattccttccaaccgttgacgacgtgcgcgctcttcttgagcaaacgatggcacgcgggaaggcggaccgaacgacaaggatggcgcttccgttgggtactttagaccggctgactgattagccttcatgtttttgcaaagcgccgaaaggaatcccctcggctcgtctccgagccgagggtcatccttcacttggaaaaccaagttgccgtggctttcctaccattttccctgtggccttacccaatcactacaggaagcaaccattgtcaattgccggtagctctgagcattatctcatccacataatttgaggcaggacgagaatgcgtattttagggattgacggaggtattgcatcgacgggctgggcaatggtcgacatttctgagactgaagccgatggtcgcgttgttgcagcaggcagccgaactttcgaatccccggaggagccgtcacaaactggccccaaactgaaaaacgctgaccgacgtatgtatcgtggtcagaggcgagttgtgcgtcgaagggcgcagcgtatggcccagatcagacaactgcttcatcaagccgggttgcttgaggatcaaaagcgttcggcgcttgaaggcaagggtgccgatccgtggcttcttcgggcagaggggcttgatcgctgtttgacgccacgagagttcgcgctggcgttgggccatatcgccatccatcgcggctttcgctccaacagcaaaagggatcgtgccgccaatgcggcagatgataactccaaaatgctctcggcaatccacgccacccaggaacgtctcgcacattggcggacggttggcgaaatgttcgcgcgcgatcccgaattcgctcagcgccgccgcaaccgctccggagacttcacccgatccatcatgcgctcggaccaggaagccgaggtgcgcaagctgttcgaacaacaacgctgtctcgggaacaaagcggcgtcttacgatttgatggcatccttcgcggatatcgctttttctcagcgcccgctgggttccagtgaggataaagttggggactgcatttttgagcctactgaaaaacgcacggcccgttttgcgccaagcttcgagcgtttcaggctcctctcgcgtctgattaacctgcggcttcagtcagggcgggtagagcgcgccctgaaccccggtgaattggcgttgtgtatcgaaggcttcggcaaaacgaagggcatttcgttcaaagccattcgaaaccgcctcgaccttgatgccaacacgcgctttgctggcgttgccaagcatgacgaaaagcatgatgtcgcggcccgcacagggtctgcagcggctggcacagccgctttcatcaaggcattgcagacggtcggcgagatcgaggccaggacattgttgtctgaatgcagcaagctggacagggccgctgaaatcatcacgtttaatgaggatacgtccgccattaaagcagggctggccgggacagggctttcaagtgaagcgcaggatgccattgtcaaagcaattgatgccggagatttcgatcacttcaagggtgcggcgcacatctcggcaaaagcagcccgaaacatcattccaggattgatgcaggggctggtctattcggaagcctgcgaggccgtgggttatgatcacagcgcccgcgccgccatgagtattgacgatatcgggtcgccggtggcgcgcaaggcgctgtccgagatgctcaagcaagtgaaggttttggcccacgaattcggaccgttcgaccgcatccatattgagatggcgcgcgatgtcggcaaaagcatcgaagagcgaggcaagatcgagcgcggtatcgagaaacggacctcagagaaggacaggctgcgcttggagatgcagcagcttttaccccacctcacgcgcatctccggcgaggaccttcttcgcttcgagttgtggaaagaacaaaacggcagatgcctttacaccgatcaggccatttctccggcaattgttgttgcttccgacaacaatgtgcaggtcgatcacatcctaccgtggagtcgttttggcgacgacagtttcatcaacaagacgttgtgctttacttcggccaatgccgagaagcgcggcgacacgccctatgagtggttcatgcgaacgaagcctgatgaatgggacaggttcgccgcgcaagtggaggcctgcaagacgctaaagggacgaaaaaagcgcaactatctcatgcgcaatgcggaggaacgcgaaagccagttccgcgagcgcaatctgaacgatacgcgctatgcaacccgcattcttctgggcgaactgaagcggcactattttccagatgcgccgcatcatgtcgctgcgcgtccgggcgagctgacggcgaagttgcgccaagcctggggtatcgagaaactcaaaaaggacaaggagaccggcaagcgcctacccgatgatcggcaccatgcgcttgatgccatcgtggtggccgtcgtcaatgaacgccttctgcaatggtcaacgaaggcgagccagcaggcggaaaggacaggtgccaagtttgagctgcacggtctgccggagccttggccgaacttcagggaagaggtgaccgcgctgcatgagaaggtcttcgtctcgcgggctgaggtgcgacgcgcgcgcggtaaggcccacgatgctggcataaagcagttgcggacgatcgaggaggaagagaaggtctttgaacgcaaggcagtcgaaaaactgaccctcaaggacctcgacctgatccctgtaccggagccctatggcaaggttgcggaccctcagaagttgcgtgatgcgatggtcgagacgcttcgggcgtggattttggcgacgaagaacaaacagaagggtgagatcattccacctcctcgctcgtccaaaggcgacattatccgcaaggtgcgtgtgatgacgaatgccaagcctgccgtgatggtgcgcggcggcactgcggatcgcggcggcattgtgcgggtggatgtcttcactaaaccgaacaaacgcggcgcggcggagttttttcttgtgccggtttatgtgcatgaggcggcgacactgccggagccgccaaaccgggcggttcaagcctacgctgccgaggcagattggcctgtcatgacaacagacttcacctttaaattttcactctacgccatgtcactggtcgaggtttacaaaaaggatggagaagtcacaaaaggctatttcagaggcattcatcgaacaactggcgcgatcaacatttcagacgttagtaactcatcattgaccacagatggaataggcgcacgcacattaatggaattcaaaaagctttcagttgatcgtcttggccgcgtttctgagatcgtgtccgagacaagaacatggcgtggagaggtcttcatatcaccaaacccggacggttgagtctggctgatgggcagattgttgtctcgcaggaggccgatgatgtgcgcataccccttgaggatatcggctggatcattctcgatgatccgcgcctgacgcttacgacagcgctgctttcggcctgtgccgagaacggcgtagcgctcatcaacaccgatgcacggcacatgccctccagcctgaccctgccgtttcacaggcaccaccggcaggcagccgtcgcgtcccaacaggtcaatctcacattgccttttcgcaagcgatgctggcaggccatcataatcgccaagatcaggaaccaggcagaagtgctggatcgtcatggttgcgcttacgcagacacgttgcgcgcgatgacgaagcatgtgggttctggcgatactgacaatgtcgaagcccgtgccgcccggcaatactggtcggccttgttcaatggcttcatacgcgacgatccatctgacctgcgcaacaagatgttgaactatggctatgctgtcatgcgggcagtggtggcgcgtgcgctggtaggagctgggttcattccctgcattggtctgcaccatgccagccagacaaatccgttcaatcttgccgatgacctgatcgaacccttccggccctttgtcgatcacatggtgttcgtgcacaccgccgggcgcgaggcatcggacgacatgactgtcgacgaccggcggaagctggcgggccttccgctagaaacagggcagatcggcggggctgagttcagcttgctggccgcgacggaagcttgcgtcgctagcctattgaatgcgatcgaggctcaggacgcgtcgctgctgacgctgccatccatcgggatgccagagactgtggcatgaaagcggaggaggcgcggttcatgtggctgttcgttctctttgatttgccggttggcacaaaaaccgagcggcgacacgccacgcgcttcaggaatttcctgaaagacgacggttacatgatgctgcaattttcggtttatgcgcgaatctgccgcgctgaagaagctgtggataaacacctcggccgtgtcaccaaggcgttgccgcctgccggaagtgtgcgtgcattacaggtgactgacaaacagtacgcccgcatgaagatgctgataggtgctcggacaaaaaatgagaagtcagcttcgcaacagctcgttctgctatgaaaaaggcggccattcagccgccgatttcacttatatttcatcaacttgccgcgaagtgagcctaccacagggaaatc

SEQ ID NO: 4308 - DNA, 4922 bp, synthetic construct
  source 1..4922: mol_type = other DNA
  misc_feature 1..4922: note = Synthetic
ccgcccccgagggggcggcccttccattgcctgccgcggtccgttcggaccgccgcgctccgtcgtcagacggcggggaaccctgccgtggcgggtatcccgagagcggcgagcggccgcagggcgacgcaaccagacacgggatcactgcccattttccaccatcacactccggagcatccgacgaggcgtctctcattctcgccgagttcagccgcctccctgcaccttgtgtgtggggctgggcaatagttaattgtcagattcagtctagacttctgcagtaagaatctgccggaaccgcaagaagatccgaggtggccaccgcaccatctacgccagcccaaacgtagcattccagtgcttgaaaacgctccgcttgaaaatttcgttgggctgcgccgtccaacttggtggaccgcattataccctgtggctttcacgccctggcagcgacgccaactttctatctaaacatagatgttgaggaatcccccagccttgcggccggggtaatccttcagtggaaaaccacttaccgtggcttccctaccggctcccgaaaccatgttgcatagcgcccccttctcggtcaatgtttttttgcactcgtgagtggcagaggggcggtcatgggtagtttaggcgatacgtcactggggatagatctcgggattggatcgtgcggctgggcgctgatccgtgaagacacccaagagatcatcgctatgggatcccgctgctttgacgtccctgaaactgacaaggatcgaacgcccaccaatcagatccgccgcagcaaccgactgatgcggagggttacacgccgtcgggcacggcggatgaaggatgtccgggcgctgtgccggcgcttcggtctggtcgacgatgctgaacccgaagcattcactgcggcgcggcttgatccgtgggcactgcgtgcgcaaggacttgatagggctttaaacggccaggaactggccgctgttctcctccacatcgccaaacaccgtggcttcaggtcgaatagcaagcgtgaccggggcgccaacgcgcccaaggattcctccaacatgttgatgtccattgccgagacgtcggcacggttggcgtcatggcgtacagtaggcgagatgtttgcatgcgaccccgcttttgccgggcggaaacgcaaccgtgattctggatacgaccgctcgattctgcgtgcggatcaagagaaggaaattgcgttgttgtttgatcggcagcgcatctttcgaaaccacctggcctcacaggatttggagcgtgcctaccgtgagttggcgttcttccaacgtcccataggcgacagcgaagacagcgttggcgattgcccttttatcacgggcgaaaagcgtgcagcacgccatgcatacagctatgaacgctttcgacttctgtcgcggctggcggcgttgcggctgcgacgcggtcgggaagaggtcgccctgtcacaggagcagatcgcagtggcatcggccgacatggggtccaaccgcggactgtcatttgcacgattgcgccggctgttggcactggacgatcattggcgttttgatggcgtgtcaccggccgacgaaaagagtcgcgacgtcgttgctcgttccggcgcagcaacacccggtagctttgctttacgacgcgccatgggcgagagcccgtggcgatcactgctggcaacgccggaggtcctcgaccgcatcgcagcgatcttcgcctttcgtgatgaactcgattccattcatgccgggctcgctgaggccggactgccgtcgcttctgctcgacattctcatggcagcggcggagaaaggggacttcgaggaatttaagaaagccgggcatatctccgcgacagcctgtcgcgccatcatccctttcctggaacaggggctcgtgtattcggaggcatgcaaagccgccggattcgatcatgcagcgcgtcagatgatagtgattgaggacatcgccaatccgatcgcgcgcaaggcgctcaccgaggccgttaagcaggtacgggccctcattgcagagtttgggcttcccgggcgtattcacgtcgaacttgcccgtgacgtcggcaaaagccaggaggaacgcgacgagatcagccgtggcatcgatcggcgcaaccgcgagaagggccggttgcatgatgaatttaccgagaacctgggtcggccaccgctgaacggcgaggaactcctccgcttcgagctttggaaagaacaaaacggccggtgcctctatacggacgaggcgatctcgatcacagcggtcgttggatccgataacatagtgcaggttgatcatatattgccgtggagtcgctcgggtgatgacagttttgtcaacaaaacactttgttttgctaaagcgaatcagaagaagagggggcgcactccgtttgaatggttttctgcagacttgagcgagaacgactgggaagcgtttgttgctcgcatcgaaacactcaaaggtatgaagggacgaaagaagcggaactttctattgaaggatgccgtcatactcgaaaagcgattccgggagcgcaaccttaatgacacgcggtatgcttgccgggttttgattgatcttctctcccggctatatcccgatgatggacgccgacacgtattcgcgcggcccggccccttgacggaccgattgcgtcgagcgtggggggtgaacgatctgaagaagggaccggatggtcaacgtctaagcgacgatcgtcatcatgcgctggatgctttggttgtggcggccaccggtgaaggcgcgttgaaccgcctcacccgcgcgttccaggaagccgagcggttgggagcgccgcgtgacttccgggcattcgcaccgccatggttgggcttcaccgaacaggctcggaccgcatttgcaggggtgttcgtctctcgccccgaacgccaccgggcacgcggcgaagggcatgcggcgacgattcgtcaaattcgggagcgggacggaaaagccgtcatttttgagcgaaaagccgttgagaaacttaccgttagcgatcttgctcgcatcaaagacgcagagcgtaaccatcggcttgtcgattcgctgcgcacttggatcgacgcaggtaagccgaagagcatgctgcccttgtcccccaaaggagacccaatttcgaaagtgcgtgtcgcaaccagcaagaaagttgacgtacttgtccgcgagggtgctgccgagcgcggagagatggtgaggattgacgttttccgaaaagcaaaaccaaagcatggattcgagttttatttggttcctgtgtacccacaccaagtgatggattcggagggttggccatttccacccaatcgtgccattcaggcatataaggaggagacggagtggccggaaatcgaagccgaacacgagttcttgttcagtttgcgccctttcagttacgtccaacttaccaaacgtgatggtacaataatagaagggtattttcgcggcgcaaaccgcagtaccggcgcattgatggtgtcaatgcagaatgataatacggaggttcgagaaggaattggtgcgcggacactgggctgtatccgtaagtttcacgtagatcgtcttggtcgacgtttcgaaatccaacgggagacccggacatggcatggcgtgccgtgcacctgagccggccggcacgcctctcgctcgccagtgggcaaatggtggtggcccaggatgatggagacgtacgtctcgcactggaggacattgcgtgtctggtggttgacacgccgcaggccagcttcacgagcgcccttctctcggcttttgccgaggcaggaattgctttgatcgtcaccgacgcaacccatatgccgtctggagtgctgctgccttttcaccggcatttccgacagggcgacgttgcgcgacgtcaagtcggtctttcggctccactccgaaagcgcttttggcaagccattgtccaggcgaaaattgccaatcaagccgctgtgttggccgaacttggacggggcggtgccgcgactctggtggccgttgcccagcaggtgcgatcgggtgatcctgacaacgtcgaggcgcgcgcagcgagggaatactggaagcacctgtggcccgagttccggcgtgacgatgagggcgaccggcgtaacaagctgctgaattacggctacgccgtcgttcggtcggcagtagcgcgggctttggtggctgccgggttcctgcccgccttcggcttgcaccatgacagcgccacgaacgccttcaatctggctgacgatctggtggagccatttcgtcccgtcgtggaccgactcgcctggaagttggccccggagggagcgccaagccgaggtgacctgacgcggaatgatcgccaagctatggccggtgcaattttggaaccggttcgattcggggatgacgaggtcaccttgttggccgccaccgagctaacggcgaacgccctggctcgagcgatggacgcaaagacggccgcgttgcttgtcttgccatccttctgagcggaggcggcggtgaagtcggaggaggtgcggatcttgtggctcttcatattcttcgatctgcctgttggaactaaggcggaacgccgaaatgcgacccgtttccgcacgttcctcaaggacgacgggtatatgatgctacagctctctgtatatgcccgggtgtgtcgtggcgaggacgccgttagtaaacacatgcagcgcgtcatcaaacgactgccaccgaagggtagcgttcgggcgcttcaggtcactgacaagcaatacgctcgtatgcacctgcttcttggcgagccggcaaaaagcgaagcggtcgcgccacgccaaatggtcctgctctgattctgctcggaaaatccggcaaaaccagagc

SEQ ID NO: 4309 - DNA, 3975 bp, synthetic construct
  variation 1250..1251: note = note, n is a, c, g, or t
  variation 539..540: note = note, n is a, c, g, or t
  misc_feature 1..3975: note = Synthetic
  source 1..3975: mol_type = other DNA
aggccggcgccgttgtccagcacgggccctggagggagacgagttcagggaaccttcagcaaagcggggcggggctgatcgttcgagctgtcgtcaggacaccctcagtcacttcgaccgcgtcagcctttgctttgcgggggcaacttcgagcgaccgtggaggtctgacggcttgaccagaatcgagggaggaagggattgggagaggtccccaaaattgcccagtctcccgcaccaagatccatgagaaggcatcccccctcgacctagggccgagggggttatccttcggtggtaaaccaccttaccgtggtttcccaaccgactccccggttgaatgcttacggagacatacacgtattgtcaatatactgatcccatcatgcgcacgggggaacggccatgcagattcgggaagatttgacactgggattggatctcgggattgggtcctgcggttgggccgtcattcggcaggacgctgcgggtggagagattgtcggtctcggtacttggatgtttgacgtgccggaaaanncaactgcggcgtgaacatcgtggccagcgtcgggtaatcggccggcgccgccagcggatgattgcgattcgcgctctgttcagggagtcgggtctgatcgaagcgcacggcaaggatgccttgaaagtacccggcctcgatccgtgggcattacgtgtggccgctctggaccgcaaactgagcggactcgagcttgcagttgctttgggacacatcgccaagcaccgaggattcaaatcgaacagcaagcgagatcgaggcgccaacgcaccgcgcgattcgtcggaaatgctcagatcgatcggcgccacgcgtgagcgcctggcccgataccgtacagtcgccgacatgtttgcaaacgatgcggactattccaagcgtaagcggaatcgggatggcgactattcgcgttcggttttgcgtgatgatctagaagacgaagtgcgtctgctatttgcccggcaacgtcagtatggctctgccctcgcaacggaagagttcgagcagcgtttcgtcgagatcgctttctttcagcgcccaatttcagatagcgaggagaaggtcggcttctgccctttcgaggagggtgagaggcgggccgcgaagaactcctactccttcgagctgtttcggctgctgtctcggctgacggctctccgcattcgccgctcaagggacgagcgttccctgaccgccggtgagatcagcannggtgtatccaccgaggaggaagccaagcgcgacatcgttgcgcgcaccggcgacgctgcacctggcacacatgctctgcgcaagaccctgggtgatacttggcgagtaatgctctcctcgcccgcacagctggatcgaatcgccgagatcctgtcctttcgggaagacatgacctcgatacatggagggcttcaggagatcgggctcgacccgctcgttcttggcgcgatcatgaagggcgtcgaggaaggtgccttctcgaccttccgcggagcgggccatgtctcggccaaggcttgccgggcaatcatcccgcatcttcagcgtggcttagtatactccgatgcctgcaaggaagccggctatgaccacacgcgacgccctgcgacgcaactcgaagaaatcggcaatccaatcgcgcgcaaggcggtttccgaggcgttgaagcaggtgcgtgccatagttcaagagtatggattgcccggccgcattcacgtcgagcttgcccgcgacgtgggcaagtccaaggaagagcgtgaagagataacgcgcggaattgaacgaagaaacaaggagaaggagcgcctccgtaggcagttcaaggacgacgttggagtggagccggggagcgccgaggatctcctgcgttacgaactgtggaaagagcagaatggccgctgtctctacacggatcagccgatcccacccggcgcgatcgtcgccagtgacaactcggtacagatcgatcatatcctcccttggagccgttctggcgacgattcgttcgtgaacaagacgctttgcttcgctcaagcgaatcagaacaagaaaggtcgcacgccattcgagtggtttggccaggacatgccggtggcggcgtgggacagctttgtggagcgggtcgaaaccaacaagcagatgaagggccgaaagaagcggaactatctcctgaaggatgcatcggtgctggaggagcggttccgagccagaaatctgaacgacacgcgctatgcggcacgcgtgctcgcaggaacgctgagaaggctgtacccggctgacggaaaggcccggatctttgccaggccggggcctctgactgatcgtcttcgacgcggatggggcattcaggacctgaagaaagatccggccgggcggcgacttgatgacgatcggcaccacgcgctcgatgccctcgtagtcgcagcgacgagcgggtcggctctgcagcgactgacgctcgcgttccaggaggcagagaagcgcggtgatcatcgagacttccgcgaccttccgctgccctggccggggttcgtccaagaagcgcgggagaaggtgaagaatgtcttcgtcgcgcgcaacgaacgacgccgcgcgcggggcgaggctcatggtgcgacggtccgccagatggtcgagcgcgaaggcaagattgtcgtcttcgaacgcaaggccgtagaggcgctcaagctcggagacatcgaccgtatcaaagatccggagcgcaacttcaagctggtcgaagccctgcggaactggatggaagctggaaagcccaaggaccgccctcccctgtcgcccaagggtgatcccatcacaaaggttcgcctcagaactaacaagaagccagatgtgctcatccgggacggcgcggccgatcgtggcgatatggttcgtgtcgacgtcttccggaaatctaaacggaatggcgcatgggaattctttctggttccgatctatccacatcaggtcatggatgctgaaaactggcgggaaccgccgaaccgagccattcaagcgaactcggacgaaggcgcctggccgttattggatcacccctataagttctgctggagcttatatccacagaccctactggaggtcgtcaagcctgacggcgaggtcattgtcggttacctgcgtagcgttgaccgaaacaccggcgcgttcacgatctctccacatcataccaagtcagagattcgcaaaggaattggcagtcggacactgagagacatccaaaaataccatgtcgatcgtctcggacgtcggttcaaagtcgggctggagccccgcacatggcgtggcgcggtctgcacctgacaaagccgtcgcggcttcggttcgcagacggccaagtcgtcgtcgatcaggacgacggcgaagcacgattcgctatcgaagatgtggcttggatcgtgctcgactcgcccagttcgacgctcaccggcacggttctatcggcgtgcatgaccgccggggtcgcgctgatcgtgaccgacgacaagcacacgccggctggtatcgccctgccatttcatcggcatcatcggcaatctgacgtagcgcaacggcaggttgcgatgagcacaccgctcaggaagcgaatgtggcaggcaatcgtccgtcgcaagattgagaaccaggccgcagctttggattcggttggccaggagggcgcccgaacacttcgcgagatgttgcggcacgtcggctcgggagatcccgccaatgtcgaggcgcgcgctgcccggcattactggggtgcgctgtggccggattttcggcgcgacgatgatgctgatcgtcgaaacaagctgctcaactacggctatgccgttgtgcgttccggtgtcgcgcgagcagtcgtcgctgcgggtcttctgcccgccttcggtctcaagcatgcgagcgcgaccaatgctttcaacctcgccgacgacctct

SEQ ID NO: 4310 - DNA, 3800 bp, synthetic construct
  source 1..3800: mol_type = other DNA
  misc_feature 1..3800: note = Synthetic
cagttcgtggggatggagcggagcgcgctgcaccggaagttgaagcagctgggcgtgcattcggatgatcgtggggcgggataatcctgcgcccaggaaaacgcggctggaataagactgaccaccatgggtcagtcccgccgccgcccgtacagtagaatcccccggcatctgttgccagataccggggtaatccttcgatggtttcgaaaaaccaccttgccgtggctttcctaccgatttcccgttgaaacgatgcccttatggccccaccctgtcaagcaggaatgaacaaggggcagcaggtcatgcgcatttttgggatcgacggtggaattgcgaccatcggatgggcggtggccgacctgacggacgaaacgatggatattgtcgcggcggggacgcgcacatttgacgcgccggagacggataagacacgaacccccaccaacgccgtccgccgcctccatcgcggccagcgccgggtcatccgccgccgccgccagcgcatgacggagttacggcacctcttcgccgacaccggattgaccaccagtattgcccgcgacgctctggccccgaaagcagccgaaccaaggctcgatccctggcaattgcgcgcccaggggctcgaccggctgctcagcgggcctgaactggctgtcgccctcggccatatcgcccgtcatcggggattccgctccaacgccaagcgtgaggccggggccaatgccaacgacgagacctcgaagatgaagaagggcatcgccctcaccacggaacgcctcgccggctatggcaccattggcgcgctgtttgccaatcatcccgaataccaggaccgcaagcacaatcgcggcctcaatttcgaccgctccatcctgcgcggcgatcaggaggacgaggtccgcaaattgttcgccgcccaacgccgcctcggcaatgccgccgccacggctgagtttgaggctgactacgcccatatcgccttcacccagcgcccgctccaggacagcgagcatatggtcggcccctgcctgttcgaatccggggaacgctgcaccgcccgccgatcctatgcgtttgagatgttccggctgctgcagcggctgaataacatccgtcttaccgcgcggggacagaaggaggaccagaagctcaacgcggagcaaatcgcgctcgtcaccaaggacttcggcaagcagaagaagctgagctggaaatggctgcgcaagacgctggacctcgcgcccgcgacgcggttcgccggggtgtccgacaaggatgaagacaaggacttcgtcgcccgcgccggcaacgccgccgagggtacctatgttctgcgagctgtcgtgctgggcgaggccggttggcgggatctggcaaaaaacccggccctgcgcgaccgcatcgccgaggtgctgaccttccgtgaagaccctgcctccatccgcgccgggctggaggaagccggggcggaacggacgatcctggaccagctgatgcagggcgtggagaccgggaccttcgggcagttcacaaaggccggtcatatctccgcgaaagcggcgcgcaagctgatcccggggttgagtcgcgggctgatctattccgaagcttgcaaggaaatcgattacgaccacgccgccaaaccgggtcttatcctgggtagctttaacacgaaggaagagtggcgtgcgctgattgcggcgctgaacgatcaagtgcgcaatcccgttgcccgcaaggccgtcaccgagatgctcaaacaggcccgcgccatgatccaggcgcacggcctgccggattgcatccatgtcgaactcgcacgcgatatcggcaaaagcgccgaagagcgggacaaaatcaccaaaggcatcgaggaccgcaacaagcagcgcgacaaactccgcgccgaactggccgagctcctcggccgccagccgaagctcgacgacatgatccgcttcgagctttggaaggagcaggcgggcttctgcctctataccggcgatcccatcccgcccggcgccatcgccgccagcgacaacagcgtgcaggtcgatcacatcctgccctggagccgcttcggcgacgacagcttcatgaacaaaaccctctgtttcacacatgcgaaccaggccaagaaagaccgcacccccttcgaatggtgcgaggccgagggccgtgactggcccctcttcgccgcccgggtggaagcctgcaaggagatgaaaggccgcaagaaaggcgccttctatctgcgcaaaaacgcccaggaggtgcaggacaccttccgcacccgcaatctgaacgacacccgctatgccacgaagctgctgctggatttgctcgcccggctctatcccaaggacggcaagcgccatgtgctggcgcggccgggcacgctgacggccaagctgcgccgcgcctggggattggacgacctcaagaaaggccccgacggcaagcgcctcgacgatgatcggcatcacgcgctggacgccatcgtggtcgccgcgaccagtgaggcgatgctgcaacgcctgaccaaagcggcgcaggaggcggagcggcggggcatggcgcgcggctgggacttcgacgaactccgcgaacccgcggtcggctttcgggaggaggtgcgatcggtggtggacaaggtcttcgtgtcccgcgccgaccggcatcgggcacgcggcgaggcgcatgcggccaccatcaagcaagtgcggcaggtcgatggcgcggcggtggtgttcgagcggaaagcggtcgaaaagctcacgattggtgatctggataacatcccgatgcccgagccttacggcaagatcgctgatcctgggaagctgcgggatgaattggtggcgacgctgcgggcctggatcgaggcggagaagccgaagggggcgccgccgcgctcaccgaagggggatgtgatccggaaggtgcgggtggcgacgaaggacaaggtcgcggtgtccgtgcggggcgggacggcggatcggggagatatggcgcgggtggacgtgttcgcgaaggccaataagcgggggaaacgggagttctatctcgtgccggtctacccgcacgaagttgccggatcggcatccccaccggatcgggctccagcaccgcatgtcgacagggcaaactggaccccaatcgacccaacctacgacttcttgtttagcctccaccagaacagccttgttgaggcagtctcagcgaaaggccaagtcttttatggatatttcaaaggctatgacatcgccggcggaaacttaggagtagctacacccgagaactcgcgacaattgtccggacgtcccggggcaaaaaccctcctcagcttccgcaaattcagcgtcgatcggcttggacaagtgtcggaagtcaaagaggagatccgcacatggcatggcgaggcgtgcacataacccagccggcccgcctcgcccttgcggatggccagatcgtggtcaaccagggggatggggaggtccggctgccgatcgaagacgtcgcctggatggtgatcgacacaccgcaggcggcgctgacgaccgcgctcatcgccgcctgcatggatgccggcatggtgctgatcgtgaccgaccgcacccatacgcccagcggcatgatcctgcccttccaccgccatcaccgccaggccgacatcgccgcgatccagatcggcgcctcggccccgctgaaaaagcgcctctgagatcggaagagcgtcgtgtagggaaagagtgtcttcgcctgtgtagatctcggtggtcgccgtatca

SEQ ID NO: 4311 - DNA, 22145 bp, synthetic construct
  source 1..22145: mol_type = other DNA
  misc_feature 1..22145: note = Synthetic
ttgtacattacgtgttgacgaaccactggatcaaatttcttgatttccatttttcctggcattgtacgtttgtttttagtcgtggtataaaaatggcctgtaccagcacttgattctaatttaattttttcgcgcatgattcatgctcctagattttttggccgtcagcacgcataccagcaagcacggcatcaataccgtttttgtcgatagtgcgtaaggcattattagtaatgcgcatgcttacccagcgattttcgctctcaacccaaaatttgcggttttgcaaattaggtaaaaaacggcgttttgttctgttatttgcgtgagaaacattgttacccaccattggctttttgccagttaccatacatacacgtgccatggttaaatctccaaacttctgcttttttcgaaagaccgcaattatagtatgaaagcgcaatttttctcaagggaaatatcagttaaatactaatattattcatatttttgtgtttaacctacgtttagtgtttgcctgtgctaccaaaaccaccttcgccacgttcgctagcatcaaaatcgtccaccaaatggaattcggcttgcaccacaggcacaatcactaactgcgcaatgcgctccatcggattaagctcaaacgccgtgctaccgcggttccagcatgacaccatgagctggccttggtaatcagaatcaattaaacccaccaaattacccaacacaatgccatgtttatgcccaagcccagagcgaggcaaaatgattgcggcgtaataaatgttgtctaaatgaatcgccatgcccgttggaatgagcgtagtttcgccaggttgcagtgtaattgtgttgtcaatacaagcgcgtaaatctaaacctgccgagccagcggtggcgtatgctggcatttgctggcgtagtcggtcatctagaatttttaggtcaacaataattttcataagatttttgagggtagtgaattgagttgtttgaattataaatgatacgagtatgttattactaagcataaaatgcaaaaaaatcattaaaatcagtatggtgcttactatgttttgccagtaaaatgcgctccaaattataattttaaaataaaaatttaaagtaacggggcgttataacatgattcaaaataatagatttcaaaaattcatacttaataaattaactagccagctaatgttggcaggtctaatcggtgcggcaatgcctgttttggcggaagaggctgcactagcagagcaagctatacaaatgaagtcggtagtgattacgggtacccgagtagagcaaaatagttttgatttacctatgtcgattgatgcaactgatgcgcagaaaattcaagaaggccaattaaaagttaatttatcagaatcatctagccgcgtgccaggtgttgtcatcaataatcgtaataatccagcgcaagatttagctattcaagtacgcggcttcggtgcgcgttcagcttttggcgtccgtggcgtgcgtttatatgctgacgggattccgatgaccatgcctgatgggcaaggtcaaaccggcacatttaacttagatacagcgtcacgtgtagaatatttgcgcggcccattttcagctttatatggcaactcatcaggcggtgtggtgcaaattttcaccaaagatggtgcaaaagagcctgaagtgaatgcaggcataacttttggtagtaataacacgcaacgctatagcttaggcttaagtggtagtggtgacgggtttgatattactgcaaatgcaaactcttacaccagtgatggctttcgcgcccaatcagacaccagccgtcaatcaatgcacactaaaatcaattttaaattgggcgacaataccaagttagcaattgtagctactgcgttagatcagcctgataacaaagacccgcagggtttggatgcgacacaattaatagcaaaccgcaaacttgcaggtactggctctgagttatataacacgcgtgtttcacgtagccatgagcaaattggcacgaccttggaacataaatttacacccgatgatacgttacgcctgatggcgtattacggtcagcgtgaaaatgagcaatatcaatccgttaccgttggtgcgcagcgcaatgatttacaaggtggtggcgttgctacgatagaccgcgattttggtggtgtagatgtgcgttggacacgcagcggcaaagtaggtgaaaatgcttatactgtaaccgcaggtttgaattatgaccgcatgaaagatgaccgcaaaggttacgagaattttacgtcaaataaagcttttggtttgttaccatcaggggtagattgtggcaatgctgcaaaccaagtggtgtgtggcgtgcgtggcaacttgcgccgagatgaagttaacacggtaaaaaactttgaccaatatatgcaaggctcgattgatttaagccaaaagtttactttaagcggtggcttgcgccatagtaaagtaagttttaataatcaagataattacattgcaaatgcacttgcctatgcagggagcaaccccgatgatagtggctcaatcagctttagcaaaaccaccccagtgttaggtgcaattttcaaaattactgatacgtttaatgtctatgctaatgcaggtactagctttgaaacgcctacatttgtagaaatggcctataaagcgacaggttctggcttgaatctagatttaaagccagctaaaagccgccaatatgaagctggtattaaagcgtttattggtgataacactatagtaaatgcttctattttcaaaatagacaccgatgatgaaataattgtgcagcagcaagccgcaggtcgcacggtgtatcaaaatgcaaaaagcagtgagagaaaaggctttgaattgtcgctcgatagtaagtttaataatggtgtaggtgcatatttagcttatagctatttagatgcagcgttttcatcagactttactgcatgtaaaccatttgttggtggcaacaccgcatgtaatatcaatgcgcctgcggcggcgggtactcctggcaattctggaggtgaagtcattagcgcaggcgctaacattccaggcacatacaaacaaacattatttggtgaagtttcttggaaatatgcgccgattggtttttcaaccgctttggaagcacgtatgaacagcaaaacagatgtcgcctttaaaccgcaatatggtaatgcagcagggtatacagtcgcggcttggcgcggcggtttgacacaaaatctaaataaatggaaatttaacgagtttgtgcgtattgataacttgtttgataaacaatacgtaggttctgtgcgtgtgggtgatttgaatggccgttattatgagccagcaccaggtcgcacttggttgttgggcttgaatgcgagctataaattttaatatttagttaaaagttaaaaagcctcgtttttacgaggcttttttgtctgaagcatacatgctaactacgggtaggcttattctaattctaaggagctaaagtacttgaaaggtcgtatgtaggccgcgaatgttagcgaaatcattcgcggtcacagaccgctcctacaaaagcatgcctgctacatgctgtaacagcaatttggcaatttcaatttttggcgcacgtggtaaaacatgcgcgccgtttttatcgagtagcgtgacttggttgtcatcgctgcccatagcattagtggctaagtttgccacgattaacggtagctttttagcttggcgtttagcttcggcgtattccaacaaattttcagtttctgcggcaaagcctacgcagaatggcgcgttgggcaggctggcgacttcggccaaaatatctttatttgctgtgagttctagcgtgagcaatgacttacttttttttattttctgtgtgcttgggctggcgggcgaataatctgccacggcagccacgccgatgaaaatatcttgcgttgcaatattgcccattacggcttggtacatgttttgtgcgctggtggcggatatgtttttaacatggctaggcatggccaatgcggttgcgccgctcaccaaagtaacctctgcgcccatgtcagccgcggcttgggcgattgcatagcccattttgcctgagcttaaattggtgatggcgcgcacagggtctatcatttcaagcgtggcgcccgcggtaatgagtatgcgtttgccagccaataattttggcgtaaagtgcgcgataacgccagccaataatgcttcggcttctaacattctgcctaggccaacctcaccgcaagcttgctcgccgctggctgggcctaaaatgctgatgccatcggcttttaattggttgatattgcgttgtgtggctgggttttcccacatttgtttgttcatggcgggagctactaaaagcgggcaatcacgcgctaaacataatgtagaaagtaaatcgtcagcttggccatgcacgactttggcaataaaatctgcactggctggggctactaaaatcgcatctgcctcgcggcttagctcgatatgcggcatgccgttggcaatggaggaatcccacatgccaataaacacgggcttgccagacaatgcttgcatggttacaggggtaataaattggcaggcggcttcagtcattactacttgtacgtcaatattcgctttcaccaataggcgcacgagttctgccgctttataagccgcaatgccgccagtgattcctaatacaagtttgcctgaaccaagttttttgtgtgccataagagaattgttcattacaaaatgctattctaaaccatttcaaccctatacgcagattgcgcctgatgcagcattttaaactatttgttttactcttattattttgtattagtcatgcccaagcggggcgcatgaatcctgcgcttatggttgaagatatggctgtaaataaagtggcgccgcctgcgggcattatgtgcagagattgcgccgagcctaaactagcaaacaagccgcttccagcatcttcatcacgcgtgtggcagccagaagtgcatgatttagccacatggcagcaacttagcaagccgatgcgcgataccgaatatagcaagtttgtgatagacctaaaaaccaacaaaatttactttgtagatagtaatgtgtttactttgcatgccgattttgtggtggattatttgcaaaagataccccgtagccgcgcaaatatgctcgcttacaatcgcaattacagcacacaaaagccgcaatatattcttggctatttaacgcattaccctaaattaaacttaaacaatatcactcaagatttgtggacatactcattttgggagggcgacaccattacagctaaagacatcagccgcgcgcacaagcgcttgcagcaaacatttactgttgcgccattagtgtttaggccagattcctctgcacaagagcaagaggccaagcaactcaagccttttaaaattgccaccattaacaataatcaaatttaccaagctttgccgtatcaagcgtttaatacgggcagcgcgattggacgcttggtcattgtgtcgccaagtagcaaaattgaaaatttaagctttaatgaatatgatattgtgcttttacaaagcagctacccagatatttcgcccgtggcaggcgtaattactacacaattttctacgccgttatcacacgttaatttacgtgcaagtgcttggggaatcccgaacgccaccattaaaaatgcggtgcaagaatttaaaaaattagatggcaagcaagtggcttatgaagtgactgaagcaggctacaccatgcgtgaggccacggcagatgaggtcgcacagcatcaaaaagccaaattagaaaaagcaaaagtggtgatgccagaggctgacttaagtgcggctgccttgctgtcgctaaaagaaattagcgcaaaagatgccaataaatatggcgccaaaaccagtaatttaggtgaaatggtacgcgccaaattgccgatgaacgtgcaagatggctttggcgtgccgctaaatatccccgatgggttcggcattccgtttagttattacgtggtgcacattaaaaataatcagcttgaagccatcattcaagccatgctagcaaacccaaaatttatgcaagatgcctcgtggcgcaaagcttctttagaggcgctgcgtttaagcattaccaaggcgccaattgcgccagaaactttaaagaaaatcgccgcccaatggcagcgccaacttggtggcaaaggcgtgtttgtgcgcagcagcaccaacgccgaagacctcaaaggctttaacggcgcaggtttatatgacacagtgccaaatgtaaaagatgaaaaagcgctagaggccgccatcaagcaagtgtgggcatcagtttggaacttacgcgcagttgaagagcgcgcgcattttggcataccgcatgatcaagtgtacccagcggtactcatacaaactgccgtgaatgccgccgccgctggcgtattactgaccgccgatatatggggacaccagcccaccacgtacaccatgaacgccaaatggggtttaggcatgcgcgtggtagaagggcaaaaagtggccgagcaaattttgtttgattttagcaacgatggcacccgcgtgattagccgctcagatgaatccaccatgttagtggccagcccacaaggcggcatggtagaaaaacctgtgccaaaaggtgaagctattttgaccgaaaaacgcgctaaagtgttgggtgttctagccaagcgcgtgactaaaatattcaaccaagtagatgtgctagatattgagtgggtgctagaaaccaaagatggcaaagatgtcttttggctggttcaagctaggccttatgttgttaaaaagtagtctataaaaagaaagtaaaaacttatgtggaagaaaatcaggatcacgtttttattgctgatattagcaactgtagcgcaacaaacgtggttagataaagccgatttatcttggaaagataatttctacgtagcggtttacccagttaatgcagatggtagcgagaaagtgagcgcctacttacgaacccttacgcgtgaagattttgagccagtggcggaatattttgttgaagaagccgcgccttaccatttgggtttacgcaggccaattgagatgcaattaggtgcgcaagtgaatgatattccacccgcgccacctaacgatggtagcgtgctaggcactattatttggagtttaaagtttaggttttttgcgtggaataacagccccaaagtgaatgttaaacctgctattcggctgtatttgttatatcacgaccctgaaacaagcccgagattaagccattctacagcgcttaataaaggccgcattggacgtgtgaatttatttggtgatagtgcttatgccaagcagaatttagtaattttggcgcatgagttattgcatacgcttaatgcgactgataaatatgacttaaatacgagcttgccagcatacccagatggttttgcagaacctaataaaacaccgctttacccgcaagatttagccgagcttatgggtggctacgtgccagtgagcgaatcaaaagcggagattccaaaaagtttgaagcgcacgttaatcggtgagaaaaccgcgcgtgaaattggttggttgaagtgaaaattcaccaatgaaataacttaaattacgcccgagaaaaataaatgcctctgggagccgcctagataggggctcccagagcatcggaactcagtgcgcatatttttttggttttagcgatgtttatctgcggctaaataagattttaaaaaggaataacaaatggcaataactgactggccagccgccgagcgcccgcgtgaaaaactgattgagctaggcgcagaggcgttatcagacgctgaattgctagccatatttttgcgcgttggtgtagtaggtaaaagtgcggtagatttagcccgcgatttactcactaaattcgctagtttaaatggcatatttgccgcaaccgagcatgagttaagccaagtacacggcataggctcaagcaaatacgtgcagttgcaggcgatttttgaaatgagccgccgcgcattaagcgagcaactgcaacagcgcgatgtttttgaatcgccccaacaggtgcgggattttttagtgctaaaacttggcagtctaacgcgtgaagtatttttagtgctgtttttagacacgcacaaccgcctaattgctacagaagaaatgtttagcggcacgctcacccaaaccagcgtttacccgcgtgaagtgctaaaacgcgtgttgcatcacaacgccgccagcgtgatttttgcgcacaatcacccatcaggcacggttaaacaaagttcggcagatgaattgctcacccaacaattaaaacaagccctcgcgctagtagatgtgcgggtgctagaccattttattgtggcgggcaataatacactttcgtttgtagagcgcggcttgttgtaaactaagcagatgactaggaatcaacatggcgatagataatgcactttggcttaatttggctgtggccttaggcatcgggctgttaatcggcgcagagcgcgagcgtagcaagggcactggggctgataggtcggcggcaggtattcgcacatttaccattgctgctttgcttggtgcagtcagtacgctgatagatttttggctgctggttgtttctattatttgcgtcacaatttttgctgccattgcttatttcaaccgaaaaaatgaagacccagggctaaccacagaaatcaccctagtatttacggtaattttgggtgggcttgccatgaccgaggcttcattagcggcaagcttggcggtaagcgcggctatattacttgcggctaaagagcctattcatggctttgtgcgtggcgcggtgaccaaagaagaaatgatagattttcttattttggccgccgccacgttaattgtattgccgctgattcctaacgaattagttggcccatttcaggcaattaacccgcgcaatctttggctgattgtgatttttgtgatgctgattggcgcgcttggtcaccttgctttacgctggtttggtaggcgcataggtttgccaattgtagggctggtgtcaggctttatttctagcattgccaccattggcgcgatgggtgcgcgcgcacgagaaacgccagccttgctaggttctgcggtggctggcgcagtgttatcaagcttagctactattttgcaacttgcgatgttgctcgcagttgtccacttgcccacattgcgcacattagcggcgccacttatttttggcggaatagcttcaattacttatggattagtcgtgaccataaattcactacatgaacaagatgcagtaatggataagccaagccgttcatttagtgtaaaaaccgcgctaatattggcggcagttatcgcgcttgtattggtcgcctcagccgcgctaaaaacatggtttggtcaagctgggctagtggttgcttcaggcttggcgggcttggcagacgtgcatgccgcgactatttcaattgcatcgttagaagcagcaggtaaattagcccctgaaaatgcagccattcctattttggttgctttttcaattaacgcaatttcaaaagcagtcacggcggtggtgagtggcggcaaaacattctcgaaattagtcatacctggcttaatcatacaggtttcagccacatggtttggttggtggttgttttaaactgttgattggtgatgtatagttggtgcggtatttattaaaaggatacccccaaaaatttgcattcttgggggtgtgaccttacgacatttaagtcttattatagcaacgtgccccattccgaaggattacgttgaaagaatgatagcactaaataatactaaaaaggggttttatggcacttgtttttggtttggatattggcattgcatctattggttgggctgcgatagatgacacgcaagaaataacaccattgcttggtttagggtcacgcatatttgtggcggccgaagtgccaaaaacaggagagtcgctagcaaagccaaggagggaagcacgtggaatgcgccgccgcattcgccgtcgtgcgcatcgcatggcgcgtattcggcgattattctatcgtgtgggtttaatcaatgatgttgtgccagaagttttatctgatattaccgcagatgatttaacgccttggttactacgtgcagatggcttagaccgccagctaaaccagcgcgattgggcaagggttttgctgcacattgccaaacatcgtggttttaaatctaaccgaaaaagtgaagcgagtgataaagaaggcggtaaattattacaaggcgtgacaggtaatgccaaacttttgcacgataaaaactaccgcacgattggtgaaatggtttggaaagatgaaaagtttgcagaacataaacgtaacaaaggcggcgattacagccacactgtcgcgcgtgatgatttgttgcttgaaataaagactttatttcaagcacagcgcaagctagggaatacctttgcacaagctgattttgaagaagattacaccaaaatttttgcctcgcaacgcccagtggacgatggcgaaattgcagatatggtgggcttttgcacgtttgagcctgatgaaaaacgtgcagcaaaagccacttatagcgcagagcgttttgtgttgctctcacgcttaaataatttgatgctgattgaagcgggtgaacgccgcgtgttagatgcggcgcaacgcaaaaccatagaaacgatggcgtataaatcggttaaagtgaagtatcaacaaattcgcaaagctttagagttgccagaatcaatacgctttaacttggtacaatataaaagtggtgaaattgataaatctgaagatacgacttttgctgaacttaacgcgtatcataagcttaaaaaagtaatcacagatagctgtggagagcttgcttggggcaacctcaccaatcaacccgacaaattagatgcgattgccaccgcgctcacttggtataaaagcgatgacaaaattcgtgaaatacttgcacctgaacaattagaaccagctttgctagatgcagtgttggcgtgttcgtttgataaagctgtggcgttgtcacttaaagcattacgcaatatcaacccatttttagcgcgaggcttgcgttatgacgaagcctgcaccgccgcaggatatgaccattccacgcccactgaagcgcagccacagcaatttttacctgtgattccaaccgatgaagtgcgtaaccccgtggtgctacgtgcgcttacccaagcccgtaaagtgattaacgccatgattcgcaaatatggtagcccgacgcaaattaacattgagctgtcacgtgagttatcgcaaccgtacagtgaacgcaaagagattgaaggcaaacaaaaagagtttcaggcagaaaaagagcgcacggttaagcagtttaacgatacctttgggcgcgacccgcgcggggatgagtttaccaagttcagattatggcgtgaatataattattgcgcttacagtggcgcatatttagagccagcacgtttgctagaagaaggctacgccgaaattgaccatattttgccttacagccgcagcatggacgacagcttgaataacaaagtgttatgcaccagcaaagccaaccgcgacaaaggcaataaaacgccttatgaatacttaaacggcgcatccgcaagcccgcaatggcatgaatacaaaatacgcatagaaacgcacaaagcctttaggcaagccaaacgtaaccgcttattgcgcgtggattttgacgaaaaagccgagcaggaatttagagaacgtaacttaaatgacacgcgctacattgcgcgctttttgcaagagttcttaaaacttaatctgcaatttgcaccgagtgaaaacaaaatcaaagtacaaacccgcaatggcgcggtgacgtcatttttgccgcccattggggtttgcttaaagtgcgtgccgatggagacttgcaccatgctttagatgccgccgtggtagcttgcaccacgcaaggttttgtaaagcgtgtatcggattattcgcgtagaaaggagttatgggcgagcgataaaaaagctggcgatagcacgcgtaatttagaaattattgatacggatactggtgagattgttgcaaccaattatcagaaaaaagacgggcgagattttccattgccttgggcagattttagacttgatgttaaagacgcattggatgaagtatttgtctctcgtgcgcccacacgcaaggcaacaggcggtgtacatgatgagaaaattcgctctactaaacgtatgacgggtgaaaagccagtcaccaccagcaaaaccaaattgcaagatttaagcttagctagcatagaaaatatccccgaaaaagaaacgcgcaacgccaatttatacgaggccttgaaaaaacgcatactgacaggtggcaaagaaccgtttgctaaaccgttttacttaggtaaaaacggcgaagaaagcgacgacgcttttggtcgtttaatcaaaggcgttaagttggagcgcaccaccaaaacaggtgtgctagtgcgcggcggcttggcagacaacggtgaaatgttgcgtgtggatgtgttcaccaaagcaggtaggttttatctagtgcctatttatttagccgaccgtgttagcggcgtgttgccgaataaagccattaaacaggcaacgctagagcaagattggcctgaaatggatgagacctatcagtttgcatttagcctttgtaataatgatttgattttgattagtgataaagatggcgacgatggggcatttttgcgtggttactttaaaggggcgcaccgtggcacaggtgctattaacattgaggggcatgataggtcttggaaaaaagagggtattggcgttcaacgacttgcagctttcaaaaagttacaagtagatgttttaggtaacgtgtttgaagtaaaacaggagccacgccatggcttggcagaatctgctgattagccgccctgcgcggctctcgcttaaaaaccgccagctacgttgtgagcaagaaagtggcgaggtgaatttggcgctagaagatattgccagcatcgtgttggaatcgccgcaaattacgctcaccagcgccttactttctgcatgtgctgatgaaaatatcgccatcattacctgtaatgaaatgcacacgcccaacggcttattcaccagctttttaccgcatagccgccaagcgggtatgttgcgtgcgcaaatcgcttggtctaaaccgtttaccaagcgattatggcagttaatcattaagcaaaaaattactaaccaagcggctacattaaagttatgcggcagggaacacgcacgcttaactagattagctgctgaggtagatagtggagacagccaaaattgcgaggcacaagctgcacgactttattttaatgtgctgtttgatggcatcaaccatgatgcgtttaaacggcatggcgaagatttacccaatgccgcacttaattatggctacgctattttacgtgcagccattgcaagggagctggtgcagtttggctttatcccagccttaggcatgcaccattgcagtgagcttaacgcctttaacttggccgatgatttaatagagccgtttcgcccgtttttagatgcatatgtgagcatcaataatattgggcagcaactagataatgcagacacaggtttaacgctgcaagagcgtgcaagtttggtacaaagtttgcaattggcttgtatggtggcaagtgagcggcacaccttgctacatgccattcatttaatggtaaaaagtttaagtacagcaacagagctagttaaagccgacaaattactaatgcctactatgccgcgtgagtttggtattaaagtgatgaattgattgtgatttaaagataggggtttatatgcataacaccctaaagatagaatataacgattttttcacgccatcaaaccgacagaaagtagggtagtattagaaataggatgaatattacaaacaaaaaaggcttgaaagcagcttgtttattagggttgagggtaaaacaaataaattttgaatttaggatgaaattgtttaaattttcgtaattaaatacagtttattagatttaattaaataaaataatgcaggataaataccagtttaatgacatttaatagataaacaaatgcctatttaacttgattcaaaacatctattaaatagtcactaattgtttcttcaatcatctgctcatcaccgaaagaaattcctaaaaaaggccgtgaaggaatatcaccccatgggattggagcattacgttttgttctaccaaatgcacctttttttgcaccaaattgttgagtagcggcatactctaaagtagaaaatatagttaaggtattgccttcttcagcatagctaatttggtcacgtagaataccgttatcaattaaaggcttagtaccacgtttgcgtataagtgttagtggactgttaggtgcccatgctttaccatcggggccacgactttcattaaagcgattcttagttgatttaacaaggtcttcaccaattgaaagcaatgcagggcgcggattagctgaagcattagctagcttacctaaggcttgtaagactgttttattgtcaaatttgacttctatcatcgtttagccttaaaatgtttgtggtggattcgttacggacgtaagtatcaagggttgcaaagcaaagcactgataccccacctttctatttttttataagctttataaccattgaaatcaactgtaagcttttgttacgcttaccatttaatacctgaaatactaatctataagtttcattttcaactagctttgtaaaaactaacgttggttgattatgccttgatatatcgcctaagcgtacatcatcataattatttaatatttcataaataagggtaaagtccttaggcaatgctgggcgctgatttccgccatcgcttccatgactatattcaatgtgccgtactgagtctgctggtagtaatattaaatagcctaataaatttaaatctaatttttgtttaatatcctcatatttttcaaaaaaaccaagccaaagtggctcaatagttgatttgttacttagtgcatttaaagcaaaaatatcagcaggggttgatactgcaatttttctattaagctccctacttaatgcttttgctattgctggtggatatttaattaacttatcctgtataaagctacgtagtggcgtattaacatttccccctggcgcatagccaaaacctttatcaataccaatatattcacctgttttagggtcaaccttatcccagccatcgggcttaatagccttaccttgtgcctgtgccgcacgataatcacgcgcgctggcgctttcaatacggcaatggcaaaaccagccattgggcgcagtatggctatcccaaaatacatcatcagcaggcaaggtaataccattccagctttggtgcattaggcgtggatggcgtacaccatcagcatgtacataagtacgatatggccgcattttaagcaagtcagggtcattcaattgcttttgacggccagcggcataactggtgctcatattggtctgatagataattttactgcgccaatcacggccttttttactgccttcaccagtccaacctatccaaccatgctgatcaacaatccgatcaaactcattttgaaaccactttaagcttttgccctgctcaatcgcctgatctactgcgctacgaaagctatcaagcaaatctgctttagttgcccctgcaataataaaagcacgatcatgtgctgatttaaaaacatcatcccagcgttcacttggcagatttattttttgtctaaaaaaatctacctgctcttgaaatggacgattaaatgcagcgtcaattgccattattcacatcatcaataccagctaactctgctgcagcaaaggctacttccatcacttttgtcaggtctgctgtatttaagtctgcaaagctatttaataggtcatcacgcaaggtttcaaggcttgtagcattttcaataattactttaatactatttaatatagcattccatgctggtgcagattcacgtgacaattggttttcacgtgctatttgattgagtgttatattatctgggttatctatagatagcattgccaacctaatcagcgctgcattatcctgcgtaggtactactggtgccgctttacccaatatcaatgccttagaatcagcacgtggtatttgtaaagcttcatgggcatagtcaacatcaatctgcatacccatttttgaggctttatctagtacatctaccattttttgctggtcaactgattcttcagtttggtacttaaatactggcatgcggttttctgcaaacatgccattaaatagtatgattggttttactaattgctggttaatcgtaggttcaatttggcgtacatcgtgcattaaaatctcacggcgtactttgtcatacatcataatgcgggcttcactggtagatttaccatctagctcaccgcctaaaatggcttttgattgcttagcttcccaatattgaatagtgcttaaaaagtcatctactttaccagcttgtgcgctaataaaatcaatgctcatagtgctaggcactacaccagcaccatcattaccaatgttgcgcactgcacgtaatagctcatcgcgctgtttaggtgctatgccacttgggtatttacctaagcgtagtggtaaaccgtaaacctctaaaaagcgttgcatatcacgctggttataggctttataagcataagtccaagcgagtactctaaacaaagcagcttgttcaatgtaaccagactttgcacgatgctcatgcataatccagccattttggcgtaatggctctggcataccttgtttcatgtattgaatttcaccagtttcacgcactattttaaagtagcgctgtggcacccagaataagtttttaggtaaccattcactacctgttgcccactcaatctctagcgctgcaaagcccttgccaatggcatctgttaagtcatattgggcatcttcaaagcgcggaattgatgcaatcatctcacttaattcttcagtgcgggtaatttcagcttgcgtagcatctttaggtgcatgcagttgccagcctaggcctgtaacagcgcggcggcgctttgaaagctcactaaaaatatgtgaatcttgctcttcaataagctcaaatagagtagattggtcatgaatatagccttggtctgccagtgcaaatgcacctgctaggcggcttgggtctagcgtattgactgagcgataattcagcgtattcatattgcttgagcgtgggccagcttgaagctccatatctagctgagcaatattttgtttattattttttacaagtgcggccttacttgctttattttttctagtcatcatcatcccaatcatcattattattgctactgcggcggctggtgctacgctgctggctatggttgcggccaacgcctgtatattcccactcaccgccaaattggttgcttattttccaaagcatttcaagggcatctgggccatcatcatgatcagcttctgggtaaaatttaagctgctctaacatggtactttggctacgatgcaagcgaattaagccattattgatatgtggctgcatgctgataatacgtaagtctttatcgttatcaggcgtatgtggaataccagggaaagcaatgccacgcagtgccgcttgttttaaaatttcagtaaacataaagtactgaaactgcacggcttctactgcccatgccacgcagttatattctgtttgcaagtcaatagcacggctgataattaggtctggcacacggcgttgaatatcagcctctactacatctagtaccatggtattgcggtttaaaccacctactaaaatagctgaagggtcgccagttttgccttttttacccaagcttgggtcaattgcaccaaagaatacccactcaggtaagcgattaacccaaaactgaatatctttaaatggtgcgctttcatcattgccagcttcattttgttgctcttggctaaatgaatcatggttaatggcacgcatgcacattaggcgatatagcgagcgcacttgtggccagctgactaccgcacctgcattcatagcagcttcattggcttggtaaaaggctaaggcttcagcctctgaagatattttttcatcatcttcaccgctacgggtaaagatgttttcccatgattcccacagtgccatattatcaggccacaccatgattgatttgaacacgcgcctacgccagcctggtgcgcgtgatacacggttaatcgccgcatcgtaatgtaggctagtacccacccaaaatacatccataccgccgctgggtggtgccaaacctagcacggcgcttaatacaaacttttcagttttatcgcgctgggctttttgtttgacttgctcgtcattttctaagtcatctaaaaaaataaggtctgggcgatatgggccatgtttcataccacgtatttttttaccagtgccaccaatgcgaattttaatattgttagcagtaatagccatagtggcttgccataccttgccttggcctgtagcctttggaaaatccatcgccaaccgagggttggtatcaagctctgctttaatgctctctagcatttcagcggcttgctcttcggtattcatgataatacctatcatatgcttgcgattggtgacaatgcaccataatgagcctagctgtgtttcataggtagattttgcttcaccgcgcggggcttcatgcacctcacggccatcggcatcgccatctataatttcaggtaaacgtttaaaaataaactgctgaaataagctaaagtgtggcgttggtacatagtgcggaaagtaggtttggcaaaagtattgatagtcagtttgcacgcgtgctacccgtgcttggctagcaattgggtctagtgcaaaggcttcacactcaatttcaatttggtcacgcaggctttggccaagctgtgccagcgcctgcataaactctttgtttgagttaatcggcgtaatatcatctaaatcataatcagtattggccatgcttacttgccgtaacgctcttgtagaattgcgccaatatcttcaatatggatttgaaagccatgtaaagccactttatcgttacgcgctaagtactcagctactgttttaagtgtatcaagcgatacgctgagcgcacctaaacgtgggtttacacggctaaatgacttgctgaattttgcataggcatctgccaagctagccattaactcagttttttgttgtggtgaaattttagtgtcttcaagctcacgcattgtggtaacagcttggcgggcaaagtattcaactagctgctcattaaggtcatcaatgccagcaccactaatactgaatgctgcacgggcagtatcccagtcatcacctttatctttggctagctgcttccaattacgagcagtttcatagcttacctcataggtaagcgaaacattgctaagcggcaggccttcaatataaaggcgacgtacattattacgcgtgtcttggctatgggccatttagcgaaatgccttaattaactcaaccatgccaaacgttaatgcagcgctaatgccagcaatgactgcgccttgttttgaggttactttaatggtttctttttcgctggcttctaatatttttacacggttacctaggctatctaccttggtattaaggcggttttctaggtgatgcatgctctcttttgtgctgtcttccatgcggcgcatatcttggcgtagcgtattaaagttatctgtaatgctcgagtgcattatctctaatttgcctgttagcaacccaatagtacgggcaacttctgccatatcaccacgcctattatcttgatttaaaccatctgacatatttaacctttggtattattggggttgaggggcttacttaaatttacgttgtgcttgttcaaaataggtttggcattcaacacagcggtttaccccccccattttttggcggcgtagtggtatggcatcaccacaatcttggcagtgtgagagtgtagttttaccttgctttttaatttggttggcaatggcagcattacggctttccatttcaagctcttgtgcgcgatctaaatcatccattattgagcgcctaagctttcaacatgaccatagcattgcatgagcaggtctttaacatagttgctttcaattatggcttggtcggcgcttcgcccaatggcgagaatatctgcagtagctgagtcagatagttcggctcgcgtttctgtaagagctgggctgaaactggtggtagcgctgccagttgtaccttcacaggttggcacggcgcgggtactgactgacaagcggcgagcgccgcgctgaatatcagcaataatgctagctgcatgggctttttcatcttgaagtttcccttcataaatagttttgagtgaggcggcttgcagcacggcagcacgctctaaatcacggtttaggctgttggctactaatagcttttgttgcacggctagcagctcaatattttgcttggcttgccatttatggcgctcatgtgaagcccctgaaaagtagaagctagcaagggaaacaccaatgagtattaccgtgccaatcaacaatggaatattgagattaggcataaagtttgctagccatttcatggtgcgcaccagtcatttttagcgcctttgccaaagtacggcacagcgtagcctgccgctatcatggcttgtgctaaatcaacatcgcgccaggtaacatcggcatcaatgcggccaccgtatttatcccactttgggttatttagcgtgagtacatcaccttgtttaaccaagccttttaagtaagcggtagctagcttagctttggctttttctgcagggcatttacctgccagctctggcgtatcaataccgcgcaagcgcactgccatattggccagcggcatgggtagcgtatcgctgagtacttgaatggtgtcaccatcatgcacacggcgcacttcaacagtaaaagcttgtgcagtgctggttgcaagtaggcttaaaaaagccacgagtaaaatagggtttgaatgtattttcattagagtttgattccttgcgtagtgataattcttaacatggcattgccaattgtaagcatggttaagccatagccataaacgctgccagtaatatagggctgcagtagattagcgctggcttcaagcgctgctaggccagcaattactgcgttaaaccataaggttttgctggtataccaaggtttattttcagtaacgtaaacttcagttgattcaggcatttggtggctccttgaatagttgtcgttcatccatgcggcgcttgaataaacctttgacgaatactgccttgccaagcacgtgcatataagaccacttgccaaactcattggctgcgcctgcacggtcacccgcttgtagttttttgagtaaggtagagccatctagcgcgcccacacccaagttaaagctgaagcataccaatgcatcaaactcattttggttaagtggtaggcctttgattttggcgggtgataacacggcattgatgaagagttcagcaatgtttaaatctgcttttaaaaaggcttcagcctgcgcaagcgtgataccgctaccaagcttaaggccgttgcttgggcgtactacatgaccccagcctacggtaagctttttagctgggcaaaggtaaacatcggcatgatagccctcccattttttaatgaggttgatgccgcgcggtgaggtaataaagttgcttgagttcatacgtgcaactg

SEQ ID NO: 4312 - DNA, 8544 bp, synthetic construct
  misc_feature 1..8544: note = Synthetic
  source 1..8544: mol_type = other DNA
aaatcgcatctgcctcgcggcttagctcgatatgcggcatgccgttggcaatggaggaatcccacatgccaataaacacgggcttgccagacaatgcttgcatggttacaggggtaataaattggcatgcagcttcagtcattactacttgtacgtcaatattcgctttcaccaataggcgcacgagttctgccgctttataagccgcaatgccgccagtgattcctaatacgagttttttgtttgccataagaaaattattcatcacaaagtgatattctaaaccatttcagatacctacgcagattacactggatagttgatagcaactaaaagatggcaaagatgtattttggctagtgcaagttaggacgtatgttcagcgaaccgctaagattaaaaaaataacaccatggtcattgcgagcgtagcgtggcaagctaacacttttagattgccacgctacgctcgcaatgacgaaaaacaaacaaaactttgaaagtaaaaacttatgtggaagaaaatcagaatcacgtttttattgctgatattagcaaccgtagcgcaacaaacgtggttagataaagccgatttatcttggaaagataatttctacgtagctgtttacccagttaatgcagatggtagcgagaaagtgagcgcctacttacgaacccttacgcgtgaagattttgagcctgtggcggaatattttgttgaagaagcagcgccgtatcatttagggttacgcagaccaattgaggtgcaattaggtgcgcaagtgaatgatattccacccgcaccacctaacgatggtagcgtgctaggcactattatttggagtttaaagtttaggttttttgcgtggaataacagcccaaaagtgaatgttaaacctgctattcggctgtatttgttatatcacgaccctgaaacaagcccgagattaagccattctacagcacttaataaaggccgcattggacgtgtgaatttatttggtgatagtgcttatgccaagcaaaatttagtaattttggcgcatgagttattgcatacgcttaatgcgactgataaatatgacttaaatacgaggttgccagcatacccagatggttttgcagaacctaataaaacaccgctttacccgcaagatttagccgagcttatgggtggctacgtgccagtgagcgaatcaaaagtggagattccaaaaagtttgaagcgcacgttaatcggtgagaaaaccgcgcgtgaaattggttggttaaagtaaaaatacaccaatgaaataacttaaattacgcccgagaaaaataaatgcctctgggatccgcctagatgttggctcccagagcatcgaaacggagtacgcatatttttttggttttaacgatgtttgtctgcggctaaatatgattttaaaaaggaataacaaatggcaataactgactggccagccgccgagcgcccgcgtgaaaaactgattgagctaggcgcagaggcgttatcagatgctgaattactagccatatttttgcgcgttggtgtagtaggcaaaagtgcagtagatttagcccgcgatttactcactaaattcgctagtttaaatggcatatttgccgcaaccgagcatgagttaagccaagtacacggcataggctcaagcaaatacgtgcagttgcaggcgatttttgaaatgagccgccgcgcattaagcgagcaactgcaacagcgcgatgtttttgaatcgccccaacaggtgcgggattttttagtgctaaaacttggcagcctaacgcgtgaagtatttttagtgctgtttttagacacgcacaaccgcctaattgccacagaagaaatgtttagcggcacgctcacccaaaccagcgtttacccgcgtgaagtgctaaaacgcgtgttgcatcacaatgccgccagcgtgatttttgcgcacaatcacccatcaggcacggttaaacaaagctcggcagatgaattgctcacccaacaattaaaacaagccctcgcgctagtagatgttcgggtgctagaccattttattgtggcgggcaataatacactttcgtttgtagagcgcggcttgttgtaaactaagcagatgactaggaatcaacatggcgatagataacgcactttggcttaatttggctgtggctttaggcatcgggctgttaatcggcgcagagcgcgagcgtagcaagggcactggggctgataggtcggcggcaggtattcgcacatttaccattgctgctttgcttggtgcagtcagtacgctgatagatttttggctgctggttgtttctattatttgcgtcacaatttttgccgccattgcttatttcaaccgaaaaaatgaagacccagggctaaccacagaaatcaccctagtatttacggtaattttgggtgggcttgccatgagcgaggcttcattagcggcaagcttggcggtaagcgcggctatattacttgcggctaaagagcctattcatggctttgtgcgtggcgcggtgaccaaagaagaaatgatagattttcttattttggccgccgcaacgttaattgtattgccgctgattcctaacgaattagttggcccatttcaggcaattaacccgcgcaatctttggctgattgtgatttttgtgatgctgattggcgcgcttggtcaccttgctttacgctggtttggtaggcgcataggtttgccaattgttgggctggtgtcaggctttatttctagcattgccaccattggcgcgatgggtgcgcgcgcacgagaaacgccagccttgctaggttctgcggtggctggcgcagtgttatcaagcttagctactattttgcaacttgcgatgttgctcgcagttgtccacttgcccacattgcgcacattagcggcgccacttatttttggcggaatagcttcaattacttatggattagtcgtgaccataaattcgctacatgaacaagatgcagtaatggataagccaagccgttcatttagtgtaaaaaccgcgctaatattggcggcagttatcgcgcttgtattggtcgcctcagccgcgctaaaaacatggtttggtcaagctgggctagtggttgcttcaggcttggcgggcttggcagacgtgcatgccgcgactatttcaattgcatcgttagaagcagcaggtaaattagcccctgaaaatgcagccattcctattttggttgctttttcaattaacgcaatttcaaaagcagtcacggcggtggtgagtggcggcaaaacattctcgaaattagtcatacctggcttaatcatacaggtttcagccacatggtttggttggtggttgttttaaactgttgattggtgatgtatagttggtgcggtatttattaaaaggatacccccaaaaatttgcattcttgggggtgtgaccttacgacatttaagtcttattatagcaacgtgccccattccgaaggattacgttgaaagaatgatagcactaaataatactaaaaaggggttttatggcacttgtttttggtttggatattggcattgcatctattggttgggctgcgatagatgacacgcaagaaataacaccattgcttggtttagggtcacgcatatttgtggcggccgaagtgccaaaaacaggagagtcgctagcaaagccaaggagggaagcacgtggaatgcgccgccgcattcgccgtcgtgcgcatcgcatggcgcgtattcggcgattattctatcgtgtgggtttaatcaatgatgttgtgccagaagtcttatctgatattaccgcagatgatttaacgccttggttactacgtgcagatggcttagaccgccagctaaaccagcgcgattgggcaagggttttgctgcacattgccaaacatcgtggttttaaatctaaccgaaaaagtgaagcgagtgacaaagaaggcggtaaactattacaaggcgtgacaggtaatgccaaacttttgcacgataaaaactaccgcacgattggtgaaatggtttggaaagatgaaaagtttgcagaacataaacgtaacaaaggcggcgattacagccacactgtcgcgcgtgatgatttgttgcttgaaataaagactttatttcaagcacagcgcaagctagggaatacctttgcacaagctgattttgaagaagattacaccaaaatttttgcctcgcaacgcccagtggacgatggcgaaattgcagatatggtgggcttttgcacgtttgagcctgatgaaaaacgtgcagcaaaagccacttatagcgcagagcgttttgtgttgctctcacgcttaaataatttgatgctgattgaagcgggtgaacgccgcgtgttagatgcggcgcaacgcaaaaccattgaaacgatggcgtataaattaactaaagttaagtacagccaaattcgtacagctttagatttatctgcatcagttcgttttaacttggtgcaatataatagtggtgaaattgataaatctgaagactcggcttttgccgaacttaaagcttatcataaacttaaaaaagtaatcacagacagctgtggcgaattggtttggggcaacctgactaatcagcccgataagttagatgctattgccaccgcgctcacttggtacaaaagcgatgacaaaattcgtgaagtacttgcacctgaacaaatagagcctgctttgcttgatgcagtattagcggagtcgtttgataaagctgtggcgttgtcacttaaagctttacgcaacattaacccatttttagcgcaaggtttgcgttatgacgaggcttgcactgcggcaggttatgaccattccgcaccaacagaagcgcaaccacaacaatttttaccttatattccaacagatgaagtacgcaaccccgtggtgctacgtgcgcttacccaagcacgcaaagtgattaacgccatgattcgccgttatggtagcccaacgcagattaacattgagctatcgcgcgagctgtcccagccatacagtgagcgcaaagatattgaaggcaagcaaaaagagtttcaggctgaaaaagaacgcacagttaaacagtttaacgacacctttgggcgcgacccgcgtggggatgagtttactaagtttagattatggcgcgaatataattattgcgcttatagcgggacatacttagaccccgcgcgtttgttagaagaaggctacgccgaaattgaccatattttgccttacagccgcagcatggacgacagcctgaataacaaagtgttatgcaccagcaaagccaaccgcgataaaggcaataaaacgccttatgaatatctcaacggcgcatctgcaagcccgcaatggcatgactataaaatacgcatagaaacgcacaaagcctttaggcaagccaaacgtaatcgcttattgcgcgtggactttgatgaaaaagccgagcaggaatttagagaacgtaacttaaatgacacgcgctacattgcacgatttttgcaagagttcttaaaacttaatctgcaatttgcaccgagtgaaaacaaaatcaaagtacaaactcgcaatggcgcggtgacatcatttttgcgcgcgcattggggtctgcttaaagtgcgtgctgatggagacttacatcacgctttagatgccgccgtggtggcttgcaccacgcaaggctttgtgaagcgtgtatcggattattcgcgtagaaaggagttatgggcgagcgataagaaagtaggcgataacacgcgtaatttagaaattacagatactgatactggcgaaattactgcaaccaattatcagaaaaaagacgggcgcgattttccgctaccttgggagaactttagggcagatgtgaaagatgcgctgactgaaatttttgtatcacgtgcgcctactcgtaaggccacaggcggcgtgcatgatgagaaaatccgctcaaccaagcgcatgacaggtgaaaaaccagtcaccaccagcaaaactaaactacaagatttaagcttggcaagcttagaaaatattcctgaaaaagaaacgcgcaacgctaatttatatgaggctttgaaaaagagaatagaaacaggtggtaaggagccgtttgctaaacctttttacctaggtaaaaacggcgaggaaagtgacgacgcttttggtcgtttaatcaaaggcgtgaaactagagcgcaccactaaaacaggtgtgctagtgcgtggcggcttggcagataacggcgaaatgttgcgtgtggatgtattcaccaaaacaggtaggttttatttagtgcctatttatttggctgaccgtgtaagtggtgtgttgccaaataaagcgatacgcgctgcaacgctagagcaagattggcctgaaatagatgagacttatcagtttgcgtttagcctttgtaataatgatttgattttgattgcagataaaaaaggtgaagataattcttttcttagaggttactttaaacgggcgcaccgcggcacaggcaatatcaatattgaagggcatgataggtcttggaaaaaagaaggtgttggtgttcaaaacattggcaccttcaaaaagctacaagttgatgttttaggtaacgtgtttgaagtaaaacaggagccacgtcatggcttggcagaatctgctgattagccgccccgcgcggctctcacttaaaaaccgccagttgcgctgcgagcaagacagtggtgaggtgagtttagcactagaggatattaccagtgtggtgctggagtcgcctcaaattacgcttacaagtgcgctaattgccgcttgcgcagacgaaaatatcgccattattagttgtgatgaaacccacacgcccaatggtttattcaacagctttttgccgcatagccgccaagcaggcatgttacgtgcgcaaattgcttggtctaaacccttcactaaacgtttgtggcagttagtcgtcaagcaaaaaattactaaccaagcggctaccttaaaactatgcggcagagagcatgcgcgtttaactaaattagccaccgaggtagatagcggcgacagccaaaattgcgaggcacaagccgcacggctatattttaacgtgttgtttgatggggtaaaccatgatgcgtttaaacgacatggtgaagatttgcccaatgccgcgttgaattatggctatgccattttacgtgctgccattgcacgtgagctggtgcagtttggctttattccagccttaggcatacaccattgcagtgagcttaacgcttttaacttggcagatgatttaatagagccgtttcgcccatttttagatgcctatgtcagcttaaacaatatcggtcagcacatagagagtgccgaagaaggcttaacgctacaagaacgcgcaagcttagtgcaatgcctgcaattagcttgcatggtggcaggtgaaaaacacactttactatatgctattcatttactagtaaaaagtttaagcacagcgaccgaacaagccaaggcggataagttgttaatgcccaccatgccgcgtgaatttggaataaaggtgatgcgttaaacatcggtaaatgtgtaatggcgctacacaaaataacaccccaacttcgtcattccgtgcctgacacggaatccagtaatgcgcaaagcgcgtttatttttgttttagctggataccagtctgcgctggcatgacggaaagttggttgttttatgaaaagtgaaagattagttttgtaaaaggccatctatgaaagacgggcaacaatttatgcgcattgtgctgttttttgatttaccagtcaccaccaaagttgcacgccgccactacacgcgctttcatgcgtttttgctacgagatggttacgatatgctgcaattttcagtgtatagccgtctgtgcaatggcatggatcaatcacaaaaacatttgctacgcatagagcaacatttacccccagaaggcagtattcgtactctatgtttaactgataaacagtttgggcgtatgcaacactggataggcgcacccacacaacacgagaaaaaagtaacctctcagcagcttattttgctgtaagtctcatggattaagtaaagaaaaacccgttgaattcttttgaaattcaacgggttatcaattgcggattataacccttcggaatggggctgggggctataacgcattgacccctgctccagcagttggtttaattataacccttcggaatggggctgggggctataacgctgactttgatttaatcaattcaaagattattataacccttcggaatggggctgggggctataaccttacgtctgatggtactacttcagtttcaattataacccttcggaatggggctgggggctataacgatttagcgccgtatgagtcgcgagttttcattataacccttcggaatggggctgggggctataaccagtctttttgtttagtcgtgcgaagggcgattataaccc

SEQ ID NO: 4313 - DNA, 6179 bp, synthetic construct
  source 1..6179: mol_type = other DNA
  misc_feature 1..6179: note = Synthetic
tgcaagaaatacacttggccgccgcgcttgaattcgcgcatagccgcttcacgaatgatgccttcagaataatcagtatggaaagttttgatgcttaagcgttttagcggtggcgtgctgataatagaaaactcgcgcaagccttccattgccatgctcaaagtacgcggtatcggcgtagcggtcagcgtcagaatgtcgacttctgcacgtaaggctttgagttgttctttttgacgtacaccaaaacgatgttcttcatctagcaccactaatcctaggtttttaaacttcacatctttttgtatcaaacgatgcgtaccgataataatgtcgatttgtcctgcttctaaaccagccaaagcttctttttgttctttggcggttctaaagcgcgagatttccgcaattttaattggccaatctgcaaagcgatctttaaagttattaaaatgttgctcagccagcaacgtggttggcaccagcaccgccacttgcctgccgcccattaccgcgacaaaagcggcgcgtaaggccacttccgttttaccaaagcccacatcaccgcagactagcctatccatagggcggcctgattgcatatctttgatgacgttttcaatggcttctaactgatctggcgtttcttcaaacggaaagccttcacagaacgattcataatcgtgcaaacttaaagtaaacgcatgaccacggcgcgaggcacgttgtgcgtataaattcaataattcagcggcggtatcgcgaatttgtttgagggcttttttcttggctttttcccaattgccactgcctaaacgatgtagcggcgctgattctggcgggccgcctgaataacgtgagattaaaaatagctgcgaaacgggcacataaagcttatcgtcaccataatattccagcagtaaaagctcggtttcgccttcgccaaaatctaaattcaccaaacctttataacggccaacaccgtgttgctcatgcaccacagggtcatccatacgtagctcagataaatctttaagcataccttcggtgctgcgcgctttttctttttcacggcgacgttgttggcgcacggtggcagcgtaaagctcggcttcggtgataatggagaaagagtcgttagtattttgtccttcgacaagctcaggacgaacggtgttaattagttcccgttcgtggtgagcctgtcgaaccataagttgcttgctaaagccatgatgcaaaggtgaaacgcccagcatcactttttctttagaatcaataaattcagcccaagtttctatcatggcgggtttaatgccgtggtctgcaaacaattgcgagatggtttcgcggcggcctaggctttcggcggcaattaaaatacgtccagaaaagtcggcgatataagcttgcagtttgtgcaatggctggtcggcacggcgttcaatatccagcgctggcaggccagtagactggctattggtgcttaatgataagcggctaaattgatgcgtggcgctgaaaaaatcttctgttttaatgattaatttttctggtatcactaaggggcgttcagcatcgtgcgccaaattacgataacgcgattgcgcttcacgccaaaattgttgtgcgctgtggtctaaatcgccatgcaaacacagtaaacaatccgctggcagataatctagaaaggtcgcagtttgctcaaaaaataagggtaaataccattcaataccaccagtggcaatgcctttactcacatctttataaatcttcgcgcgttgcggatcgccttcaaaagtctctctaaattgacctctaaattgcgcaatgccgctttcatccaacggaaactcacgcgcgggcaataacctgatttctggcactggataaaggctacgctgggtatccacatcaaaagtacgtatcgattcaatctcgttatcaaacaaatcaatgcggtagggcagcgcagaacccatagggaataaatcgaccaaaccgccgcgcacactgaactcaccatgcgaaatgacttggcttacatgatgataaccagcctcggcacattggcggcgtagcgcttctgtgtctaatatttgaccctttttaagcatgaaagtattcgcgcttaaataggcttttgggcttaaccgaatcagcgccgtagaaagcggcacaataatcacatcgcaagcattttggctaattaagtaaagcgtagtgagtcgatctgagattaaatctggatgcggcgaaaactggtcataaggtaaggtttcccagtctggcaataaattaactgtaagcgtaggcgcaaagtaggggatttcttccagcaaacgctgtgcatcaaaagcgttagcagtgatgattactagcggttttgctgggttggtagatttaagtttaagcgctaacgctgccagtgctaagccatcttcaccgttggtagaaagctcaatgcggtttaattgacctgtttttggaataggcaatgaagtttgcgtcataggtgaaatttagcgggtattttatggcgatggtggatttttgagaggatacccccaaagactttcatctttgagggataccttacgacatttaagtcttattatagcaacgtgccccattccgaaggattacgctgttagtatgatagcactaaaaaaatgactcgggagtttttatggcgctagtttttggtttggatattggtattgcatctattggctgggcggcgatagatgaagagcaagaaataccattgttgggcgtaggttcacgcatttttgtatcggctgaggtgccgaaaacaggggaatcgctagccctgccacgcaggctggcgcgtggaatgcgccgtagaatccgtaggcgagcgcaccgcatgtggcgcatacggaaactattcttgcgtgatggtttggccgatgatgcggcgcttgcagatttacatgaaaccacagcggatgatttaacgccttggttactccgcgcggatggcttgaatgctaagttaaatcagcgcgattgggcgagagtgcttttgcatattgccaaacatcgtggctttaaatctaaccgtaaaagtgaagcaggcgataaagaaggtggaaaattgctcatgggggtgactggcaacgccaagctcttaaaagaaaaaaactatcgcaccattggtgaaatggtgtggaaagatgagaagtttgctgtgcataagcgtaataaagggggtgattacagccacaccgtagcgcgagatgatttgctattagaaataaccgccttgtttgaagctcagaggcgctttgggcatggcaatgcgtctgaagtatttgaaattgaatataccaaaatatttgcctcgcaacgcccagtagatgatggtgagattgcagatatggtgggcgtgtgtacgtttgagttgggcgaaaagcgtgcggcaaaagcaacacatagcgctgagcgctttgtattgctgtcacgtttgaataatttgatgttgattgaggcaggtgagcgccgtatattagatgcagaacaacgaaaagtcattgaaacgatggcctacaagtcaacggcagttaagtacaagcagattcgcaaagcactggatttacctgaggctattcggttcaatctggtgcaatacaaaagcggtgaaattgataagacagaagacattatttttgctgaactcaaggcataccacaaaatgcgtttggcgattactaacgcttgtggtgagttggcgtggggcaatctcaccagtcagcctgataagctagatgctattgctactgcgctaacatggtataaaagcgacgacaaaattcgtgaaattttagcgcctgaacagttggagccagccttgttagatgccgtgctggcactgtcgtttgataaagccgtggcgttgtcacttaaagccttgcgcaatatcaatccatttttagcgcaaggtttgcgttatgacgaagcttgcactgaagcgggttatgatcactcagtgcctaccgaagcgcgaccgcagcaatttttacccattattgacgttgacgaagtacgcaatccagtcgtgctgcgtgcgctaacccaagcacgtaaagtgattaacgccatgattcgccgttatggcagccctgcacaaatcaacattgagttggcgcgtgagttatcgcaaccgtacagcgagcgtaaagatattgagggtaagcaaaaagaatttcaggctgaaaaggagcgcacagttaagcaatttaacgacacatttggacgcgacccacgcggagatgaatttactaaatttagactatggcgtgagtacaattactgtgcttatagcggtgtttatttagagccatcacgcttgctagaagaaggttatgccgagattgaccatattttgccgtatagccgcagtatggatgacagcttgaacaacaaagtattatgtaccagtaaagccaatcgagataaaggcaataaaacaccgtatgaatatctaaacggcgcatcactaagcccgcaatggcatcaatataaagtgcgaattgaaacgcacaaagcctttaggcaagctaagcgcaatcgtttactacgggtagattttgatgaaactgccgagcaagaattccgtgagcgtaacttgaatgacacacgctatattgcacgttttttgcaagagttcttaaagttaaatttacagttttcaccaagtgacaataagataaaagtacaaacgcgcaatggcgcggtaacttcgtttttacgcgcacattggggcttgcttaaagtgcgcgctgatggtgatttgcatcatgcgctagatgccgccgtggtagcttgtaccacgcaagcttttgtaaaacgtatatctgattattcacgtcaaaaagagttgtgggctagtgataaaaaatctggcgataacagccgaaatttagagattgtcgataccgatacgggtgaaattaccgcgactaactaccagcaaaaaaatgctaaagactttcctattccttggctgggttttagagcagatcttaaagatgcgctgactgaagtatttgtttctcgtgcgcctacgcgtaaggcaacaggcggtgtgcatgatgaaaaaattcgttcaaccaagcgcatgactggtgaaaagccagtgacaaccagtaaaactaaattgcaagatttaactttggcaagtttagaaaacatcccagacaaactcacgcgcaacgccaatttataccaagctttgaaaaagagaatagaggcgggcggcaaagagccttttgcccaagctttttacttaggcaaaaatggcgaagaggatgacgcagcagatggccgtttaatcaaagccattaagctagagcgcaccaccaaaactggcgtgttagtacgcggcggtttggctgataacggtgaaatgttgcgcgtggatgtgtttaccaagacaggtaaattttacttagtgcctatctacttggcagaccgcgtgggtggtgtgttgccaaataaagcaattcgagcggcaacgctggagcaagactggccggagatggatgaaacttatgcgtttgcgtttagcctttgtaataatgatttgattttgattagcgataaagatggtggggatggagcgtttttgcgaggttactttaagggtgcgcatcgtggaactggggcgataaatattgaagggcatgatagatcttggaaaaaagaaggtattggcgttcaaaggcttgcggcttttaaaaagttacaagtggatgtgctaggcaatgtatttgaagtgaaaaaggaactgcgtcatgacttggcagaatctcctgattagccgccctgcgcggctatcgcttaaaaatcgccaactgcgttgtgagcaagaaactggcgaggtgagtttagccttagaggatattgccagcgtggtgctggaatcacctcaaattaccctgaccagtgctttaatggcggcttgtgccgaagagaatatcgccattattacttgtgacgaaacacatacgcccaacggtttgctcaccagttttttaccgcatagtcgccaagcgggcatgttgcgtgcccagattgcatggtctaagccttttaccaagcgcctgtggcaattgattgtgaagcaaaaaattgtcaatcaagccgctacctta

SEQ ID NO: 4314 - DNA, 8845 bp, synthetic construct
  source 1..8845: mol_type = other DNA
  misc_feature 1..8845: note = Synthetic
ctgcgtgttcttggccgcctcggcactccgctgggccaggttccgaacctcctcggccaccaccgcgaagcccttgcccgcctcgccggcccgggccgcctccaccgcggcgttcagcgccagcaggttcgtctggaacgcaatctcatcaatcaccttgatgatccgcgccgtctcgtccgaactcgtcttgatcttgccgatcgcctcgctcatccgacgcaccgcctcgctgccgcggtcgctcgccgtcagcgtctccgaggccaacgcgttggcctccttggcgttggccgcgttctgcttcgtcatcgaactcatctcctcgatgctcgaggaggtctcctccaggctcgccgcctgctcgctcgacccctcggccaacgactggctcgacgccgacacctgtcccgccgccgccgccgtctgctcggcgcccgaagccaggccctcgatggcacggttgatcggccgagtgatgccacgcgtgatgaaatacgtggccagaacccccgccacaatgccgacggccagcgagacgatgatgatcagcgacgagcttgccacgatgccggtggtccgctcggcgctctggtccgattccttccacgcagcgtcttcggcggcctgagcggctgcaacgacatcgttgcccaactgggccatcgcgggcagaatttccttccgcagacggttgtcgctattcacccacgccgtggccgcggcgagatactccttggtcgccgcctcggccttccggatgtgttcttcgtcggcagccgtcagcgagaccttccgaagatcggcaaagagcgcgttcagttgggttacaagctcattgagttctttccagtcggtgtcgctctgcgtcagcatgtactgcttctcacgaagccggattcgataggccgcctggtcaatgtcattgaccaggaaaacggccttggagatggtctgaactcgggtctccttctgggccaggtagtcgctgacacacttcaggacgagggtgcccttgtcgatcatgtcctggagcagctctttgaggcgttcgctgttggagtccctcttgtcctcgtcgcgccagacccgggccgaagcgagatactgctgcgtggccgccctggcatcggcaatctgcttacgttcctcatcgctcggatgcatggcgtccaactgggggtacaactccagcagttgccccaggcacagttcgacgttctggaagtaggagtccgtcttgtaggccatgtagccgagcatgttcatacgcgccttgagcgtcgtggcgttgacaacgttggccagggccaacgcacgggtggcttcctcatactccgcccgtttatcggccaggtaagcccgcgcctcgatcgacacggcctggcccttgtccgacatcacgtcgccggccttgcggctggtggcaagggctgctaccgcttcatcatagagcttgccgtactgacccgcgctgtcgcgcactttgtcggacttctcgatcagacgtgtgtcgttgtactgcgtccccacggctttcaagacgtccaactcgccgacgagcttcgccagatcctctttcgatgcggcgcgggtcgtctcctcctgcttcagcaggtactccttctggcccaccatgcacttgaacgcaaaccgctcgacgccggtcgaatgcttcacggcgggaatatggtgccccgtgagcatcgcaacgttgtcctcgacgcgcatgaacatgacgtacccggtgacgcccagggccaccatgatggccacgaccagggtaaaccccaatgccaacttgaccgccaatctcatgaccttctcctttcgtgaagcacgccgaacgccgcacgaggcagcgcgtctgcggcgtccacgccccgtcaagccgtcctgcccttccgcgccgccgggccgtgcggcacaggccggccaactgtcgtcccggcccacgtatcgcagcctggtcatactgacaattatggggaattctcctctggtaaagcccccaggcggccttcccacgacggcgcacacgcccggcacgacggcctcgtatcagtagtggagtccgagccgcccccgcgcgcattcagtgcacatgcacaggaatatcatctgttgcccgtgacatacgtgtggcgcaaaatcttcgcatggaccctgccgtcgtgctcgacctcggccgcatggtgcggcccgatactcttgcgttgcgtggtgcgtctgtcccatgatgggctcattccaggcaactcaagacggagcgacgatgacgatgtttcccgacaaccagtggcaggaagcggcccctacagccgtcggcctggacggcaagcggttggccgcggcgctgagccccctggccagaatcaccggccaccaggcgccccacgccctgccgccgcatgacaaggccgcttggtaccgccagttgcccgggcattacggctactgctggtgaaccaacgggcccgacacggccggtcggcggctctggcccgcggccaccgagcagacctgtgccatgcagggcaaccaggacaactactgtttcgtgattcccgagtggcggatggtggtcgtgcggctgggaaccgacggcggcattgtgaacaaccgctacgacgagttccttgcggccctgcgcgaggccgtcgcgcgatgactccgtgaccacccgaccggccgcgacagacaagacggcggccgccggaccttccatgtcctgcggccgtcgcatgttaccgcgggtggatcacagactccgccgatcagtccagcggctgaggatcgcacaggttgcactcgtcgtgggcgacgcgcttgcagcgcccgcagatgaacctggcatctctgacgagatccttgatggaatccatcggttcgttcgtggcgatcaactggcacatgtgctcttcgtgtccgggtctgcattgggccatggcgtgcctcctttgtcgggtgggaatcgcggctgaacgccttcggcgtccttctcgcctctctatggattctatgccaagctccgtaaggggtcaatgcacgcgaagagggcgtctcgccgtgttgaccaaagcaggcgccgcggcaggatctcggagtgtcgcgaggccatcggcatcggccgcacggtcgaagagtgggtaagcgagacgggggccccgttgtggcccggcgcggcctcgatgcttgaggaaggtccgacgccgcccttcacccacggagtcgcccagtccttcgcgccccactgtcccggcacaaaaggacggccacccggcatcatctgccgggcggccggaaaaggctgcagcccgcgggttgcgcgggctgcgccaggtcgcccgaaggcggtgcctgcgaattcctcttgttacgtgaaaatcgcaggccaaggtcgattacactggttttcatgctaacgcttgcgttgccacctgtcaagtgctattcttgccatttacacttcacttacattaggagaccacacatgattacgcttggcttggacatcggcagcaactcggtcggctcagcgtgggtggacaccgaaaccggggttcttgacatgggggccagcgtcttcccggccggcgtcgaagagcaatccggcaagcggggagcccccgtcaatcagaaccgacgccagaagcgacaattgcgacgaagcatcgcccgccgcgccgaacgcaagcggctgctgaagaagacgctcacggacgccgggctgctgccgcagagcgttctggagatcgaatccgtgtgcgccgaagatccctggcaactgcgtcgcaaggccctgtccgagccgctcaccccataccagttcggtcgcgtgctcttgcacctgaaccagcggcggggcgcgtcgaacatcgtcttggatgaggagaacaaggaggaaggagcgatcaaagaagctatggaccgtcttcgacggcaacttgacaagcgtacggtgggcgagttcatggccggcctgatggagcagcgggcatccgagctggagaagaagcccgggacgctgattcgcaagccgatccgcaatcgcctgtaccgtctcgatcccaaggagtacctctacgcggaccgcacgctgattcgcgaggaattcaacaagctatggaatgcccagaaatcgttttccggtcctttggccgcactgctcaccgatgaattgcgcaagcagttggacgatccttccggcgaccgcatctggcagagccgcgggttgctgttcgggcagcggcggcagtattgggatactggcacactgggccactgctcgctggaacccactgacctgggctgtccgctggccgacatgtacgcccaggagttccgcgtcattgaaagcgtcaacaacatccgtatcgaagagcgcggcaaaccggctcgcccgctgacgcccgaggaacggtcgcgggtgatcgccgtactgaggtcgcagaagacggcgacgcccagtacggttcgtaaggccctgggtttgaacaagaaagatatcaaggagttcttcaccctgaacatcgagcgggacaaggagcggagcctgaataccgactggttctggcgcgagatcgttctgggcgtgtggggcgaaaaggcttggcagcatttggacgaatctgtccatcagtccgtcaatagggccatccaggcgttcgatccggagaaacccgagcacatagagaagctccgtcgcggatgcggccagtggtggcgtctcgacgcgacggcgacggaacggctcgtagctgcatggcagaagcggccgacgattgacaaacgactgaagttgtcccgacgggccattcgcaatcttctgccctacatgaatcgccgcaagcccgacggcacgtggccgacccagatggaagcgcgcatcgccttcgccgaagacggcgacgccgtggatcaggtcacgggacaggagcccacgcccgtgcaacgccggcggtactcgctcaaggggaatccgccgaatcgaaaggccaggcgatttacccagaaacacccggacatgcttcccccggcgccgatcctggccaaccccgtagtccgcaaggccatccacgaggtgcgccgtcacgttaccgcctaccttcgcaagtacgggcgtcgtccggaccgggtggtcatcgaactggcccgggaggccaaactgccggccgtggtccgggataagcaactagcgacaaaccgccagcgcgagaagattcgcaaggccattgccgaccagtatgacttgaggctgggaaccaccgcccaacagcggaaggccgaggaacgcgtcctgctctgccgacaacagaggaacatctgcccctactgcggaggaaccatcgacgagaaggctgccgccaacggcgccggcgtggagatcgaccacatcgtcccgttcagccgttgcggcgacaacagcctcaacaatcgcgtgctctgccacacgcactgcaaccgcggcaagggaagcctcacgcccaaggagtggctctccccggaagacttcgctgcactggaaaccaggctggcgcacttcgagaagcccgaaggggaagatgtctcctatttcacccacaaggatttcagcatcaaatgggagaacctgcaccgcgaagggccggccgccgatcaatggcggacgtccgccctcaccgacaccgcctatgcttccacgcaggtggcgtcgtacttggcggccgcactgtatcccgagcaacaagatgcacagcggatcttcttcaccaaggggctatacacttccctgctgcggcgcgactggcaactccaggatgcgaagctcggcaagatacgcgacgaccaccggcaccatgccgtggacgccgtagccattgctctgaccacccctgagcgtttgcaggaactggcggttaaggcccgggagtgggaacagttgcattcgcagggagcggacaccaagtacccgccgatcgcccctcccgccccatggaagaccgtggaggatttccgcaatgccgtcatggccggagttcacacgcttgtcgtggcccatcgtccgtccatgcggcggttggccggggcgtttcaccaggacaccgcctacggaccggttctcgacaatcccaagcggtacacggtgcgggtggccgcctcagacctcaaacccgggtatctcaagctctcccaaaagcagcaagacgatcttgctcagggccggcggcctcgaccggccgatgatccgcctattgacagcaatagctatctggtccgcgacctggcccttcggttgcagctacgcaaatgcctgaaagaccgcggactcgacccggacgcattcacggagaaacaactcagagcgctattacaggctgggccgctccgcatggccagcggcgtacccatcaagtccgccgtctgcctgaaaaccatcgagaatcccgtggtctttcccaggtacaaccgcgacatccagaccgggcgtaaagtcgccgattccgatccgcgttcgcggcgcatctacattggcggcaacaaccaccatgccgagattcgcgagaacgccaaaggccaatggtcggtcaaggtggtcaccatgatcgaggcggcccgccgcgtgcgggcggccaaggatcccagggccaggtccgcggtggaccgcagcgacaccaaggaaggacgcttcatcatgtcgctatcgatcggcgaaaccgttcacatgcggcacccggtgacgaatgagccggggtacttcaccgtgttcaagatcgatcccaatggcgcgatccacgtcacccaccactgggatgcgcggccgagcaagccgaccgaggaccaggaggcacgcgaagacattcgcctgtcgccgtcgaagttcaagaacctagggccctcggacggcatacccccctacaaggttcatgtgaaccccttgggcgagccgcgacgtttggagggcgactgacccagagacgatccggaggccgccgtgatcaaaaaagtcattgagatttccagggagccggcgcacctgtcggtccgtctcggacaactgctggtcgagcgcccccgcggcgatccgcccgcggctccctcctcgatcccctgcgaggacatcggcgttgtcctggtggatcatccccaggcgacgtattcgcatcaggcgctggcggcgctgctcgaccacggcgccgccctggtcgtctgcggacgcaatcacctgccgaccggcgtcctgctgccgatgaccgaccacagcgaaatccgccataggatcgacgaccagatcaacgtcggcaaaccgctccagaagcggctctggaaacagatcgtcatggccaaaatccgggcacaagcagcagccctgccggaggactcccctgccgccgccaggctgcggaacatggcctcgtccgtgaaatcgggcgacacctctaatgtcgaggcccaggctgccaaaatctactggcgggcctgggccgatgccctgaaggcgtttcgccgagatccgtcgggaaacgacgcggttaacgccatgctcaattacggttacgcggtctttcgggcggcggtggcgcgggcgctggttgccgcgggactgctgccctgccttgggattcaccatcgccatcgtgccaacaacttcgccctggccgacgacctgatggaacctctcaggccgctggtggacggacgcgtacgacaaatcctccaggattccgccgaaccgcagttggatcagaagaccaaggcccgacttctggagcttctgaccgtgaccgttcagaccggcgacgtcagcggcccactgatgccggccctgcaccgcctctgcgcctctctggccgagtgttatgccggcacggcgaagaagttgacaatcccgatgccgcttccgatggacggaccccatggaacttagcgactatcgaaccatgtggattatagccatgttcgacctgccggtggataccaagacggctcggcgcgcctatgcacaatttcgcaaggaactgttaaaagatggattttgcaagatgcagtattccgtgtatactcggcattgcgcaagccaggaaaatgccgacgttcacatggaacgagtggaacggatagttcccgatgacggcgaggtccggatcattcagattaccgaccggcagttcgagcgcatgcgggttttttggggaaaaaggaggcgtgcccccgaaacaccgcccgcccaactggaacttttctgacggtcgccaatcgccaacccattcagggaaagcatcttacaggcgatcgagtgtaatcgaccttggcctgaaatcaacccgcaaccatgccagtgactccggccatcaaccagacccatatcaaatcccaacaagaacaccctcttaccaccaagggccaaggcgaggttgattgccatagcccccgtactgccattccagcccaaggcatttgtgcctagccctcgcgtcatcctcggcaccgtccagagccaaggctcgttacggtggagcagagcggggcatgaggtcacaaccggaccggcaaaggccatcaggtcgtccttgaaatcgctgaagaacttcagatccccgaagcagactatcttcacaacgtctgggcccagacgataggccttgttacagccaatcgtccgacgagcggtgagcaggtcccagcggaaattcaacaggctaggaccgccgccgatgatgtagacatcctcctcggcccaagtcatcgaggatagagcccaccgaggcatccgccgatcaccccttccgtttcaggtaggcggtgatgaacttattcacctcagcccgcttctcgatgccgggatcattgagcggtttgctcatgt

SEQ ID NO: 4315 - DNA, 24218 bp, synthetic construct
  misc_feature 1..24218: note = Synthetic
  source 1..24218: mol_type = other DNA
gatctatactactgctagcaccaacagtggaaatggttaaattgcctcctccatttatggtatatgtaaaggtataaggcgctgcacctccagaacctgtaaacgtaatttctggatttgggctgctattcaaacacacttctgttgtgcctgaaatagatgcagaaggcggtaaaaaagaattagagcttttgtatgtatattgaaaaacaggattcgtatgctttaaagcaaatagcgatgcaattattacaatagaaaataatgcaacaagaatggatttctttagcatggtaaaagttaggttaatagccctactaaaatatatattctttttagcttatgtttaaaatttcgtgataacgtgctttttctctttaaaatacatatcgttaggtattctaattattatttactctacattaatgtttgagtctggtcttattcactatatttatgcgcaaataatttttatgaaagccttagttatatcaggaggaggaagtaaaggcgcttatgctggaggtgttgctcaatatttaatggaagttgagggacgtgattatgatatgtttttaggtacatctaccggtagtctattagtacctcatcttgccgcaggagaaattgataaaatttatcatgtgtataccaatgttaatcaaaacgatatttttagtacaaacccttttaccataagaaaaaaaggaaaacgagaatttgtttctatagattttattaatacgctttggcagtttataaaaatgaaacgaacttttggagaaagtaaagctttaaagcgtcatattaaaaaacaccttaccaaagcggaatatgaaaaaattaaagcaacaaaagatgatgtagttgtaacggtttctaatctttcaaaaaacagagtagagtataagtctattaaagattatagctatgatgaattttgtgaatggatatggatttcttgcaattacatcccatttatgtctttagtcaagaagaatggatttgaatatgctgacggtggtttaggttgcgtaatccctattagggaggcaattctaagaggtgctactcaagtggacgccattgttttagaatctgaaagtatggagtataataaggttttagggaagaatcctttctcgttacttattaatctatttggacacctttcagatcaaatagaacgtaatgatattaccattggaaaattagctgcaaagaataaaggtgtagaacttaacttatactataccccctctaaactgacagaaaactcattgatttttaataaaaaactgatgacttcttggtggcaacaaggttgggattatgctaaaaataaatgcgaacaagcaaaatctaatgaattacgctttgatgatgagtctaccacaactccctaacctcttcttttaaaattgaaattgcagcatcactaggagaatgacgttccatcatttctgttaaaataacctcacgaagtttatctgcggaatctgttttatcagataaatttgcttttctaattaattgtactgtagcagcttttgctgtacttataacactccaacacttttcgctaacataaatttgttgtgttaaattatgctccatctcttgttgaatgctttgtatcaataaggattcgtaatcctctttattagaagatgttggcttaacacgtaaaagtaatttatttggtgaaatacgttccaaaaataaggttaaccgttcgtaagcttgtaaacgcaaaggtaatgatgtggtttgcaaatccttttttaaaagaaaacgccttctaccatcttcatttttggtatgagtttgaaaaaaataataagctattactcctgttattaacgatggaagtgtaaataaaaacaaatctataattctgcttgaatccataattgagaacttgactaattagatttttggactttttcagtacctcccaaatatacgcaatctttcagatgttgcatgctttcaaaaggcacaattgctttgttatacatataggctttatccaactttttagataaattatggtcatctacattcatttcaatatcactcattctaaattgacatgggtgctcatatcccgcagcatgcgtaatttcgatgagttcttttctaaaggtcttaaaatattgcgcaagtcgtaccgattttaaagacgtatcaataccattttgcaaccatttactttgagtagcaatacctgttgggcagcggtttgtatgacaaatttgtgcttgaatacagccaatactcaacatagcttctcttgctacattaatacaatctacgcccatagcaaaagccatagctgctttagctgggaaccctaattttccacttcctataaaaacaacacgctcagtaaggcctttagatttaaataatctataaatatcagcaaaaccataaacccaaggtaaagacacatggtctgcaaaacttggaggcgcagcaccagtaccaccttcaccaccatcaattgtaataaaatcagggccttttccagtttttagcattaaatcagccaattcttcccattgttctaattttccaattgccgcttttattcccacaggtaaacctgtgttttcagcaatatcttctataaaatttaccatttcaggcacatttgaaaatgctttatgagtaggaggagagagtactgttttactaacttcaacacctctaatacctgctatttcctttgttatttttttgccaggcaatacaccacctttaccaggtttagcaccttgggacaattttacttcaatagctcttacaaagggattatcttcaactaattttaccattttctccattgaaaacccaccatctttcgatctcactccaaaatatccagttccaaaatgaaacataacatctcctccattactatggtaaggagacaatcctccctctcctgtgttatgataggcatcagccatgtttacacctttatttaatgactcaatagcttttgatgataatgagccatagctcattgcagacacattaataatagaagctggtctatatggtttttttctcttattataagccccaataaccttggcacaaggaagaaatgtactatcagttatatttggatgattttcttccattttaaaaggcatcatggcattatttataaaaatatgctgatgctcataaatgtctctatctgtcccgaaaccttcataattgttttcctttttagatgaagcatacacccaaccacgttcaatacgattaaaaggtaattcctccctattatttgccacaaaatattgacgcatttctggccctatgctttccaaccaatacctaaggtgtcccaccaaaggaaaattatgtattatagtgtgctttttttgaaaaacatctcgtaaagttattattagtagtaccgtaataatccacaaccaccaagggatattataaaaaaaatttagaacgttgtccatgtgttaattttgaaaataagcctaaagatattcaaaaatatattaagacgaattgtttataattattgataattcaaacctaatataccataaacattggttattttcacgtgttgaaaaagaggatactttggaaaaatatttaaatcaattaaacagtgcacaattagaacctaccatccaaattgatggccctatgattgtaattgcgggcgcaggttctggaaaaacgcgagtactcacgtatcgtatcgcatatatgatgagtaaaggcattgatccttttaatattttgtcgcttacatttaccaataaagcagctcgtgaaatgaaagaacgaattgcatctattgtgggagctagtgaagcaaaaaacctttggatgggaacgtttcactctgtatttgcaaaaatattgcgtattgaagccgataggttagggtatccaagtaattttacaatttatgacacccaagattcagatagattaatagcttctattattaaggaaatgaatcttgataaggatatatacaaatacaaacaaattcgttctagaatttcgtcatataaaaacagtttgattactgtacgtgcctattttcaaaatccagaattgattgaagctgatactatggcaagacgaccaaggatgggagatatctataagacctatgtagaacgatgctttaaggctggcgcaatggattttgatgatttactattgaaaaccaatgaactattaacacgttttccagaagtactggctaaatatcaaaatcgatttaaatatatacttgttgatgagtatcaagatactaaccattcgcaatacttaatagtaagagcgttatctgataaatttcaaaatatatgtgtggtaggagatgatgcgcaaagtatctatgcgtttcgtggtgcaaatattaataatatcttgaattttcagaaagattatgacgatgttaaagtatttcgattagaacaaaattaccgttccactaaaaatattgtaaatgctgcaaattcaattatagataaaaaccaaaccaaactagaaaaaatagtttggacagctaatgacgaagggtctaaaataaaagtaaatcgttctttaaccgatggggatgaagggcgttatgtagctagcaccatttttgaaaccaaaatgcaagagcatattcctaataaggattttgctgtattgtatcgtaccaatgcccaatcgcgtgctatagaagatgcattacgtaaaagagacataaagtatcgcatttatggcgggctatctttttatcagcgtaaagaaattaaggatgtattgtcttatttacgcttagttattaaccctgctgatgaagaggctttaaaacgcataataaattttccgcctcgtggcataggacaaactacagttgatagattggttgtagctgcaaatggatatggtaaacctatttttgatattattaaaaaccttgataaggtagaagtcaaaatcaattcaggcactaaagcaaaacttgataatttcgccacgcttattgaaagctaccaagtaatgaatcaaactgctgatgtttttgaattagcagaacacatcactagaagtagcggattgataagagaatttaataaagatggtacacctgagggtgtagctcgtatggaaaatattgaagagttgctaaatggtatgaaagattttgtggaaggccaaaaagaaattgccgatgctacaggggctttagccgaattcttagaagatgtagctttagcgacagacttagataacgacaaaggtgatagtgaccatgtggcattaatgactattcatttagccaaaggattagaatttccttatgtatttatagtaggcttagaggaggatttgtttcctagtgctatgagtatgaatacacgtagcgaactagaggaggagcgaaggctcttttatgtagcattaaccagggcagaaaaacaagcctatttaacttatgcgctatcacgctaccgttggggaaaattaattgatgcagagccaagccgttttatcgaagaaatagatgaacaatatttagatattgtaacaccaattgaagaacgccgctataacccaatgcttgatgctagcatttttggagatatagaacctaataaagtaacgtccccaaataaaattagatttaaaccagccaaacaattgcaacctaaaaagggcgtctctagaaaaacaccagaaaagtttcaagctaccacaccaaaaaacttaaaacctgtatcgaaaacaagtaatggcgcttcaaatttatttgatagtaaattagcggttggaaacattgtaaaacacatacgcttcggtaaaggagaggttttaaaaattgaaggtaaaggcgctgataccaaagctgaaattaagtttgaatctggtggaaataaaaagctattattgcgttttgctaagttagaggtaatagggtaagcaaactattttaccatataaactgaattaatatgaccctcagcatcatattctctaataggattgtctgggtctgtcatccatttgccatccacaataaatttatagtgatgtttccccccagaaagtggtatagtatatacccatccatcaatagtttttttcattttaaagtcaacttcattccagtcattaaaggaacctgctaaaattacttcttcagcattagcgtatccaaccaaagcaaaagtggtatatttttgtatatctataactgaattgtattcgtgaaattcattaggggtcttattgggattatgtgggtcttccatccatttaccatccacaataaatcgatattgatatacatcaggtttcatttgaagtgttaattcccaaccaaaatcggttttattcattttaaacaaacgttcattccatttattaaatgatccagcaagaattacctttttggcatctttaaaaccttttaacttaaaatatacattaccttcttttgttggataagctgtatacattttaagattgtaaattcctctaagtttttttccgtcttttagagctttagaaacatttccatcacgttttgaaggttctgcccaataggcgttatttatgacgtatttaaactcccaggtaaaggcatcattaaaatcggttacacactttttaagctcataaacataatcacttaccttttccattctccaaccttctcgagaccaaagattaaactcgccagaaacagcaacagtttctatattaaaatctgaaaactccaagcgttgccctgtgtgttcttgagtaaattttgaatagtcccttacatcaaaacgaaacactacagtgtcgttttcaattttataaccttttaacgcatcttcttgagcatgcaaaccaaaatttataaaactaaaaaacattaaaagcaaacatgtttttagtgatttcattgtgtatttagaggatagtcaataaaatacaacttttcttttttgtaattgataatagtgcgcttttgagcaaaaaattcataccctaaaataccatctagctgtgtaccaaaggtttcattaagttgatttaaattggttaaaactgtgtacataggaccaaaataaacattattattcaatttaaccctatgcaattttcctgccaaaacccgaatacttttaccaccagcatcactaagctttaatcgtttcttgggaataaaataacgcaacgcttttttattaacacttttattgatttggttaaattctgctgcagtatctatacctagcttaagtttttggttgttaataagagcattaacaactatagtatgcttttttaaagtaaaatctaagctatcaacaatagtctctaaatatatcttatcgttaagtgggtttccctttttatctgttttggtaagtgtaatttgttttaagtataaatctacaaacacctcgtaatcttttaaaacatcatagcctataatacctaaaagtttaatttttttacttttttccacatgcgacaaatcaataacatctgaaactttattttcaagtctaaacccacttaaatcaaaggcatctattcgtttttcataagaatagtcaaggacatcattaacacctgaaacttctttagaatttttatgaaattcatacagattattaaaatgcacctgatttaaaatcatggcctcagcccctgtatcaataataaaacttccttttttatctaaaagttcagcttgaacaaccattaggtgatctaccaatttaaatggaattctagtagtgtttgcatttaaaatttcagcgtttttaaaaattaccggtgggtttactttcttgtttccagaaaaacaaacaataggaaggattaaaaataaggttagtacaagacggctcatgctataaagactgctaaatcaataaaatgttacaaagtttagttataaatatgtttcaataaatagttttaatttactccaagtgtccaataactctaatcctgtccatccatgtcctgcattttcatataaagtaaattcaaaactaactcccaaagcctcaagtttatcccttaaatcagtaccttgagtggtaggaattaacgggtcttgtccaccataaaacagtatagtaggaggtgaagacgcttttacttgaaataacggacttacttcttcaaggaaatcagttgtagtgtcaattccaaaaacatttagcagatcctgcaaaacagggtttgtattatttaaataagcaggatcagtaaaattggttggccccacaatactacaaaccatatctactttagcatcattatcaaaagcatagctccataaaagcgataaatgtgccccagcactggtgccaacaaacccaatatcttcagaaatagaatacctgtctttattaacctttaaaaatgcaactaaactggaaatatcatcaatttgcatagggtatggtgggttattagcatctgctaacctataattcatatttacaattgccacatcaggaagttcttgattgattaaaagtttaatagcatccatatcgcctttatcaccagatgtccatccaccaccgtgtattaaaataatagttttagtaacagaggttctattcgctggtaagtacaaatcaaacttttgacgctcatggcttccgtaagaaatatttaattcttcataaactttgcttgtgtctaaagtatcgtttgaagtctcttcaacatcagctgtttcgttagaacatccaaaaaacaaactaacaataaacaatactacaaaagtgtatttttctattcgcatgagcttttttttaattactttgtaaacgttagtacaagataaatattatggctgagtttattagaatttatgaggaaaacccaaaccctaaagcaattgatagggtagtgcaagtactaaaaaatggcggtctcattatttatccaacagacacagtgtatggcttaggttgcgatattactaatattaaagctttagaaaaggtagcgagaattaaaggcgtaaagttagaaaaatctaacttttcgtttgtttgtcatgatttaagtaaccttagcgactatgtaaagcaaatagatacctccacgtttaaaatcttaaaacgtgcactccctggcgcttatactttcattttaccaggatctaaatccttacccaacccttttaaaaaacgaaaaacagtaggtataagagtgcccgataataacacagccttagaaatagtaaaacagttaggaaaccctattatttctacttctattcgagacgaggatgaaattttggaatacactacagacccagagcttattcttgaaaaatgggacaacctagtagatttggttatagatggtggttatggcggtaacgacccctcaacaataattgatttatctgtagatgaacctagtgttattagagaaggcaagggaagtttagagattttttagaatcattttacgggcgctaccatcccgatagctatcgggaggtcaggctttcactactcaatccctcctacgtcggggatttcaaacatgccgttcaatccttagcgcggaagaaactttcatagtttttacgaaaattctgcattaataattaaacttttactatttttaaaaacttccctaaaacttttaatagcgtttaagtttattagcatgaaaataaaaatcccacggagtacgcaggatttaagatttttcttcggcttatagccttattgtgaaaagctttcagattataaaaatataaaaaataaagcaattcacaacatatatcgaaagtcgatagaattataaaagaatgaaaagataagtcaatttagaccagagataagttttggacacttaaaacaaagtactgtatacaaatactcttttcttttcatttgtgtaaaaatatttattattttcgatatatataacctgtttaaatataatttttaacataattatgaacattactcttggtatagatttgggaaccaactccataggttgggcaatacgtaacacttcggaaaaggaaaatcaaattattaaaaaaggagttctaacttttgataaaggtgtaggagaagaaaaaggcattgaatttcctaaagttaaaaaacgtaccgaaagtcgtggaaaaaggagaaactatcaagcagagaaatatcgaaaatgggaattattgcaactcttaataaaaaatgatttgtgtcctttaaccattgaggaacttaaccaatggcgaaaatacacgaaaggtcaatcacgtcaatacccaagtagtaaagcatttattgaatggttacgttttgattttaatggcgatgggaaaccagattttcatttgttttcaaaagacaaccatgaaagctattatatttttagaaccaaggcagtttgtggtaatgcagattctaagaaagtgttcaaagataatcctcaaatattaggacgtgtattttaccaattagtacaacgacgcggttttaaaggtcgtgatgaagaagaagcaaaaacaatgcttgaaggaagtaaaaaaacaggaacacctggtagaaacgaaatatctacttatttaaacaaatataaatcgttaggagctgcattatatcattaccaaaagaaaacgaaacaaaatagaataagaaaccgttacaacttaagaaaagattatgaaaacgaactaaaactaatttgtgatgcgcatggggtagacgaagatttttataaaaaactttggaaatcaattatttggcaaagacctcttcgaacacaaaaaggattaattggtatttgtacttatgagaaaaacaaaaaacgagcgccagtaagtcatccattatatgaagagtatagaacttgggtttttataaacaatttaaaaattaaacaacctgaaggatggaaacttgaaaattacttgttacagcatatatatcctcttttttacaaggcatcaaacgatttcaaactgagtacgattattaataagttaagaaaggatggtgctaaaatggagtccagatttaaagatagacccaaaactaaagtactttcagctaaacttctaaattcttttcaagaattattgggagaaaactggcaggaggaatataattggaatactattaatgaaagaccagaacagcctattaagaaaactaaaaaaaagtattcgtttgaagatgtttggcatgtgctttttacttttgatagtcaagataagttagaagaatttggaaaagaaaaacttaacttaagcaatgataaagtagagaaattttcaaaaataaaattgcaacaaggttatgctacattaagtctttcagcaataaaaaaagtacttccttatttaagaaaaggtattatttatagtaaagccgtgtatctcgctaatattcacaaagtattaggaacacatgatattactgatgattctattgaatatttctcgtctgaaattgataaaatactagtcgatactgataatgaaaaactattaaataatgtagtaaatgctataatacaagacgaatctataaagtttgattcttatgccattgaagatgacagagctcttgacgaaagtgaaaaaagattagtgaatgaaaaacttaatcaagttattggagataaaacttggagtcgttatactcaagatgaaaaagagttcgctataacatatgtttctgaaaagtttcgggagttcttaaaaaatagaaaaacaggttttttacaacaaccacggttgcatgatagaatttttaattggcttcaggaaacatatcaagtaccggatgaaaataaaaaatatctttggcatccttcagagcaagaaaaatatagtaatgctgaatactatcatgaaataaaggcaaaaggaaatactgtttacattaaagattcagacttagaaaactttttgtacaaaaaccccaatgcggaacaggaagctatctcgttaaaattattgggtagtccagagcctctttcaaagggatttaaaaacccaatggcattaaaaacgcttcataaattaaggcacttgcttaattatcttttacaaactaaccaaattgatgaagatacgcgtattgttgttgaaatcgcaagagaattaaatgatgctaacaagagaaaagcgattgaaaaatggcaagctgaacgtgaacgggaaaacaataatttcaagaaaacaatagaagaaataaataaagagtgcgatacaagctatgacactaatgatatgtcactaatccacaaaatacgtttatggaatgaacaaaataaaatatgtatttacactgggaattctataaatgtatgtgacttatttagtggtaataagtacgattttgagcatactattcctgctagtatgtgttttgacaacgaactaaaaaatttaactattgctgatgcaatttataaccgaactgtgaaaaagaagcaaatcccaacacaacttcccaattattctgaaacagttgattttaaaggcgtacagtattcggcaatagaacctcgtcttcaatttataaaggataaactagaacattatgaaaatctttttgacgattggctaaaaaagacaaaatatgcaagtacaaaagagtataaagactattgcatacaaatgcgtcattataataggtttaatcgggattattggaagaaaaagttagaaacatttacaatcacagaatacaaagcgggatggaaaaatagtcaattacgagacactcaaaccatgacaaaatatgcattgccctatcttaaaactgtttttaaaaaggtagaagttcaaaaaggtaatgtggtaaatgcttttaaagaagtatataatataaagctttcttccgacaaaaaagatagaacaaaacatagtcaccatgccattgacgccgctattttaacattaattccaaaattttcagttagagattctataatagaaaaatataatgaagaaaaggatagtcatacaggtaaaacctatcatgaaaggcccagaaattgggaaaactttaagccatcatatattttagattttgagaaggaaacactcattaataaccaattagagttcactgcgttaacgccatcagttaaaaaagtgcgaaaacgaggcagaattcaatatgctacttttattgatgaaaatggtaaaaaacattttaaattagatgtttatggtaataaaattccattgattgcaaaaggcgataccgttagagggcaattacacggagaatctttttatggagcaataaaacaaccaaaaagagatgaagaaaacaaagtactttttgatgaaaaaagcaaaatgcttttagaagatactatttcacttgttattagaaaagatttagtttttaagaaggatgcaaattcaaatggttttaaaactttagaagaaattaagaataaaattgttgataaatcagttggagaaattattgaagaacaggttaaactagagatttctgcaggaggaagtttaaaatcagccttagataaagggatttggatgcttaacaaaaaaggagagaaaattaatagaattagacgtataagatgttttgagtctttgaagtatgaaacggctgcaaaagtacatgaacatgcttataaatctgataaagattataagcaaacaactttagctcaaaatggggaaaacgttttctgtttattctataaaggcattgttaatggcaaagaagaacgaacaatagaaatcataggtatttttgatttagtaaagttgaaaattagaagtgaaaaggatatttataaaattccattatttaatacatcagaagttggaagaggaaaaaagaaatccacgattcaattgtaccatatccttaagtctggtcaaaaagttttattctataaagatggtatggaagaattgaaagaattgaataagatggagttatctcaaagactatataaggcctatcagtttgaaagtgatggaaggatcaagctaaagcatcatttgattgctggcagtaacacagatataaagaagaaatacaaagaggtatctttatttaaatttgatggttaccaaccattacttagactcagacaaaaaaactgggattttgcaatagagcataaagattttgaaatggaattagacggttcaatcaattggaaattttagaaaatgattaaacgcaccctcttttttggcaaccccgcctacctaagcaccaaaaatcagcaattagtggtaaactttcctgaagaaaataaggacgaaaaaaccatccccattgaggatttgggctatgtggtgttagaagacccacaaattaccattaccaatggtctgttgcgtaaattggtagaaaataaaactgcagtgattacctgcgaccaacaacatttaccttgttcactcttacaaccactaacgggtcatagcgaacagacggagcgtatgcggtatcaacttaatgctagtgtgcctctaaaaaagaatttatggcaacaaacggtggttgcaaaaattgataatcaagccaatcattttttattacggcaaaagaatgcactacgcctaaaacgctacgtaaaggaagtaaaaagtggagatttagataatcaagaagcgattgcggcagcgttttactttcaaaatttatttgatatagatggttttagccgtaaccaaaaaggcattgcaccaaataatttactaaactatggttatgctattttacgtgccgttgcggctagggcattggtaagtagcggtttgttgccttcggttggtatttttcatcacaataagtataacgcgttttgtttggcagatgatgttatggaaccttaccgcccttttgttgatgccctagtttatgatattgtagaaacaggctgccaaatagaagaactaaacacgagtataaaaacagacttattaatgattccagccatggatgtggttattgatggaaaacaaagtccattaatgaatgccatgagtagaactacaactagcctttttgaatgttttgaaggcagtagacggaaattgttatatccaggatttaagtcgtctttggaggcttttgtgggataaaatggattcctgccttcgcaggaatgacaaggcagagacctttaactaaaataaaccattatggatttggaatcaatagttttaaacaaaagaataaatttttctcaacattaggttgtcattcctgcgaaggcaggaatctaagataaaattggattccgtatcaagtgcggaacaacaagacagatacttttaactaaaatgtaaaagcatgtatggcatcttatttaacacgattaaaccaatataggtgtatgtgggtattggtgttttttgatttaccaacggagacgcttaccgagcgtaaagcagcgacacgttttagaaagaatttgttagatgatggttttggcatgtttcagtttagcatttataccagattttgcccaagcagagaaaatgctaccgtacacataaaacgtacaaaaaaggcactgccaaaaaaaggaaaggtatgtatcatgcaaattaccgataagcaatttgggatgatggaactgttccatggtcaaaaagaagccgatttggagccaccgtcacaacaattggaacttttttaggattgtcattcctgcgaaggcaggaatccatttaaacacgccctgtcatgctgaactcgattcagcatctcaaatactatacaaatagaacttaaaatgtcagactgagcgcagtcgaagtccatttgaaagccaaattattaaaatccaaacccataacataaaaaacaggataccagcctgttacagtaagtatcctgtgaattctccataaatttaaagaactgaaagcaattcacaacctgttcgccaatggtataagtaaatgataacctgtgaattctccataaatttaaagaactgaaagcaattcacaactacggatgtgataatagatggttttgtcgtcctgtgaattctccataaatttaaagaactgaaagcaattcacaaccacaatacttttatcatgaatatggttgttcctgtgaattctccataaatttaaagaactgaaagcaattcacaaccgcaacagtatacccatagcgcgttccgttcctgtgaattctccataaatttaaagaactgaaagcaattcacaactccggttcttttttaaatctatacctcccacctgtgaattctccataaatttaaagaactgaaagcaattcacaaccatgagagcgataacaaaaactatcgccttcctgtgaattctccataaatttaaagaactgaaagcaattcacaaccaggcttataaagtttcttttgttgggtatcctgtgaattctccataaatttaaagaactgaaagcaattcacaacctagatgttgttgcttttttttgtatatcccctgtgaattctccataaatttaaagaactgaaagcaattcacaacaggcgaagatgaaaatgaatttatgccaaacctgtgaattctccataaatttaaagaactgaaagcaattcacaaccagtaaaccgttaagcttctaggggctgtccctgtgaattctccataaatttaaagaactgaaagcaattcacaactatttggtcatcacttaattttgtgctaaacctgtgaattctccataaatttaaagaactgaaagcaattcacaacctgcggggcgggggggcctccagaagaggacctgtgaattctccataaatttaaagaactgaaagcaattcacaacttaggcattagaggagtaaaagacatcaaacctgtgaattctccataaatttaaagaactgaaagcaattcacaacgtactaccatggctaattgcactagctagccctgtgaattctccataaatttaaagaactgaaagcaattcacaactagtgggcaaatcatccattggacagatttcctgtgaattctccataaatttaaagaactgaaagcaattcacaaccaaaactttgttttattctcatcaaaccaccctgtgaattctccataaatttaaagaactgaaagcaattcacaaccgttcatttgccaccgcactctttatcgctcctgtgaattctccataaatttaaagaactgaaagcaattcacaacccacagctcatactgtgcgtaacatgatacctgtgaattctccataaatttaaagaactgaaagcaattcacaacctgcgttttacaagtgcattacaccgcaaccctgtgaattctccataaatttaaagaactgaaagcaattcacaaccaaaatatgtgcaaaaacaaataaataggtcctgtgaattctccataaatttaaagaactgaaagcaattcacaactagtagaccaacacggtacagtatcagcaacctgtgaattctccataaatttaaagaactgaaagcaattcacaacttagaaaccaatacaatttctgcaggcgaacctgtgaattctccataaatttaaagaactgaaagcaattcacaactagagccgttagattctaacctaactattccctgtgaattctccataaatttaaagaactgaaagcaattcacaacccaacataatgaaatacattatttaggttacctgtgaattctccataaatttaaagaactgaaagcaattcacaactccattgtcaaatctatcttttaagattgtcctgtgaattctccataaatttaaagaactgaaagcaattcacaactattgaaaaatacaacggtaaaaatacggcctgtgaattctccataaatttaaagaactgaaagcaattcacaacttgggacgggacatcatggcagcctataggcctgtgaattctccataaatttaaagaactgaaagcaattcacaactaccaaagccaaagacaatttaccagccttcctgtgaattctccataaatttaaagaactgaaagcaattcacaactgagttgttgttggtttaaatgaaaaattacctgtgaattctccataaatttaaagaactaaccgaatacagcaaccgatgaaatcctctaaaaaaataatagtgctttgcgttaaggattgaagtcacgctatggcgtgattgaaactccccgacgtaggagggagcgactgctgaaatgttaacattcatgaatacaataataaaaaatattgaccaatgaataaagcctgaccccttgtgggtaacgccatgataccaaaacaaaaaaagctcaaccttacggttgagcttttatatgattatttaaaaggattttattaattccctccagcttctaaatttttcatttctttttcaatcaaatcatagaattgatctaattttggaagtacaacaattcttgtacgtctgttagttgctctgttttctgcagtttcattatcaactaatggcacataagaactacgtccagcagcgattaacctaccaggtttaacacctaagtcttctaatacacgaactacagatgttgctctttttacacttaaatcccaattatctaaaagtactccactttggtaagatctactatctgtatgtccttcaaccatacactcaaaatctggcttagcctttacaactttagctactttagctaaaacttcttgagctcttgtggttacattatagcttccacttttaaatagtaacttatctgatatagagataaatacaacacccttttcaacgtttacttcaatatcaggatcatttattccaacctcacgtttaaagcttgttactaacgctagagtaacactgtctttttgtgttaaagcatcttgaagacgtgtaattttaagatctttctctttcaaactctctagagttttctccatattgttagcgccctttgcagatattattccaagattatcatttgcatcttttaaatctttaacgcgctcttctaaaacagatactttcgctgtcgctgaagctctttcttctaaacaagaattcaatttaacggtagctgagtttaataaatcttgagtttctttttgcttttcttctaatgccaaaaattcctttttggaaacacaagaacttagaataaataaagttgataaactaagtaataggactttcttcataattaataataaggttttattgaataaaataattgccattttgtttcgacaaaagtatataaaaatcagttgaaaacagtacagttaacaaaacttttactaactgagttataaacttttgtagaatttttttctatttacgaaatacaaccaaactatagatgttttttggtagtattttgttttctcttttactgcttttcgcttttgaagaagcccataaaaatgagcataaaaactaaaatgcgcctttacaatagctaaggagtgaagaaacttaaaatccaacaaaaatttcacaccagcaatgccatctaaaatcaatcttacaactactaaaaacaacacattgcccttagcattttttacaagtgcaaacagactattacgaaagtttaaaaatgtttttttaggattagagttgtttaaagttgctcctcctacatgataaacttcagaattaccattatataccacttgatatcctttgttttttgcacgccaacatagatctatttcttccatatgtgcaaaaaataattcatcaaagccattaagctcattgtaaacatgttttcttataaataaacacgctccagaggcccaaaaaataggctgtacatcattgtattgcccattgtcttcttctaaagtattaaaaattcgtcctctacaatatggatacccatatttatctataaaaccacctgcagctcctgcatattcaaaaaagtgtttttgcttaaaatctaaaattttaggctgcactatggctatacttaaattactaccaaaagtccgttgtattgggcctagccaaccttttgtaactgcaacatcactattcaaaagacaaaacacatcagcatcaacatgctttaaagcatcattataacctttagcataaccaccattaacggtattcttaataatttttacttgtggaaaattagattttaaaaatgaaatagaatcgtcagtagaagcattatcagctacataaatatcggcaacctcagaatgcttaattactgaaggtaaaaactgttctaagagcttttttccattccaatttaatataactacagcaattttcattttttataatctggaatatcttttaaaaactgataccgttcttttccaaaatccatctcgcaataataatgatttaacccattagtaaccattaaataatcagagttaagtactaaattatacctagctatttgatcaaacactttttggtctatattaatggagggcgctttacactcaataacaagctgaatatctccatttggtttgaatactataatatcataacgtttttttaaatcattaattttcaactctttttcaacgttaatcaatgatttaggatagtttttatcttcaattaaaaagtgaatacaattttgccttacccattcttcaggttgtaaaaccacaaactttttacgaataatgtcaaaaattagaactttattttcgctatttttgaaacggaatcgatatgttgggaaattcaatttgtgcacctcacaaatgtatcattataatgctacaattgatatacttccctaaaaattttctatagcactttggacgaggttaaacaattagttaccgatattaaaaacaggaaccttaaacctatttattttttaatgggagaggaatcttattatattgataaaatttctgattttattgaagactctattctaactgaagaagaacgaggttttaatcaaatggtattatatggtagagatatatctgttgaagatataattagtaatgccaagcgttatcctatgatggccgaatatcaagttgtaattgtaaaagaagcccaagatttatccagaactattgaaaagcttgcttcgtatgcagagaatccacaaaccacgacagttttagtaatcaattataaatacaaaaaaattgacaagcgaaaaagcttatataaaaccttaaaaaaaacaggaatagtttacgaaagtaaaaccctttacgaaaaccaagttgcggattggataaggcgtgtactttcaccaaagggctacacgattaccccaaaagcggcacaaatgctagtggagttcttgggtactgatttaagtaaaattaataacgagttagagaaacttcaaataattttatctaaaaacagccaaattacgccagaagttattgaggaaaatattggtataagtaaggactacaacaattttgagttaagaaaagcaattggaagtaagaacactgtaaaagcctacaaaatagttaattactttgccgaaaaccctaaagataaccctatggttgtaactgtttcgctgctttttaattttttttcacagctgttgcatttccatggattaaaagataagtcgccaaggaatgttgccactgcattaaaaatcaatccatattttgttaatgaatatactgaagcagcaagaaattaccctatgcgaaaagtaagcgcagtagtttctacattacgtgattttgatgtgaagagtaaaggtgttggcgctaatgctgtatcacaaggcgatctattaaaagaattattagttagaatattgaattaatggaagttgacattcataaaagttggaaaccacatttaaaaaatgagtttgagaaaacatatttcaaaaatttagttgggtttgtaaaagaggaatataaaaattaccgctgttttcctcccggaggagaaatttttaatgcatttaatcattgtactttcgatgaagtaaaagtagttattattgggcaagacccttatcatggtcctggacaggctaatggtttgtgcttttcggtaaaagatacagtaacgcatccaccttcattaataaatatatttaaagaaatagaaaatgatttaggagttatgtatccaagtagtggggatttatcgcgttgggctaaacaaggtgtattattacttaatgcaacattaacagtaagagcacatcaagcaggaagtcatcaaaagcaaggttgggaaacgtttaccgatgcagttatacaaataataaattctaaaaaagagaacatcgttttcttactatggggcggctatgctaaacaaaaagtaaaactgattgataaaaccaaacatgagattttaacatcaggacacccatctcctttaagcgccaatagaggttattggtttggcaacaaacattttagtaaaacaaatgaattacttaataagtttagtaaagaaactataaaatggtaattaacttcctgtaggagctaattcttgttgagtatccacttcaatgttttgattcaatttgattggctcttcagtatttttgagcccctcattctctaattgtttcattttaggtattagacgggccacaaaaaacattatagtatttactgcaactagtgctaatataaaaatagtaatgttaaataacataggcaaatggggtttaattttcgacgaaactacatgatttttcgatgaaaaacaaattttatggttaaaatgtaattatctgtacaaatttatataaaaattaacaaagtacaagacgtaagactacatatatctatttaaaaagaaaattcttataattcttcaaatttattgtacaaaaaatgatgatatcttattttaaagcagttattctttcatttttacattttcatttaactcttaaaaaaataaaatttacttttgatgcaaattttagactatgagcaaaccagaatgggtaattgcaaaaaaatatgaagacatcacatacaaaaagtataatggtgtagccagaattgcatttaataggcctaacgttagaaatgcattccggcctaagaccacaagtgaactttatgatgccttttacgatgctaatgaggatacttctataggagttgttttactttctgcagaaggtccgtctactaaagatggtatttattcattctgtagcggaggagatcaaaaggctaggggacaccaagggtatgtaggagaagatggttaccatcgcttaaatattcttgaagtacaacggttaattcgttttatgccaaaggcagttattgctgttgttcctggttgggctgttggtggtggccatagtttacatgtagtttgcgacttaacattagccagtaaagaacatgcaatttttaaacaaaccgatgctgatgttacgagttttgatggtggatatggttcagcatatttagctaaaatggtagggcaaaaaaaggctagggagattttctttttaggtagaaattattcagcccaagaagcttttgaaatgggtatggttaatgcagttataccgcatgatgaattagaaagtactgcttatgaatgggctcaggaaattttggcaaaatcgccaacatctattaaaatgcttaagtttgctatgaatctcacagatgacggcatggtaggacaacaagtatttgcaggtgaggcaacaagattagcttatatgactgatgaagctaaagaagggcgtaatgcattcttagaaaagcgtaagccgaactttgataaaaaatggattccataatgcaaaatctctcagtttggatttcagcaatgcggctacgaacattgccattgtctgtttcaggtatcataattgcttctagttttgcagagtataatggctgttttaattggtcaatatttattttggcgctattaacaactattagcttacaaatactttcaaatttagcaaatgactacggcgatggtattaaaggtacagatgataacaataggataggtccagaacgtgccatacagagtggcaaaattacgccaaatgaaatgtttgaagttattaaattgaatattctaatttgtattgttcttgcctttcttttaatctttaaagcgtttggttctcaatattttctgttaacacttttattctttcttttgggtatatgctctgttatagcag

SEQ ID NO: 4316 - DNA, 24164 bp, synthetic construct
  source 1..24164: mol_type = other DNA
  misc_feature 1..24164: note = Synthetic
aaaataaagataatcggtttggttagggtcctcaaaatgggcgttccacgcataatattcggcataggtgtcaaacgtagcaaatgaggcaattcttggcccaaattgcgatgtttccgcaagccgtatatccttgaacgggtactgcccgtaaaccgaactaaaatactgcaggccatctttgtaagcagccataaatctgccgatgttgacgttatggtcgggatgataatagatgctgatatttactttgtgctctaattgcacgctatccttcgccaccgcgtattttgccccaactgcggcaagaggcgcgtatattcctggttggttttgtacaaaatggaaatagttgcgcccgttttgccgccaatgtttttgcagctcgcccgatgagatcatggtctgatcccctgaagtgctgatcgtaaggtcccagcttaccaggtcagcacctttgcccgcttttaaagtgcttatgcctttgggatcatcctgggctatttcttcttcttccttgggcggcagaccgtttttcttgcgaacatagggactgtttatctcatcgtcatcatcatagcctaattcaggcaagccacctgtgaagaatgtaccgttacgcaactgcctttggccatacaaaccattgccaaaaccattaaagcttaccgacgaattgacttcgagcacggtggaatcgccgggggcaagcggccgttcaaacttgtataaacgataggctgcagtatcattttttggcttgaaccagctaaaaaaggccctgtggtatattaacggacttgtgaaaggaataggtttgccatcaattttcatattgtaatcagtcaactcgtcgccatccagtaaaacctctgaaatcggcatggtatttttattgacaacggtgatgaacgcttttacaacttgcgcctgtttatcaggataaacatcagcgaacattttgatcctggttattttgggcagcggaaggctggcaaaatgttttaatgtcttttcataaataattgcgcggttttcatcttcaacctggacggtgtaattatttagatagctgacattatagtaattgtaggcagcaacagataaaaatgataagagcaacacggacgcaaaaacctttgtttttttatcgaagcgttcgggtaccagttgcagcctttctttaaaggaggaggtaacacccctgtaataaaacaaggcagatgcaatcgcaagcaaaccacccgccaataaccaatacaggtcgaaccagcttacagactttatcatgtgcccaaggccgtccatatccgaaatcccgaaccagggagtataggagtacagcaataaattataattgaagatgcccgactcgcgcagaaagaatatagccacccagataaaaaccgtgatgccgtgggccacaaatttgttgttaatcaaaacatgcatcgcgtaagcgaacaataccatttcgagcaaggcaggcagcaggatcacaaacaggtatattatatatacagccaggttgtattgatgaaagccttttatggtttgcacgaaaatgcccgtaaccatcggtatcaatgacaagaaggctccaagaaaaagcagggcggcaagctttgaaccatttaaaacccagttgggtggcggcagggaatcattgataaaagcgtagcgggtaagccggtcgcggtgcaatgtctcgccggtatagaatactatgataaagaatatgaagaatgggaaaacatcattaaatatacccagtaggacaactgtgcgggggaaatagtgtacgctgtaatcctggctgcccatcgaaaatacgaagcccaggaagaccacgccgctaaataaaatgatccagaagtaattgtcgcggacaatgttcagcaattccagtttagtaagtgtaataagggttttgcggttatagcttccggcaaaattcgtgtttactttggccggcaacgcttttttaactgagcctttttcgtcatcaatggctgccttatccctcgtgccgctaaagaatttttcgaagtcgaaacgtaggtaagtataaattaaaataaccagccccacgcccgtccaaatgatacggtttagcaaaaacttgcccgatgtagccatcaatgttgtattttgttgtatggacgaagaattatttgtttgcagcctgactccgttgatcccaaaggggtccgacagggtgatcacggtcgcattagtggtattattgaggaaaaaaatggaaaggaaatagccaaggaaaagcaatatccccccggcatatatcacctttacattgcgggttatcgccaccaggccaaaaaacagcgacgaagtaaaaaacaggttgggcagggcgatcgtaaaaaaaggctgcaggtagtaaattaaattattggggccaaattgtttcgggtctgtccatcccattgccgggccgagtttactgccgatgaaaaccccgaacaataccgagctgcctataaacatcatgaataaaaacgaaccgaggaaacgcccccagaaatagcctgcttttgtaataggataagtgaggtaatagtctttggtattgtactcaatatcacgatacagtggggtgcccataattgatgaactaacaagcatcatcagcattgtaatccctgcgcaccacagcgcgataagataaggggaattgatatgctccttctcctgcacaggcaacgaccctgtggcaaacgagccgattgtaaaaattaatgcagctaaaaaatataaatatatcgcaggccgtctgagcctgttctgaatttcgaacagaaatattttccaaaacatgatcgtaagcttttagggggttaaatagtatttacatctacgcgtgtagcgatattgctgaaataaacatcttcaaggttcggggcagcgggtacaaaaccatttcccgggtccgtttcctgcagtatcctgatatgcagcttgcctgtttttaattgtgtggatattactgtaaaatcgtcctggtaatgcccgagttctgctttggttattgatttgctgtatattttgccttccatctcatgtaccgctgtatcaggttcaccggcatacaatacctcgcccatgcaaataatagcaaagttggagcatagcgtgctcacatcctcaacaatatgggtcgaaaggataacaatggtattttcacccagttggctaagcaggttgtaaaagcggttcctttccgccgggtccaggcccgcggtaggttcatcaacgataattaatttcgggttgcctatcaacgcctgcgctatcccgaaacgctgtttcatcccaccggagtaagtgcccaggtgtttctttttgtctttcgataaattgacattgtcaagcaatgaattcaccagatcctttcgttcaccggcattttcaatgccttttaattgggcaatatggtcaagcatccgctcggccgatattttgggatagaccccaaactcctgcggcaaatagcctaacagctgccttacttcggttttgtgtttcaggacatcaagatcatccaggaacacgctgcctgagtctgcttcctgcagcgttgcgatggtgcgcatgagcgatgacttaccggcgccgttagggcctaataagccgaacatgccgttattaagggttaacgatacatcttttattgcctgcacaccattggggtaagttttgcagagcgagttgatgacgagtttcattttttattggattttgaattgttaattatgttttgagcagaacctgtgaatattattttggcgctgtcggccaggtggtaacttaggttttgaatagcattgccatcaagcataaatgtagcacggttaagtacggcgagattggcctgtttaatttggttgctgctttgtataatgatcttcgaaccactgctatcgctggtgcctatcactgcttttaatgcccggatatggttgttagacagcactactgtactcccgtaattttgcttcacagaaatgctgtcttcattaaaaccttcaatcaatacctggcgcatgtgccaatcgtcttttacagtggtatcagtataagtttgcgttcccttgtatttcccgtaaactgcgcttgctgtaacttcggtaagttttgggcagctgacgatcagcacataattaaagcggttgtatatatagctgccttcaaaatttgattcgatctgcagcctgttgcctttttgtttaatactggtgtagcttaaagcctcgggatcaattctcacgctaaaggggccctgtacaaattttacatttgatgcagttgacgatgggaggtcagcggcgtcaaaatccttaaagtttaaggttttgtagtcccggtagatgtccttgtattttcctgagagatattctgttttgagcaggttatcatacgcaataagcgccaatacaagcaaaataacagctgcgaatactaatttgctacttgttttcatcctcattatttaattttgacttgtagttttccagtttaaatttttcataccattgctgcaggtcctcaggttcaatatccagcaggtatatgttcctgaaaaaaacaggcaggtcctgctgaataaaacgttccttccggtaggtctttactttatcggggccatcgggcgctacatacaagccaagcccccttttattatagatcaccccctggttttgcagaaactcgtacgaccgcattacggtattggggttaacctccagctcaactgccaggtcgcgaactgaaagtattttttgctcggccggccatttgcccaatagtatattttcacttacaaaagcggcaatttgcaggtatatggcttcgttatctctaaattccattgtactgttaaattaaacctgcttttcctttaaacgataataagcagcagcccaaaaaataccggttaatacactaacaagggtcagtatatggccttgctgggcaatagtgatgttgatttcatgaacggtattattctccataaatgagatgccgccgaaggggacattcatcattaccttagcccccagcatggcatgctgaatgatgttgttgacgacaattaaaaacgccaggccaatgaaaaatacaaacgcagattttataaaatgcagctttttaaagtaaacagccccgcagaaagctattgaatgcagcagcgcgtataaaataaacacctggaaacctccgccggaatgaaacgggtcgaaaacttctgtttgcctgccgggaaaatgttttatggatgttaaaaaaaacaataccaaataaaaacacccggtgtatgttataatgagtataaggtaggagaacagccaggcaaccaggtacttttcaaaatgcgacgcgggcaacgtaagccaggccatagctttattcttgtcgccgaggtcagcaaatacggtgcttgtgaatatagtgcctgccaaaagaagtatcccggtaaacaaggctgtttgcaatccaagctccattggagcatttatcaggtaaactaaaaaacacccgcccagcagcattacccctaacaataccagcagtgacatcacgtagcttttataatgttcggccgtgtgtttgatgaatagccggccaaaccgttttatgttgaatatattgttcatttcacgatgcttttagtaattccaatatgggtttgttcccattgacaactgcattaaaaagtaattcgaggtcaactttgctatatttcccggtggtattttgcaggatagcatttttaccacgcatattctcctcttcatataaaaccggtaaaccttctgtatcggggtaggtgccaaaagttaacttctcggctacgtcatccattaattggttaaccacaatttctcgctcgtgcaataccagcagggtgtcgatcaaactatccaaatcccttacctggtgggtcgatattacgatacaacgattttctgtcaacaccgaagcgatcagcttgcggaactgaactttcgaaggaatatcgaggccgtttgttggttcgtccattatcaccatgctggtattggtggcaaggccaaaagcgatcatcgtctttttctgctgcccgaacgattgtttatccataaccgcatccatatcaatatcaaatactttcaggtactggtaaaaatcacttttgctgaatttaggataaaaacctgcggtactggaaacgaactgtacagggctgagcgacgggacaaaaagttcttcggctaaaaaataaatatcttccaatacagctaccggcctggtagaaacatcaatactattaaacaggcattttccttttcccggaaaggcaaggccggtcatgttttttaaaagtgttgatttaccggcgccgtttttaccgagcaggccataaatatgcccttcgtttaaagacaaattgagatctttaaaaagcaaacgattgcggtggtatccaaaactgaggttattgacctggatcatttttagtgtattagtatggtagtacaccacaaatgtaatggcatttatttataatccaaatttttatcaaataaattttttaggaacttaatgtaaggtggcaaaatggctttatttcgcttgtcagcgttcatgttcgcgttcacttcgcgcgagcacaggcaattattttatcgtgaacgcttgaaaatcaattagttgatttttgcaaatactcaaaatgtgcaaaaacgaatattcgcgggaacaccccaattcctgttcacccagatattaagtaaaaaacctgcagagatgagaaaaaaagtgtcaaatgcaacagcgtagcgttcacttcgcactagcacacgcgattattttatcgttaacgcctgataatcaatggttctatttttgcaaatactcaaaatatgcaaaaagagcatttcgcggcaacacctctgcggagaccataaaaatgacagcctttaccttttaccttttgctgattcaatgatttttttcgatatttagggtgttctatcactttaataacaataaagcaaatcacaactttccgaagtcgggagacttcggaaagttgtgatttgctttcagatttgttctttgcgatatttggcacaacgattatgctaacggattgaaaacatctgccgttgtgatttgctttcagatttgttctttgcgatatttggcacaactttgagtttgtaaccccatcgggccacttagttgtgatttgctttcagatttgttctttgcgatatttggcacaacaaaagaattggtttagtgttttcagcacagttgtgatttgctttcagatttgttctttgcgatatttggcacaacctcccccggccctgttttccgaactaaatagttgtgatttgctttcagatttgttctttgcgatatttggcacaacatggcagctcattatttaaaccagggactggttgtgatttgctttcagatttgttctttgcgatatttggcacaaccacactaataaaaactaagctaaccggccagttgtgatttgctttcagatttgttctttgcgttatttggcacaactatttaaaatattagctcaatcaaatttcagttgtgatttgctttcagatttgttcattgcgatatttggcacaacaaaccaaaagagattatgaaaacctattatgttgtgatttgctttcagatttgttctttgcgatatttggcacaacgttagcacaatgggaatatagaacgccttgttgtgatttgctttcagatttgttctttgcgatatttggcacaacttggaaacatttccgaacgttaacatattcgttgtgatttgctttcagatttgttctttgcgatatttggcacaacataccccttattatcgcattgatttaaaggtatttatcgccgaaatcgcaaaaagaaaaaaagccctgctgcttatcaaagcaaccgggcttttttcattaaaacaattctaattgctgcggtgtgtttggcaattccttttgttccttgccataaaaaagctccatcatgccaaattgtttatccgtgacggttaaaatccctacgtgcccctttggcggcagtagtttttttacacggttaatatgcacatcggcattttcgcggctgctgcaatgccttaaataaatggagaactggaacatggcaaacccatcggccataatatccttccggaatttggcatacagcttccggtcctttttggtttcggtcggcaggtcaaatagtacaagtatccacaaaatgcgatattcgttaaaacgcatggtcgagcttaaagcagaaagctaaaagcagaaagcctcctgtcggtatataataatttagctttccgctttcagctttgagctttcggcttttttcaatggcattaaaggatacaaaatcttacggcttttcagttcatagcatttggcaagcgaagccgttgtacgctgtaaaccgaccatcagcggactgctttctttttcaatatgcacatcccgtgtagcaatacctagtagccgggctttaagttcggtggtcataaattcaatctcgaacgtgcgggattcaccgtcatccactatttcacaaaccattttatccacataaggccggtagggttccattatgtcatcggccaggcagtaggcgttatatttattgcggtggtggatacccagcgtaggcaacaagcccgaaccaaccaaactgcgcgcgaccatcgcccgcaatatggcatagccataattgagcaggttattaggcggttcgccctcgcgccggcggaaaaaatttgttgaagccccgaaaatataccgccagtaataagccgccgcccggccttcgtaattgtcagggtcgccggagcgtacgctttttgcccaatgcaacatgttatccgtctcaatgccgcgctcatttaatatagctgcctggtttaatattttagcgctaactgtttgttgccacagttgtttctttaaaggctccgaagctgtgatctggtgccggaaacgttcgctttgtatatcatgtccgtcgagcggtaaaaacaaaccgacagggtgatggctgtcattgcaggtaattacggctgcattgttttgaagcagcgcggctaatgccgcctgcgttatagtaatttgctggtgatccaatatcacgatgccaatatcttcaataggcaccgaacgtttgttgtcccccaattttgacgcatcgggaagctcgatctgcaattgctcattgcgtttgctgaggtatgccgggttgccgaaatggagggtgcgtttgatcatgaagctttatataaataagggtaggattttttcagataataattagataaatataagattttaaattaatacatcgatattagtaaaaaaaggaattgcttttcattatagttcatagtggtgtttcgagcaacgaatataggggtccaaggttatgatttgcttccagattacggtagttcatagctcactatcgagatgcataccactatgtttagttatgatttgctttcagattatggtagttaatagtctaatcggtcgagcaatggtgtctttatgagttatgatttgctttcagattatggtattcatagttcaacggccatttcatatccaagcagtaagttatgatttgctttcagattatggtagttcataatgtaataaagtttggtaatagacctgtaatactatgctattgaatgaaacagatttcaaccgcgttaacaaattagtcaaagggtatggtggcggaggtccaaactccgtcaccttaattgccattgaaagggctgaaaaaaagaagccccacggaatacgcaggacttaagaaaaatcttcggcttatagccttattatgataagctttcaaattatcgtcataaagatgcggtttttattttaatttagcaagaaaacaagtaacctaacttatcatggataaaatattggggcttgacttgggaactaactcaatcggctgggcaatcagagatacaagtgaatcagacaaccaaattatcgacaaaggcgttctaacttttgaaaaaggtgtaggggagggcaagtcgggcgaatttcctttagttcaaaaaagaaccgaaagccgtggtaaacgccgtaattatcaagcagaaaagtatcgtaaatgggacttgttgcaaactttgattgaacataaaatggcacccttgtctctcgacgaactggatgagtggagaaaatatactaaaggtattgccagaaaatatcctcaaagtgagcaattcctggaatggcttagatttgactttgatggcgatggtaaaccggattttgaacgcctcgggtacagccgacatgaaaatcactatctgttcagaatgttagccgcaagcgatgaacaaaggaataaaaagatatttcagggtaatcctcatattttggggagggttctatatcacttagtgcagcgaagaggttttaggggacgagatgaagaagaagccaaaactataatgcacgggagcaaggatagcggcactgttggagttgatgaaatcaaaccttatttggatcaatacaaaacgcttggtgcagcgttatatcatattaataaggataaagccgcacgaatacgtaaacgttataatcttagaactgattttgaagcggaattaagagagatctgtcgggttcagggcttgggtgaacttttttttaaaaaattgcataaagctattatatggcagcgaccacttagaagccaaaaagggttgataggctattgtacctttgaggcgcccgtaaaaaatgagcaaaataaatatataaaagctggtaaaaaacgctgtccaataagtcatcctttttatgaagaataccgaacctgggtgtttatcaataatttaaaaattgaattgccgacagacattattcgcgagcaatatttacaggactccatttatccggttttttataataaatcaaaggattttaagctttcttcaataagcaaagagctaagaaaagcaggcgggcaaattaaggccaaattccctgacgataccaaagttatctcctgtgcgctactcaacgctttcaaaaatattttaggaaataattggaaagaacaatatagctgggacgagttattaaatgatcgacctaaaggtaacccctattcgattgaagatatatggcatgtactattcacttttgatagtagcgaaaagttaaaagagtttgctgtgcaaaaacttgatctcggtgaaaataaggcagaagagttttcaaaaataaaattacagcaggggtatgccaccctgagcctttctgccattaagaaattattaccttttttaaggcagggcatcatttactctgaggccgtttatttagccaatatgcataaagtgcttggacaagaaaagctttcggggcaagatgtcgagcattttacacaaatatttagagaaataaataccgaacaaaaggaccatatacttgctggaacagttattaacagtcttataagcgatcaactaaactctgaacaacgctgggggatggatgaaaattatgatttagatgatgttgatagcaaagatattgtaaagaaaataatcgacataacaggtgcagaatcatggaataagaaatccgatcaggaacgtaatcgtttaacagggaagattagtacttcatatcttgatttcttaagaaaaccaattaatgcgaaaaaagataaaatttttataaaggcccctcgattgcacgataagatttttgacaaacttcaggaggattattcattaccagatagaaatatcagggatttatggcatccatcggaacaggagacctatgaaaacgcgaaagaagttaatggtgttaggctactaagtgatccaaaaccaattagtaatggtttcaaaaatccaatggctcttaaaaccatgtacaagcttagacaccttatcaattacttgctgcaagaaaataaaattgacgacgacacaaggattgtgatagaaattgcccgtgaattgaatgatgccaataaacgcaaggcaattgagagatggcaacgtgaaaaggagagggagaatcaagaatacattaaaaaaatgcaggaggactgcggcgttccgataaatgcgataaaaaaagacatggtcgataaatacaggctctggcttgaacaaaaccggcaatgtctttatacaggcaactttattaattgcaccgaattgtttagtagtaacgccaagtacgattttgagcatactatacctgcaagcatgagttttgataatgaattaaaaaatttgacaattgctgacggggtatataataaacaaattaaaggaaaaaaaatcccaacagagttacctaattatgagcaagaccgagccggttatacagctataagaccgcgattaaatttcatgtttgaaaaagttgagcacctggagaagcttttggcagaatggaagaacaaatcaaaatttgcttccacaaaagatattaaagacgcatgtattcagcacaaacatatgattaagtttgatctggactattggcgtaaaaaactagatactttcacttgcacggagtataaagccggatggcggaatagtcaattacgcgatacgcaaattgttacaaaatatgcattaccatatttgaaaactgtatttaacaaagtcgaggttcagaaaggttcagtaacaaatgattttaaggaaatatatagcgtaaaatttagaaatgaagtgaagagccgtgacaaacatagtcaccatgccatagatgccgctatacttacactaattccgccatcagcaatcagggataagatattgtttaaatacaatgaagttaaagataataactataatggcacgtatcatgaacctgtaagacattggcccaattttaactccgaacatttattgtctttcgaaaataacattctgattaattttcaaccgcaatatcggactctaactgctacattcaaaaagttaagaaagcgtggcaagcagcaatttgtgaagcaggcagtagacggtaagaaacaattaaagttggatgggactggaaacaagataccattaattgctaaaggtgatacaataagaggtcaattacataaagaaactttcttcgcggctatcaagcaacctgtttacgacgaaaaagacggtaaatttataccgcaaacagatggcgaaggcaatttcatttttcaggagaacgaaaaaaggaaagatgaacttttctttgtagctaaagttccgattacttcatttacaaaagaagaagattttgaagtagtggtcgaccctaatttgaaacagttcatgaagcttgaaattcgaagaaggcttagcactggaaaaagttttgctgaagccattgaaaaaatatatgcatttaataaagagaaggataagaacgggaatgatattttgccaatacgccatatacggtgtaaagtaaaaagcggtggcggaggcttcgtgaacaatcctgttacggtcaaaactaatgctacctctcctccatccaaaaaggaatataaacaaggcctttatgctcttaatggtgaaacggttgtcagcgcgttttatcagtcgactgtagatgaggaaatcatacgaataattcagccatattccataatagagatagcaaaagcaaacgctaaatctttagacgacgctgtaaattcaaaaattgaaattacaattaaaaaggaaaagcatctcataccgctttattcagtgttaaagattaaacaaaaggttcttttttatgaagaagataaggacgaattaaaagttatagacgtcaaagaattaagtaaaagaatgtacttaatcaccaagttcgaagatggaagaatttgtttcaaacatcatcttaattcaatgtcggaagatgaattaaaaaacgagatgaagcgtcttggattggcggatgtgggctcgtcatcctttaactttgactatccaattccaaaactgcgtttatcgaaagcaaatttcaattttataattgaaaataagcattttgagatgcgacctgatggaagtattatttggctctattaacgactgataaattaagatacaatcccgtttactcatcaattcattagtccaatgtaaattaaacattaacaaaacataacccacctatttgcatttaatgaaaaagtaatagatatttattgtttagttaatgtacttttgacgatatgcccaaagacaatttgccaacctacacaattgtggagcttttgatgaggatagcgcagcataataccttaattggtgactaccgaaaccatagtgcctatgatgaaggcgtgatggttaaaaccaccggcggcactatcagcttccccatggaactggttatgcagcaatttgaaaaccccgaattggttactgaaactgtattgctcaatacagccatatcatttaagcctgtaagataatttgcgggaaagaatcaagagtcaagaaccaggggccaggacagaaagaggcacgaccaaagatcggctaaagatgtttcgtagggtcagatcttatattttcgccatgtcttgataaatcaaatgaataacaacaaaagtctttcctggctcttgactcttggttctaaccacccttagttataaactcctgtttatgaatgatcttgtatcatcttgtaccgccttgtttaattaactggttaaactatgtttatttttgcttcgtaattttgcattaatctgccaaataattaaaccgttgcagttttaagtatgaattaaatatactttttccttttgtaaaagataggtacatttatattgccaattataatccgcctgctgtatttattttataccctttttgccctctcttttaccgggcgttttatttaaggtaacacaaaatttaaagactttgacagaccgtcatattgttttgttgaaaagcttgtacgtgtattagaacgatataaaagtatttaattttcttatagtactatttgcctgctcatccgactattgtcgaaatctgaatttgataaacggaatttggaaaggtattcttataaatataaagttgaataacgaattagtaaattatagaaatatgaaaaagattttatttgcggcagcaatttttgtatgctcgtttcaaacaatagcattttgccagggcggcaacgatgctataaacaatggggtttcaaaattaaagagcctgcttaccgaccacattattgaaaaggcttacctgcattttgacaggccatacgcttgttatgttataggggatttggtttattttaaagcatatgttaccatgggcgagcgccacgaaccttcggccatcagcaaaatattacatgttgatatgattgacaaaaatgacgtcgtgttacattcaatagcgcttcagcttacaaacggcaccggctggggcgattttgccttgcctgacaccttgcaaaagggcagctacaggataagggcctataccgagtggatgagaaatgatgagcacccttactttttcgaccaatatatctctgttggttcggtgaacaatgccggcagggtggctgaaaacacggcccaagcgtcaaaagcaagcctgcaatttttcccagaagggggcaatatggttcaggacctaccttcaaaagtaggtttcaaggcgataggggtaaacggtttgggtataaatgttaaaggtataattgttgacaatgaacataaggaagtagcaaagataaattcggtccacttagggatgggtgtgtttaattttatcccggaaacgggtaaaacttataaagcaatggtaacttttgctgatggatcgcaggaaagcattaaccttcctgctgctcaagctaaagggaccactctatcggttaataccgacgacccttcaaaaatatcaatagagatcagggccaatctgccttattacaaagagaacttaaacaaacagttaaatctgctggtttactatgcgggtgcattaaaacggtatacgccaaaacttgataattcaatactcgggctcgatttgccgtcaaatacagttcctacaggcatagtaaaagtaaccctgttgtcagaaacaggtgaacagttgaatgagcggctggcgtttgttcagaatcccgatctgttgaacctgtcggtggctgccagtaagcagttatttgcaaaacgcgaaaatgtccagttaagccttaatgccaaaaataaagatggcaatcccgtaaacggatcattttcagtatcggtagttgatgaaagcaagatagcggttgatgaaaacaccgggaatactatcctatcatctttgttattaacctcggatgtaaaaggatatgtggaaaaaccgaactactattttgcgaacgtaactaaagatacccgcgctgctcttgatgcattgatgcttacccaggggtaccgcaggtttgtgtggaaacaattgatcaatggtagttctcccgccaacgctgctgttgcctataacccggaaaaggaggtcaatatcgcaggttcattaaaaactaaaggaggtgaccccgttgctaattgtccggtaacgttattatccaaatccgggggcttggttttagcccaggtatccgacgcgcaggggcattttatatttccaaatgtacagtttgaaaccggtacagaatttattttgaaagcccaatcttcatccggaaaaaaggcattgcttacattagataaaccatcagacgggccaactgttagccctggaaatacaatcgactcaagatacaatgcaaatgctgatatcctggcatccctgaaaaatagccaggcgcaaaatgttatgatggccagtaccggatcaacaagcctgttattaaaagataacaaagttataggccaaaaaagcagtgacaattaccgttcatccaatttagccggaccaggacacgccgaccaggttataaagggcgatgatattaaaaattcatcctcattgtcaatcgggttgagcggcatagcacggggcgttgtattcagtggcggagtggccgccttacaaaccggggcgactatttcaggcgccgggggaggaactgaaggcatggaacctatgctggtggttgttgatggtgttgaggtgggccatgggatacctgtcgacctttatagcccttccttgatcgaaactgttgagattttaaaaggggcaaatgcgtctatttatggcatggaaggcggccagggcgttatagtgcttaccacaaggcagggcggtgaaagcgatcagacggtgagcaaagaaatgtcgcccggtattttttcaattgcgccaaaaggtttttataaggcgcgcgagttttattccccccgttatgatgctggtcaggtggcgaataatcttcccgatcagcggaatacgatattttggaaacctgatgttactactgacgcggagggaaatgcctcagttaatttcttcaatgctgacgggacaggaacgtacagggtagaagtagagggcattgatagtaaaggcaatttaggcgtgcaggtgtttaggtataaagtacagtaatttataaggttgggaatcaagagtcaggagagaggacagtaaagagccagtggttgggaattggaaattaccttgatttatatcagcaatcttttttatcccgattcttggttctaattgaaaccattcaggtcccgatgaaatccggcctgggtggtttcactttttacgggaataattttcgttaatggaaattgttttttaccaatgaaacttattatttttatacatataatctgcggatacaaccaatattctttaatataaaaatatttcatttttttatagtaccaatcgcttcctcatccgactattgtcgaatgtaaattctgatagaaggaattcagaaaactcgcttctattgataataagctgaataatttaacaataaacaaagatattatgaaaaagatcctatttagcgtggcgttgtttgtattttcatttcaaacaatcgcttattgccaggttggcaatgacgtaatggccggtccggtttcaaggttaaaaaccttgctgaccgatcacgaaatcgaaaaagcatacttgcatttcgacaggccgtacgcatattatgttggtggcgacatcgtttattttaaagcctacgtcacaatgggcgaacgccatgaaccatcaactataagcaacattttacatgtcgacctgatcgataaaaacgatgttttgatgcagtcgatcgcacttcagttaacagatggaacaggctggggtgattttgcattgcccgaaaaacttcaaaagggcagctacaggataagagcttataccgaatggatgcggaatgataaatcaccctatttttttgaccagtatatttcagttagctcgcttaatggtgccgaccgggttgctgaagctgcagacaaaggcgccgtgcccgccctgcagtttttcccggagggcggtaacctggtagctgaggtccactcaaaagtggcctttaaagcggttggcgccgatggattggggattgatgtcaagggaatcattgtcgacaacgagaataaagaagtcgcaaaaattgcatcggcgcacctcggcatgggagtatttgattttgttcctgaagaaggcaaagcttaccaggcaaaggtaacttttgccaatggttcacaaagcagcattgagctgcccgttgaatccaaaggaatagcgttatcagttaataccgacaattcgtcgaaagtttcggtcgagataaaaacaaaggtaattaggtataaatgtaaccaaaaatattagtaaaaaacgattattttatttgttaattacgtaatttttacctatttttaagtgtaaatcaagcacttatgatagctaaaaatcagtttaaaaccattattgatctcgtaaatcaatttccaactgaacaatcctgtcatcattatttagtaggccagcgctggggtggcggttatatggaatgtccttatgacgattgtcagggcgacacaccatacatatttaaagatggcattcgttacaaatgtaaatgttgtcaccggatttacactgctaagacaggaactatttttgaagccagcaaactcccgatgattaaatggtttgttgctatctatttagtgatgcataaaaagggtattagcagtattcaattaggcaaggatgttggtgttcaacaaaagacagcttggtttatgcttcatcgtatccgtaaagtattaggcaatagtgaggatgaaattttagaaggaacagtgcaattagatgaaacatttgtaggcggtaaaaataaaaatcgtcattgggataaaaaagtaaaaggtagtcaggggcggagttttaaagataaaacgcccgtcatgggaatgatgcagcaaaatgtttatgaatttatagaaaggcccaacaaggttgagccggataaaattgtaaaagaacgtctaattgtaaaaccatccgttattaagtgtcaggttgtagtaaacaccaaaggcgaaatattacaaccaattgtccgcgctaacgttttagtaggtagcactgtggtaagcgatgaatggtggggttatcaaggacttaaatccacctacgaacatcagatagtagatcaccttcacggacaatacgttaatcaattgggttatacttctaatgccgtagagggcggttggagtcaattcaaacgctctatattcggaatttatcataaggtgagtaaaaatcatttagataaatatgttgatgaatttgtttttaaacacaataaccgtacttttgatgttgaaggtcaaataaacgttatactgaaacaatcagaatgtcgtttaagactaaaagagttaaaggcgatagcaaatgcaaaccggcaaaaaagttgttgaaagagtatccagcggagacgctgaatttgataccgctatgaacaagttctttcctaagaaatccaaaaaaacaaacttacagttattggaagaaaaaaccggtgttttacttaatgatgggaaaacctctataagaatcaattgggatattaatatagatcagcttcttccatcaactccacaatcctaattgctatttcttcaaatttcaattctatcattggggctttcccgtacaggttttttagaatatccataaaatcagcgcaactatcagaaactaatagtttcaggtctcttacatctgtatcgtaattatctacgcttattatttttacggtagtcgcaaatccataatctatcaagatagcatgtgatacattgcttattcgagaaattaaccaagctatttctatttgtttattttctacccggacttgattatccatggtaacaaacattccttccgatgaaaatttaaggttatcgtaatagagttggctatcgacttttgtgtttatcggctttcctgttttcatctttctaacctataaataattatttcaaaattaaaaatgaatatctacttttaagcaataaaaatattgtattaaacatcggagtgctatcctgaattaccacattttagctgcacgcaaccgagatataaaatacgctgtaaaagcgtggctgtatctttttgcgtgcgtggctgtggtaagccctggatagcgagagatttatcagtcacgctattttttatccttaattaccacatatatgaaacctttacttttaatatttatctctattttgttgattagttgttacgaaacaagatacgaaccagttaacaaaacacttgatccttatataggaaaatcggaacatgaagtaatattacgacttggccctccaacaaaaactaccgatgatggcgctggcggccatatcatagactatgaaagtaccttcctttatgcagaaaatgaattaaacacagtcccatacgataaaacccttactacaacaacgaccatccccattacgcactatcttcaattttacatagataaaactggaattatatataaatggagaaccaatctacaaggaaatccgattaaagttaaaagagagcgcccaccacgacgacgaccgtctgatttatttagtcataagaaagataccacaaaaacttaagacatacttatggctatttcgaacggtaaaaaatgaaaaaaaggtttgtaactttttgtttaaagttggtatctttctttatgagagatacgctttattatgccattttaagaaaacttaaaaagaaaggaattggtgagagatatgacattagaccacttgtaaacagccacttcagatttaagaaactaatcaaagaaaaagaacaagatgaaaaatccgaaaaagcgcaaatatctccattttcggcggcgtggaacgatgttttatatatgtttggtacgatgcaaaaaaataagcatataatttatgataaaaaccaatttacgcctgaatggttagcagaccataaaaaaccgtttatagttatcttgacttataccggggcagaatatttttatagcctaagaaatatgagacgaatattttatacagcacttacgtcagctataatagcggctgtatctgctactgtggccataattacacttcttgataaatctaatgtagaaaataggctcaatgcaatagaaaataggttaaataccatcccccaccagcaaccgcaattgccgataaaaccaaaccatccggacagcaatcccaccaatcataaaaaaaactcaaagtccgggtaagtatatttctgctggttacccaagttcctattatgcaatactgcgtttcttttttcatttttggttacatttatacctaattaccaaaacaaataatgcgtattacaaagagaatctcaataaggaactaaacttaatgatatattctcaaggctccgtacggaaaattcaaaccaaactcgccagccaggtacttcgcgtcgatctgccttcaagtgcgtttcgcaccggggttttacaagttactttgttctcaggaacaggtgagccattgaacgaacggctggcatttattcaaaaccctgacctgctgaacctttctatagcggcaaataagacggattattcaaaaagagaaaatgtgcatttaagccttaacgctaaaaacaaggatggcagcgcagtaaacggatcgttttccatatcagtagtcgatgagagcaagattgtggttgatgaaaatactgaaaatagcatattgtcctaccttttattaagttcagatgtgaaaggatacgtcgaaaaaccgaattattactttgcaaatgtaaccaaaggcacacgggcggaacttgatgtattgatgcttacccaggggtatcgcaggtttgtatggaaacaattagtagatgataattctgcggccactgcaaatgcctacaatccggaaaaagaaattgacatttcaggtgtgttaaaaaccaaaggcggagacccggttaccaattgtcaaattacactggttgccgaatccggcgggatggtgttggcccaggtaactgatgctcagggtcggttcaggtttcaaaatgtgttgtttgagaccggcacccacttcattttaaggacacaatcgccggcaggcaagaagggcgtgattacactggatagtcctgaacagggaccaaatgtaagccctgcaaatgcagtagaatcgaaatacaatgcaaatgccgatatactggcgtccattcaaaacaaccagaggcagggcgttatgacggccagtactgaacccggaagtattctatttaaaaatgacaaaactatcggtttaaaaccaactgacaattacaggtcatccaatttagccggtccagggcatgctgaccaggtgatcaatggcgaggatattaaaaacgcgccttcactttcaatcgggttaagcgggcgtgcagatggcgttcaattttacgggggggtgccggccttaggaaccgccctgacatttgccaaaggggggcaacgagttgagccgatgctggtatatgttgatggcgcagaaattggccggaatgttaatattgacatttatagccccacttcgattgaaacagtcgagattttaaaatatgcaagtacaaccatttacgggatgcagggagggaatggtgttatggtgatcaccaccaggcgcagcgcagaaaaagggggagttacattcaaagaaatgtcgcctggtatattctcaattgagcccaaaggcttttataaggcacgcgaattttatgctccccgttatgatgccggtcagccggcaaataaccttcctgatcagcgcagtacaattttctggaagcctgatgttattaccgatgcggatggaaatgcttcattcaattttttcaatgcagatggggtcggaacgtacagggtagaagtagaaggcattgatagtaaaggcaacctgggtatgcaggtgttcaggtataaagtacagtaatttacgcgggtgaggaattaagaagcaaagtcaagagccgcgagtcaggaaaatggtgagtgagttgtgtgaaaggttataaaatggagcaaataacgcagattgtattggcaggtacataaacggtttcgtctttattttttgtcttggctcttgcatcttggctttgattgaaaccattctggtgccggtaaaatcccggcctgaatggtttttttctttaaaaatatttcattttattatagtactattttgctgcatatccgacaattggcaaaatgccgattttacattgcttcaattgattttgacacctaaattttcagatcatgaagaaaatagtttttgctttactgctgattgggacggttaatttgtgcgcttatgcccaaagtgatagcgctgtaaatgcatcgtataagttaaaagtttacctgtctgctcatatcattgaaaaagcctatctccaatttgataaaccttattacgccgcaggtgataccatttattttaaagcctatgtaacgatgggcgaacggcatatactttcc

SEQ ID NO: 4317 - DNA, 24107 bp, synthetic construct
  misc_feature 1..24107: note = Synthetic
  source 1..24107: mol_type = other DNA
  variation 17758..17814: note = note, n is a, c, g, or t
tcaaacacctggtctttattttcccattcaaaccccacctgctttactttttcctgaatgcgtatggctttaatcatggaaggcaaccctttgggcacaccacccagtaccgatttctttccttctttcatcttcagtttttcccagttgcgtttcacatcgtcttcatcattaactgttacatcaccataaatatgcggatgacgtgcaataagcttttcacaaattccattgatcacttcggttaatgtaaactgctcctgctccagtccaatctttgcatagaacacaatatgcagcaacatatcgcccagctcttctttaatatgtttccagtcgttatctgtaattgcatcggccagttcataggtttcttcaatggttaaaggcctcaatgtttcaatggtttgttttttatcccatggacatttctctcttaaatcgtccataattgaaaccaatcttaaaaatgcatcctgtaccggttgattgctcatactttacatgttaaaaaatgaataagagaaaaatgctgtaaataaaataatgtttaaaataaacgtcatgaataaaagcaatataaatttcaaaattgttttacctcttttctgctggtataccctgcgcattgctttatacaggtaaacaaacatcagcatccacaatacaaatttaagccagccaaaactccagcccgttgtatcctgtaatttacctaaactgaaaatggccagcaaaaacagaaacgcaaacacaaacagatgaatggtgaagatgagatggcccacataataagaattcctgtgcctgatgtaaagcaatgaaaagatcagtgcaaaaaatggcaatgaaacaaacagcatttttggcaatgaatgcagcacatattccaccaaatcgttggcaaatgttttccagtcgttgccataaatttcctttagtttaataagccggtgtgccattgcacgttcaaaccagttgctttttttatcagccggaagtgtttgctgaatggaatcatactcagcaattgatttgtattttataaaacctcttccggcagaatcaaagttgatgtgcaattcaccatctttggaatcaggaacaacctgcttcaccaaatcagaatcttgcttattacctgcatttttcaatgcccgctcctgcagatcaacagcaggttgattcagtgttacttcatttgaattttcaactgcctttttgcttttgtgagatgattcagaaaagaaagagaaaaacaggatgaagaagaaagctgaagtaaacacatacatccgtaccgggttcatgtagctggctcttcttccccgaatatattctacagttaaaaagcccggtttaaacagcaggtaacggagtgatgtaagaaacttaccttcaaaatgtgtgatatcgttaaagaaatgaacaaccagttcccaggccgattctttaggctctgtattttcctggccgcatacatggcaatacctgccaaacacccttgcgttgcagtttaaacagtttttttctttccgctctttgccatgcgacatttgctgaagttttgctaaaagtaaaaaatagccgacaactttcgccaagttttggactttcacaacatttttaaacaaacaggaaaatcagaataaaatatctttgacaaactatgccaacaaaacatttcatattcatgcttgcagttgtactgctttttgcagctgaagcacctgcgcagatttattataaagatgtgcttactgcaaagcaaacttcagaacagctgaaattgtacaaatcaaataaaacaaggaaagttgtacttaattcgtttgaaggcactggtgagccaactgataagtttatctgttaccaggaaattgcacccggatttaatttcatcaaaacatttacacaaagcattcaaacactgcaatcggttttggtgagccagtttaatgcaaagggacaactcatccgcagttcggacagttcaaataccacgctgaatgttaccacttacagttatgatgcacagggaagattactggttgccgaatcattttcgcaggcatatgcctatcaaacaaaagaaacagaaaagcatttgtggagttatgattcaaccggctttccgcaaaagctgttgcgcattaaaaacggaagcgacactgcagtgattgaatttaaacctgatgaaaaaggaaatcccggcgaagaaatatggttcagcaaaggacaagaaacacagcattggtattactattacgaccagaacaggcgtttaaccgatattgtacgttttaatgataaagcacgcaagctgctgcccgattatttatttgaatacaatgatcagtcgcagttaacgcaaatgattgccgtgcaggcaggcagcagcaattatgtaatatggcgttatcaatacaatgcacagggattaaaaacccgtgaaagcatttacagcaagcaaaaagaactgatgggctacattacttacagctatcagtaagagcaattacaacaatgcgataaaaaactttttaaaaaagatgcagtagtttttttgtcaattaaaagtgcttctttacatttgcacccccaacgttcttttacaagcggaagtagctcatttggtagagcacgaccttgccaaggtcggggtggccggttcgagcccggtcttccgctccaaatcccgctctatgcgggattttttttcacctctttggagccccggtggtggaattggtagacacgcaggacttaaaatcctgtgacccgcaacggtcgtaacggttcaactccgttccggggcacatttaaagcaacgaaagttgctttttttgtttatggcaacctggtttgtttatatactctactcgccgaaatgcaacaggtattatgttggatattcgcatgatgtgcaggaaagattacaacgccataacagcggcaaagtaaccgctactaaaaactgcatcccctatacattaaaagcattcaaggagtttgatacagcgattgatgcccgcagggaagaattgcgaattaaaaaaatgaagagcaggatttatatcgaaaaattaattgaaggtaattggtaagcagccccgatctacaatcggggtgacccgcaacggtcgtaacggttcaactccgttccggggcacatttaaagcaacgaaagttgctttttttgtttcagccttctgtatcagttttcaccattattcttgttcaacagtattactgcactcaactggtgcgacgcaaggaacgatgccagctgtactgtagctggtttcaatacataaaaaaaaccgccacatgggcggtttactttataagaagaaagttttacttgtatttgggattgtacagtgtgctttcaggaacgtttacctgtggttttcctttgtagcgtgaattgtacagtttgtaacaaccgcccagcaaaaaagcaacgattgcgaataattttacataaaacagaaacctggatgatgctacccagttactggtgatatctttttcgttttctttattgattacttcagccatggcagttattttttcgttgcaaatgtaagggatgattgtaaacttaagatgatttagttttcacaatttctgaaaaagttttcctctttttcacaaaatactgccaaaccacatttccggggtaaacaccctttgccggtgcataaccagccttatcaggtctgaaggttttgaacagccagccggcataatgcaaatgagctttgactactgcccaccagtacgatggtttacctgttgccaactccttccatgccgagactgcatcaagcaaaagccggaatgggattttccagatcaattgccccaatggcaggttcttggtaatcatgacgaggttgttcctgaagttgaggtacactttgcgtggattacctgtagggagtgttccgccacctacatggtacaccaccgattgcggacatacataaaccagatgaccgtgacgctgcagcctccagcagagatcaatttcctcctggtgagcaaagaaataatcatcaaacccattcatttcatgaaatgcttttgacctgatgaacaaagctgcaccgcttgcccagaaaacaggaactgtatcattgtactggcctttatcttcttccagcacatcaaaaatccttcccctggaaaaaggatatccatacgcatcaatccaacccccacttgcaccggcatattcaaacaggtgtttgttgtgatatgccagcagtttgggctggcaggctgcaattaccgtattgctttccatgagttcaataacaggttcaatccagttgggctccacttccacatcgctgttgagcaacacgtaataatcagcttccacctgctttaaaaagaagttatagcctttggcaaaaccatagttttcactgctggtaagcatttcaaccgacggaaaattttgctgtacaaaagaaactgaatcatcggtggatgcattgtcagcaacaataatccgtttattggaataagttgaagcggttacaaaaggaaggaactgttcaaggaattttttcccgttccagttaagaataacaacagcaactgatggttgtgaatgcaagtgtgacaaatattttttcaaaaatagcagttggcagccaaaccttgtataaattggggcatgcttggtcaatattttaactggcgaacacttcttgcactggtagcaattggtattgtaaccggaaccattttttattcgaactatcttgccggtaagattgcgaaagatgaacgcatgaaagtggagcaatgggttgaagcaggaaagttcctgattaatgcacctgttgatgcagacaccaaactgccatcgctgataagaaatgagcaaaaatcaattcccattattgaaacggatgagaaagacagtgtggtgagttttattaatatcgattcatcaaaaattgcagaagatcctggttatatctataaaaaattaaaagagtttaagggacaaaatccgcccattattctgcaggtgagtaaagagccattgctgattaataaatattactacggctcatcttttctattactggagatccgttactttccattagcacagttattagttgttgccttgtttattattgttacgattgtatcattacaaacaagaaacaaatcaacccaaaaccaggtatgggcaggtatggctaaggaaacagcccatcagttaggcaccccggttacttcattgcagggctgggttgaaatgctgaaagaaacacccggcagtgaacaaatatcgaccgagattgaaaaagatgtaaaacgtttgcggcttgtaagcgaccgttttgggaagattggaagcaggccgcaacttgaaccgcatgatgcagtgaagcaggtggaagaaatggtggaatacatccgcaaaagagcaacaggcaaggttcattttgaggtattgaaaaacagccaggaaatggtagctgcactttcgccccctttgtttgactgggtgattgaaaacctgctgaagaatgctcttgatgccatggacggaaagggatcaattaaagtacagatgtacaacgaagaaaaaacagttgtgattgatgtaagcgatacaggcaagggaattgcttctcaaaacctgaacagggtgtttaagccgggttttactacgaaaaaaaggggttggggtcttggcctgtcgctgagcaaacggattattgaacaataccataagggacaactgtatgtaaaacattcggagctgggtaaaggcactacgttcagaattatattgaagaagtagccgggagttggtagtcgttagccgatagttgatagccggtagtctttagctgatagtcattagtcgggagtggatagttgttttaaaacgactccagttccaaataaatttgattgaatgggaggagcactttacatttgcaaccccaaagcccaggtgttgatttattctgtggcttttgacaagatctgaagtaaggaagaaagaaaagtatttaaaatcaggtattggaaaagaattcctgaagaatttgaaataactgcccaggtgttgaaattggtagacaagccactttgaggtggtggtgcccgaaagggtgtgcaggttcgaatcccgtcctgggcacggataaaaaaagcttctcaatgagaagcttttttattgcccgtaactgttaccctactcactactttctacatgattttagtttcaacaatgcgaacacgaatgacttcttttaccgcatcagggtgcaggtatccctgcctgaagatgggctatacccgccttatgaggggctttatgtacgaaggatgaacgaaggatggttgctttatccacggctttgctgtatcttaaaagcgagtttaacagctattcttcatttattaaaccttattatttatggctacaagtgaaaacaactttcttctacacaatgtaaggggacaattaggcaaacagattgtggtaaagcattatggccataagattgtgattactgcttaccccgatatgagcaggattaaaccgagtgtgaaacaaaaaaaacgaagagcactgttttcggaaggggtggtttatgcaaaggccattattgctgaccctgaactgaacgaactttacaggaaggaagtgaaaaaaggaacagtttacaattttgcgattaaagaatttttggatgcgtttgaggagtgaagtttatggttcatggtttatggttcatagttcatggttcatagttcatggttcatagttcatggttcatagttcatggttcatagttcatagttcatggtttatagtttatggtttatggttggcgtgatgtggtgaggggttggagatttctcaggacactcattctttaaccggataaatcaagaagatgctgcactgcggtgtatgcagcatgatggagctgtgttactttttttgtcaatgaatccagatcagtttctgttattgtgtaattgttgctgtacctgctgctgaggtaggcatcatcgagtaattgcagtaagcgtttgtcttcccctgttaccattggaaaaacttcatctacaactgttgtacagcggcggcagcatttttttaaggaagtgattgcatgtgtttttttatcgagaccagttattgaagtaaggattgccctgcaacagagttcggttgcctgctggagaaaaaatgctgtgagcagatcagcattgtgctgctgttgctgttgtgcatgttttaaaaaagcgactgcttttgcaaagccctgctgaaactgtaaccatgcattttgcctggccatgttgagtttttctttatttatttcaggccagtcgtttttattgctccagtacaggaggttaaagggattgcatacaaggttgtaaaaaacagagccttctgttattgctgtttttacctggtttgcatgatgcagtgaaaaatgcaggttggtacccagcatgcaaccggcttcaatcaatgtttcagcagtggtgaattgtttgggtggtaaccattccggaataacaatgagcagatcggtggtcagttcggccccctcctgcagtggctgatgcaggatgcggtaaatgcgttcggggcggatggtttgcacaataaaggaggtaatgcctttgagtatttcatcttcctgcagaaaggcaggactgttttcttcatttaacaattcaaggttatcgttgtgctgtggctttgttatttcaccatcggcagcggcatcaagaaaattaaagaggtagtacagttggggaatgagttcttcgaaataaccgggcattcctattttgagttcggtttccatgaaatcgaacacaagactgcggaggttgcggcttaacaagcggggattaccatattcgatgagagagttaagtgtttccatttttttgtttttactttttaccaagcgttgaaacaactgtgtaaaagttgaaaaagctttgccggtaacctaccctgcctgtttgtattttacaacgtacctcttgtatttcacgggcagaacagggtcggcggacagggaattatttttcattaacaatgtaatcagattgttttttatatttacaatgtaaactgattgtattacagctttacaatgtatatttattgattcacaactactacatcattcaatatttatggctgctgaaaccggtaaaaattactacctgctgcttttggatatccgggattcgtcggtgcttccggcaaaagagctgacgctgaccatacagaaactggaagagcgtctgcgggaactgaaccgccgataccgtaaacaacttgcccttaaattaagcattaactacggggatgagattgcggccctgctggaaactgcccagcctgttttaccgattgttcaggaaatcagaaacaccctgtacccactgaccagcctgcgttttgccgtagtgtatggaaagattgccgttgcggggaatgatatacgcaaggcaggcggacctgtttttaaacaggctgatgaacgcatcaatgaattaaagaagaagaatgttttttcgtactggcaaacaggacatgatgcacaggaccaggcattaactgcactttgtaatgtgagtaatgtattattagaagaaatgagcggataccaacgggaggtttttgctttactggagcaggggtataaccagcgtgagattgcagaggaactggggaaataccagcaatcggtgtgggatgccctgcaccggagcaaggcgctttatgtacaggagtgtgaaaaagggattggcagcctgcttgcactgctgaagtaattttatcatatttacaggaaaatgaggggtatgcatgatttctggataagcttattgatacaggtttctttttttgcgggatcgtttatattatccactgtattgctgcggctgtttattatacgcccacaacgcaaggaaaaagagaagcaggcagaaaaaaccggagaggataaaagaaaaggattattgcgtgataccggtttctggattggtttttttgagcatattattattttcatttttgttgccaataaagagttttcggcactggcgattatttttggtgcgaaagaatttgtgcgcaaagaagacattgtaaaaaacccggcttattatcttttggggacgttacttaattttggcatagctttgatagcggtagaactgtatctgaaattatacccgtgctgattgctggaaataaacctccttaaattcatataacatctatgacagaaaaaaccattcatgaaggaagaaatgtaaaacgcatccgtgagatattaggtattaagcaggatgcattggcaatggacttaggattgagccagcaggctgtttctgcactggagcagaaagagaaaattgatgagaaaattttagttgatgtggcgaaggtgttgaatgtcccagtagacgcaataaaaaactttaatgaagaagctgcacttaatattatcaataatacatttaatgataatgcagtgctgaatggaattctatataacccaacttttaaccctattgataaagttgtagaactttatgaaagaatgattaaggaaagggatgaaaaaattgcaatgcttgaaaaagctttagaaaagaaataagaatcaggggaaataaataaaaaagcctttgcggatgcaaaggcttttttatttgcaaataattattatcttaacagtgcctgattcatagcgaagctaacactatgaattgaccgaactacactgtgcagacacgatgctgctggctgcgaggaatcaggaaagggaaatatagtaagggaaataaaaaaagccccacggagtacgcagagcttaagaataatcttcggcttatagccttattgtgataagctttcggaaacaaatatagtattgaaacgtcaaaaacaaaaaaaatggaaaaaattttagggcttgatttaggtactaacagtatcggttgggcaataagagaagttgatacagaattggaaaaccagattgtagataaaggcgtattaacatttgacaaaggagttggagaaggtaaagcaggagagtttccattggtgcaaagaaggaccgagagcaggcacaagcgaaggaattatcaggcagaaaaatacaggaaatggaatttattacaatgccttatcacaaataacctttgccctttaactatagaggaattgaatgaatggaaacattacaaaaaaggtaaaggaagaaaatatcctcaatccaaaaaatttattgactggctcagatttgattttaatggagatggtaaacctgattttgaagaaacaggatttactaagaatgaaagctattatgtttttagagcaattgctataagtgaaaaagaagcacataaagaaatctttcaaaaaaatccgcagattttaggtagaatattttatcaattagtgcagcgcagaggatttaaaggcagagacgaagaagaagctcaaacaatgcttaaaggaagcaaggacggatctataaaagggaggaatgatatagcttcatatttagaacaacacaaaacattaggtgctgcactatatcatcttcaaaaagaaaaaaaagaaagaataagaaagcgttataacctacgaagtgattatgaaaacgaattaaaacaaatatgccggactcaaaatattgcagatcatatttataagcaactatggaaagctattgtatggcaaaggcctttaagaagccaaaaaggattagtcggcatttgtacttttgaaaagaataaaaacagatgtccgataagtcatccgctttatgaagaataccgcacttgggcttttattaataatcttaaaatttctgttcctgaaggcattaaaaaggaaacctatttacaagataaaatctacccgttgttttacaatgcaagttcagattttaaactcagcagcatttataaacaactgaaaaaagacggtgcttcctcagatgcaaatttcaaagatgatacaaaagtaatttcagcaaggctgctaaatttgtttgaaaaactgcttggaaataattggaagaaagaatttggctggaatgaatcattaaacaatcaatcgaaaaaatgctcttactccgttgaagatatatggcatgttcttttcacttttgacagcatagaaaaactaaatgaatttgcccatgtaaaattaaatctgaatgaggcagacgctgaaaaattctcaaaaatcaaattgcaacaaggctatgctaccttaagtctatctgccataaaaaaaatattaccctggttacgcaaagggtttgtttacagtgaagctgtttatttggccaatttgccaaaagtattcggagcgaaagatattagtacagagttaatagaaagttttgaagaactgtatagcaaactgagaggtgaacatgagaatgaaaaaatactgaatagctgtgtcaacgatttaatcaggcaggaactaaacagcgataacagatacaggattgaaatggacagagatttagatgctgaagaattaaaaacagtggaagataaattgatacaggtatttggcattaaaacatgggaagaaaaacaagaagtgggaaagcattttgctaaaaactacgtagcacattattataaagaatttttacagaagcccttctatggtaaaaaagatgaattattcctctcagtgccaaaccttcaccaaagattaataaaacatctggcagacacttatcagttaacagataagcaactcagtaatctatggcatccctccgagcaagaaatataccctaatgccaaagaaaaacaattagaaaatggtgggagtattaaagttttgggcgaaccgcaaccgataagccgaggttttaaaaatccgatggcactcaaaacaatgcataaattgaaaaggttggttaattatttactggaatcaaataaaattgatgatgaaaccagggttgttgtagaaattgcccgtgaattaaatgatgccaacaaaagaaaagcaatagaaaaatggcaacgggctagagaaaaagaaaatgaaggttttaaagaaattattgatgaaataaataaagaatgcgatacaaactataatagagaagacaaaacgcttattgataaaataaggctttggaaggagcaaaatatgtattgtctttataccggaaaaatgataccgcaatccgatctgtttaatggcattaagtatgacaatgaacataccataccagcgagtatgagttttgacaatgaactgaaaaacctaactatagcagacactcactacaaccgggaaataaaaaagaaaaacataccatacgattgtcctaattattgggaagatgtaactattgatggcatagtttacaaaccaattatacaaaaccttgaaatggtatttggaaaacgatctgttacgattaaaaaaataagaggtaaagaaaaagaatttgtaacctttgaaaggattgaacatttatctgatttatatgaggaatggaaaaagaaatcgtctgacacaaaggaaataaaagatgcgataatacaaaagcgacacctgataaaaatggaactagattactggcgtaaaaagctatacacttttacgacaaaagaatataaagcaggatggcgcaacagtcagctaagagatacacagattattacaaagtatgcactgccataccttaaaacagttttcaaaaaaacggaagtacaaaaaggcagtgttacggctgatttcaggaaaatttataagattatagataaatcggaaaaaaaagacaggagtactcattcccatcatgcaatagatgctgctgtactaacattgataccaccagccgcaataagagataaaattctacttgcctataatgaagaaattgataataaaactgggtttatttatcatgaaaggcccagaaattggaaaaattttacagcatcacatctgctttcaattgcagatgatgtattaattaattttcagccacaacaccgaacattaactcctacttataaaaacgttagaaaacgtggaaaacaacaattcgtaaaatttaaagattcaaatggcaaatggcactttaaaacagatgagcaaaataaaaaaataccactcattgcaaaaggagattctataagaggccaattgcataaagagagtttttttggtgcgattaagaaaaatggcgaaatgcttttggtagagcgttaccctattgctgcttttacaagtatcaacgactgcaaaaatattgtagatgatgcagtgagaaaaatagtgcaggatgaattggaaaaaagggtaaacagcgggctaagttttgatagagcaaaactcgacccaattcccttcccaactgaaaatgctttgattaaaaaagttagatgcaaagtagccgcaggacgtggttatttatctccagaaaaagcactgccagttcataggcacacttatttatcaaaacacgagtataagcaaacaacttatgcgcaaaatgatgagaatacactttgcctgtattatgaattagaaactgataaaaggattgaaagagcatttagaatagttggtttgtttgaattagctcaattgaatcgtaggaattatagttcaataaaacatgactttgcttacaataaaatcaacacaggaaaaggtaagaataaaatacaattaccacttgcatgtattgtaaaaaatggcatgaaagttattggctacaaggaaaattcagaagaaattaaagatttatcaaaaacagaaatcaataagcgattattcagagtctataaatttaatgatgtggcatcaactaaatatatttatttacagcatcacaatgaagctaggccagacaaggaattgggagatggtgacacgatccttcaagtagaaaaatatcaaccccgtttaaaattaacggcggagagattttcttttttgattgaagggaaacattttgaaattaagccagatggtacaattagtttgaaatactaaagtacccattcgtccgttttattatagcaaacaccccgtcctatgataaagcggactctttattttggcaatcctgcctacctgaaaaccagtaatgaacagttagtgattgagctgcccgatactggcgaaaccaagcaagcccccattgaagatatcgggatgctgatattggaccaccagcagatcaccattacacaggctgtgatgtccaggctgttagccaataatacagctgtgattacctgtgatgagacccaccaccccaccgggcttttcctgaatttagacgggcatagtctgcaaagccagaagcagcaggcgcagttagaagccagcataccgcttaaaaagcaattgtggcagcaaacagtaatggccaaaatccagaaccaggcggcgcttttagtgcaggaacgggagcaggcaaagtttttaacggagcttgccaaagatgtgaaaagcggagatgctgacaatgccgaagctgttgctgcagcgtattactggaaacgggtttttcctgctttcctggagttcaggcgggaacgttatggccctccgcctaataacctgctgaactatggttattccattttgagggcgatggttgcccggagccttgtagccagcggcatgcttcccacttttggtattcaccaccggaaccagtataacagctactgccttgcagatgatattatggaaccttaccggccttttgtggataaggtggtttgtgatattgtgcggatgaacgggaagtttttagacatgaccccgaagatgaaacaggccatacttgcattgccagctatggatgtgcatatgggcgggcagaaaagcccgttgatgaatgccgtgcagcgaaccactgccagtttagccaagtgttttgaagggaagacgaggaagattttgtacccggaatttgtgtgaaccggaatgtcagaaccgtgatttggggagatttgattgattgaacagattgcttcggtcgtgcctccctcgcaatgacgtttacgaatgaacctgttttatataaccatgtatgaacgctttaatgcctatagaataatgtgggtgcttgtattttttgacctccccactgaaaccaaaaaggagcggaagatttatgcccggttccgcaaggaaattatggccgacggattttccatgttccagttcagcatttacctgcggcactgccccagcaaggaaaatgcggatgtgcatattaaacgggtaaaaggaatgctgccagccaaggggcatgtaggtattatgtgtattaccgacaaacaattcgggatgatggaaattttcaggggaaaggaaatggttgacaaccctgacactgtacaacagcttgaactattttaaagaacaggataaaaaaaacgggtttaagacccgttttttttatcctgaaaagcagctaaaatcctttgctattaaggctttcagcgaaagcttgtgtgaaagaactaagctacttaataatttgaaagcaaatcacaactttatctgcgagtaaaatacgcattaacagtgtgtgaaagaactaagctacttaataatttgaaagcaaatcacaacgctcactggattataatgtaaagtgtgacgtgtgtgaaagaactaagctacttaataatttgaaagcaaatcacaactgccgctgataagaacgctgttaaagttcgtgtgtgaaagaactaagctacttaataatttgaaagcaaatcacaaccttaatgcgccagctgcgacaccatgaccttgtgtgaaagaactaagctacttaataatttgaaagcaaatcacaactgttttgtacgcaccagttaaagctcctgttgtgtgaaagaactaagctacttaataatttgaaagcaaatcacaactgtttcctgccaatcatcataagttccacctgtgtgaaagaactaagctacttaataatttgaaagcaaatcacaactgggcggtataagcgacacaacagctttcatgtgtgaaagaactaagctacttaataatttgaaagcaaatcacaacttgtgattcgtttgattcggtattcggtactgtgtgaaagaactaagctacttaataatttgaaagcaaatcacaactgccctgcgggcgctgtcctttgtgtgtggtgtgtgaaagaactaagctacttaataatttgaaagcaaatcacaactcaccatcaccaaccaacaaacaggaagattgtgtgaaagaactaagctacttaataatttgaaagcaaatcacaactggttcgatatcaccctacgcagcagcaggtgtgtgaaagaactaagctacttaataatttgaaagcaaatcacaaccttgacatagttactgtgttgagataacatgtgtgaaagaactaagctacttaataatttgaaagcaaatcacaactacatcaccaaaccattctaaaaacatggctgtgtgaaagaactaagctacttaataatttgaaagcaaatcacaacttaataaacgctgttattaatcagcttggctgtgtgaaagaactaagctacttaataatttgaaagcaaatcacaacatcagacctgattaaaaagactgatggaactgtgtgaaagaactaagctacttaataatttgaaagcaaatcacaaccttcacctggtagttaccacactgtatttttgtgtgaaagaactaagctacttaataatttgaaagcaaatcacaacatggtcatacattgaagatgggagccatatgtgtgaaagaactaagctacttaataatttgaaagcaaatcacaactggttaatatatctcagctccggtacagcgtgtgtgaaagaactaagctacttaataatttgaaagcaaatcacaactggttgaccaggttttgcaatacgactttatgtgtgaaagaactaagctacttaataatttgaaagcaaatcacaactcatcaaaggcatcagtccatgcttcaatatgtgtgaaagaactaagctacttaataatttgaaagcaaatcacaacccgaatataaagggactccgtatgtcgatatgtgtgaaagaactaagctacttaataatttgaaagcaaatcacaacaggaactcggagcaggagctttcaacacctgtgtgaaagaactaagctacttaataatttgaaagcaaatcacaacactaaagctgttgatatgaagtttactttttgtgtgaaagaactaagctacttaataatttgaaagcaaatcacaacaatgtatctcctggtaataccggcattgcttgtgtgaaagaactaagctacttaataatttgaaagcaaatcacaactaaagtgtatggatctagtccagttgcaattgtgtgaaagaactaagctacttaataatttgaaagcaaatcacaactgtatttttatacacttcacttttaattatgtgtgaaagaactaagctacttaataatttgaaagcaaatcacaactattttttcacttgccattttaaacgtttatgtgtgaaagaactaagctacttaataatttgaaagcaaatcacaacacctttatctttgtgaaacaaaagcgggggtgtgtgaaagaactaagctacttnnnnnnnnnnnnnnnnnnnnnnnnnnnnnnnnnnnnnnnnnnnnnnnnnnnnnnnnntaatttgaaagcaaatcacaacttacgatatgtttagatgtaagaaatgcggtgtgtgaaagaactaagctacttaataatttgaaagcaaatcacaacttctgaaatagggataaatcccgtttgttttgtgtgaaagaactaagctacttaataatttgaaagcaaatcacaacctgattcattaagccaaaagaagcagctctgtgtgaaagaactaagctacttaataatttgaaagcaaatcacaacaatgacatgcgcactgaaaattttgtcttttgtgtgaaagaactaagctacttaataatttgaaagcaaatcacaaccagtgaatgttgcacgtaaagaagtgaaatgtgtgaaagaactaagctacttaataatttgaaagcaaatcacaaccatgaaaccgttatacaaacagttaaacgtgtgtgaaagaactaagctacttaataatttgaaagcaaatcacaacttttaactgaatggaatcttttgcgtatattgtgtgaaagaactaagctacttaataatttgaaagcaaatcacaacaaacctgttaggtgataaaatggataatactgtgtgaaagaactaagctacttaataatttgaaagcaaatcacaaccgttcagccgttgcacgggttgcaaggttgtgtgtgaaagaactaagctacttaataatttgaaagcaaatcacaactcgcaggatatacttatacagaagtcgccatgtgtgaaagaactaagctacttaataaattacttcggtaacttttattgttttttgtctcagtgacttccgctgcgcttcagttgaaagcaaatcacaacacggatattcattctattcactttcaaaattgtgtgaaagaactaagctacttaataatttgaaagcaaatcacaacatttccaaagtttgcaaactgatttcagaatgtgtgaaagaactaagctacttaataatttacttcggagatttgttattgttttttggtctcagtgacttccgctacgcttcaggtgaaagcaaatcacaacccgaaaaacgtgctgcatttaatgcaaccgagtgtgaaagaactaagctacttaataatttacttcggggattttctattgtttttttgtctcagtgacttccgctgcgcttcagttgaaagcaaatcacaactaaacgagccagtagccggtagccgatagctgttagtatgaaagaacatacttcatcatcatttacttcagggatttttcattgtttttttgtctcagtgtcttctgttacgtttcagttgaaagcaacttacaattaaaccagccaatagccaatagccattagtcgttagctgttagtctgaaagaacatgctatctgatcatttcgcttcggggactggtgattgatttaattacagtgagttttggtgtgcttcggttgaagggaaagcacctgaaaactaagagttagcttccaggtggttgcgaccaactgattactgatgagaatgctttttaatttaaatatgctttgtccgtaattacaatttccattttaatgaaaggttaagcaccctgccatctattggtgcccataagggattaaatacaggagatgtaatggttcctgtaaataagcgttcttctttgctctggcggtaatcaagcagattttcgccattcagcacaaggctgaaatgtttcccaagttttttttccatcatcgctgccataaagaaatagccgggtgtcctggtataattttcccggtattgataccctgtatatgagccttctatcccgaaacggaatccggctttttcaatatcccttacgatggtaaacgcaaagcgatttttaggtgtaagcggaataaactgattctgctgcaggtacttccgttctgcaattgtataggtataacctgcatataattcccactgactgatcactgtcctgatataggtatcaaacccttttgttataacaggctttgcctggttgctgaactcaacattaccgtttgttaaaacagtgccggtaacaggatcggttaactgcgttaagaaaaaagcatgattaatgaagagttcattttcatttccccatctggttttataattcacttcggcattatagccaattgatttttctgcttttattcctgcaggcaatgacagaattttctgaatagaataatcggtggtttgcggcgcaagggcattgggtgttttatatccaaaaccgatacctgcccgtgttgcccaatgatcgttgagacgataaaacacagcaagtcttggcaataaaaaattgccgtatgtgaaatgataatcatctcttaagccaacttcaattgtggttttttctttcaggttccaggtattctgtataaacacaccagctgtattgttactgaaattctgaagaagaatattttctgttatttttttaaaccggtcgccggttgcatttattccggcaacaaggctgttttccttatagggtacaagcaaagacagctctgaaaaatagtttaactgcgacccggtaaaattaatttcattactgctgatgtttcgattgaatgaactgaggctgcttttaaattccagttttttgttgtggcttaattcatgttgtgcggttagttcaaaactgtttcttttaattgtattgttttcaaaatactggtgcaccgcatcttcttttcctgcaagcacctgcatatcgccaccttttcttttttcaaaggtgcctgtataacctgccacaactgttgtttttttaccggggtacaaaaacaaccgtggatgcagtaccaatccattaagatctgttacatccgagaaaccgtcattatttacatctgctgctttttgaaaattgtaacccccaaaaaaagtatatcctattttcttatacttttttgcaatatagctgttgaagtttgtttcatttaatgttgtttgattaatgcttacaacagcttcctgtttattggtgggtcgtcttgaaataatattcacaatgccaccgattgcgccgccaccgtataatgtggaggatgaaccttttattaattccacctgttttaaatcaagcggaggaatacttagaataccaaaacctccgctaaaaccatcgtacaatggcataccatctttcagtatttgtgtatagcgcccgtcaagcccctgaatgcggacattggcgtttccgctaacggcactgctttgctgaatctgcacaccgcttacatcacccaatatactggcgatgcctgcaggttttatactgctttcctcttccatttcttctcttccgagcacttccactttgagtggagaattctctatacgctgattatttcttgtggaagacagtatggttatttcttccaggtttttacctgcttccataagagcaattaaaactgtaccggataacggaacctgtaaaactgtatcaacaggcttgtaaccaacaaatgtaaaagtcagcaactgacgtcctgcattcaattgcagcgaagcttctccgactttatttgttgccgtcaacactttatttccaacagagatgcttacaccctcaagtggttctttatttgctgcattcacaacctttatgtttactgtattttgtgctgctgcgaaacctgcaataatgatgaagcttataaacaaataaattcttttcaatgctgttcgttttaaaagttctgtttttttcctataaccaaaacctggaaggttccggcaatcatctttggacgcccgtttgcattatttgcctgtgcttcaaattctgcagtggggagatataataaatgcgtaagcggatcgattgtaattgttctggcccctttttttgtttttattgttgcagtaacggtaaacttttctgcattctcttcgtgaataactgtgagtgtaccttcaccgttagcagtataaatgttctgttccttttcatcaaaggcaacgccatcacagccttcgccaatgggtaacttgtcaacaatcgttccatttactgcatttacaaccagcagcattttttcacaaccggcaaaaagccgttttgtttttgcatcataagccagcccggtgggaccttcgcccggcagtatgctccaatgatttaccactttaaaggttttcatatcaacctgcacaatctcatttttatcttctatgttcacaaagagatgtccttccccatcgctcacagcagtttcaggtttaccacccacattaatactatcaattaatttatcctgaacgggatcaatgatactcaggttctgactacgcccgttacaggtgattatttttttcgagaacggttcatataaaattgcatcaggattttgccctgttccaatatggtcaattactttattggtgtttatatcaaatacaaacacattgttcagtctgccgttactaataaaacctttctttgttcccggatcaaaagcaattccatgaacacctatggtgttttcgataacagcaactgaatcgcctgattttttatcaacgatattgacctgtgttccatgactgacatagagccagttctgaacaggacttactgcgagataatcccagccgccggggctggctatatgtattgtattcaggatttccaattgatctttttgctgtgcctgtacagaggaacaagcatacatgactaacaaaaaaagtgttgatcgaatcattttgtaattcatttaaagtttaaattatgattgtgtgactaagctgggctaaagcccgtcgtgcctgagttctgaactggttaccccgtcataaatgacggggcaatgaaaatcaaatcttataagaacttcagctaaaagaaatctgttttagccggagaacattgtcttgaataatcactcgtctgaaaaataaagttcctgatttaattagtaaccgttcatttatttcaccagtaattaatctttttcttcgcttaaaaaattcccttttgcatcgaataaaagatctttcccttttacttctgcttcataatttacttcaccggaagactttgtaatttttgctgcttctgtaattttcgtagcagcataatgagctttaacatacgaaattacagctgcaggcaaatcagagagttttatttcaacttcagtttccagcattttgccggcagcatcaaatacggcactcatttccttcccgttctgtgtaaagcttgcttcatatttatcagcttccattccccatttaactttagtcccgggaaattgtttttcgcaggcagcctttacagcagccggtacttttgatgcatttattttttgagcagatgctgaaattccaattgctgcaactaatgcaaacaacatgattagttttttcatttttgatttgttttatatggatgaatgatttgtaaacctaaaagctgattctgtggggaatttgaagttgccgggcaacattgcaaggtttcatttttttaacctccagtatcaaattctaatttttcttctttttgcgttttcagtgttttaccaaacctgtagctgaagccgatataaattatctgcccgtctcttctgttaacagaaacctgttttaaataagaactgtttaaatccgttttctgtttcattgatcttaatatatcagatgctgtgagtatgacagagaatctctttttgaaaaaatcctgtcgtattcccgcattaagtataaatgaaggatatttttttccctgaggtgtaagccgggatgaataatagattgcactcacctgggccatagtcctgggagttattgtaaacgtgctgtttaaattggtgctgaatgacaggattgttttattgttaaaatatccgaggttggtggcgttgatctgattataaaagaaatttccgctcaggttagaagaaaaaaacttccctgcctttgccgaaaaaattaattcaagccccgcagatttatcgtttgacaaattctgttgagtggttagtaaaacactgtcatttaaaggaacagtaacctgtgtaaatccattttgtttatacctgtaataaatgctgggaacaaatgaaatatactccccctgccatttatatccaaactcaactgaatgaattatttcaggcaaaagttttgcgttaccagctcttacattataaggatcctggtattcaggaaagggattgatatcgtcgccttcgggacggtgtactctcctgctgtaatttaactgaagttgactttgctgatttaattcata

SEQ ID NO: 4318 - DNA, 24080 bp, synthetic construct
  source 1..24080: mol_type = other DNA
  misc_feature 1..24080: note = Synthetic
acttgcggcatcatcctgcgccatagattgcaatgtaaaagttgacaacactgctgctaaagccagttgtctaattgttttgtaagtatttctcataggtattggtttgagttgtttctcgctcaaaaataggagtagtattatcaattgcaagcgttaaaattgaaaatacgtagagtgtcgtattgcgaaaaattaacaacacattgattatgtagataagcatcataactcgttcgttggtatatagaagtcattcattcgtatatactatgtttgtaaaactaaattttgccttattctgtgtttataagtattctaaaaaacaagcattttcagtttgtactactcgttttggtgggcagttactttatttatttgtctgttcgaaacatccaacttgccgatttgtggctacaaattcaaagtgggaattattggattgcactacctattatgtgtatttcaatggttggttattattttagatcattgcgctggaaacttattttgcaaaatatggatgagcaaaataccaatcttaaaagtttgtacgcctcattaagcatgggatatgcagtaaattttgctacaccaaggttgggcgaaattaccaggtgttttgtgctaaacaaatcagcaaaaactcccattgaaaagaccattataagtgtatttattgagagggttgttgatgttatttgtttggcaacaattgttggtatagcctcatggttgagtattggtgtactcgatacttttgtcactcaacaaatatttattcctttacaagaagcgttcctccataaaccttggtttgtattgttgcctgtcctttttatactattcattattggatattggttgtacaaaaaactcgattcacacgccaaatttaaattatggataaatcagttgtttcaatgcatctcaagtgtgctattaatgaaacaaaagatgttgtttttgctttataccttatgtatttggttgtgttattttttcatgacctttttatggtttgatgtgtttaccgaaacttctcatttaggtttgcgtgaggctttcatcattatggctgtggggagtgtgggcagatctgttcctgtgcaaggtggaggtatgggggcttatcattttttggtgagcaacgtatttggattattgggcatctcttcactgttgggcaatgccttggcttttgttattcatggtacacaaatgattttaacggtctttttgggtattattgcttgggtttggttgttaatgaatactgaaaaatgaaaaaaataataggatatacagcagtagtttttgctttttgctcaacggcatttgcgcaagttaccaaggttggaaatgatacactgttagatgttgcaggctggaacatcgaatggtttggcgatcttaccaatggaccttccgatgaagccttacagtttaacaacgtaaaatcagtcttaaaaaatactgatatagatatttgggggttggctgaagtttccaatccaaccttattcgcgtctttgcttacagatttaactgtttatgatttcgtattatctaacttttctcaaacccaaaaaacaggtttgatttggaaaaagagcaagtttgatttggtaagttcagcaagtgtgttaaccgaatatagttacgattttgccagccgtgcaccgctagaggttgctttaaaaagtaaagacaatattattactgatacactctatttttacgtgctacactttaaagcaaataccggctcgcaaacagaaaaagtaacatcctataacagacgaaaaaatgctgcaggttacttaaaaacctatttagacgctaaccgcaaatacaaaaaagtgattgtgttgggcgattggaatgatgacttagacgaatccattgtgtacgaaaatggtgcgtatttaacgtctcctttttcgaatttcttaactgattcggcaagatatttttttaccagtttacagcttaccaaaacggggcagcaatcgaccgccagctacccaaatatgattgatcaccagatgatttcggcatacatgcgagattcattttatgtagcaaactcgtcaagagtgatgacacaaaccgctgcacaaatttccaattatagaaacaataccagtgatcattacccagttttgggacgttttaacatgaaacgttacttcaaagctgaacctcctaacaccggagttgatgaatggaacgtttttgatgatgtattagtttatcccaatcccgcgagccagtatttaatggttgacactaagcaatttattaaacaattggtattaaccgatgctttaggaaaccgtttgattacatcctacgaaacccatatagacatttcgggtattgcaaatggattatactttttaacaattgttggtgatgaaggcaaagcggttaaaaaggtatttattgagcattaacctggctatctcaaaagagtaattgttcctttgaaaacgagttcttcctcagcatttgctttacatgttaaagtataaaaataggttcctgttgtagcctcttttccgttccatgcttgggttaaatccgttgtttcgaataccaatttcccccaacggttgtatactttaaactcagttgatttgatgttcacataatcaggaataatcacatcgtttaacccatcattgtttggggtaaatacattaggaatgttagcagaggcagggcaactgttttttacctttatggttgtttcgttgctgcaattattggtatcggtaattagcaagtggatgttttcgtaatttgtaatcgtaaaagtgtttgatgtatcagcatagttccataaatagtgcgcatatggaatatccgtttcaagtagcttaccaagttcacacgtttcaataaaatctgttatgaaaatttgtggtcgaagtttaattacaacatttgcagaatcactgtatttgcagccaaagctatctgtaatatttacccaatattttccacttgtatcaatagctatggtgctggttgttgagccagtattccaaaggtaggatagaaggttcgggttggccgccagcagcacaacagaatcaacacatacaactgcgtttttttgtttaagaacggtgggtacttcatggttgtaaaggttaaaactatctacactgaaacatccttcattgtttgttaccttggctaaataaaaaccgggctttgatgttgttataacgagagttgtttctccagtgctccacagtaccttgttttgtgtatttttagcatcaagaataattgatgtgcctttgcaaacagtggtgtcgttgcgcaacgtaattgtaggtttatctttagcaaaaaaactaatcgtatcagcgttagtgcaatagtctttgtgggttataagccaatatgttccaggttgatttatcacaataaatgaatcggaaacacccgtgctccaagcaaaactatctaggttggttggcgaggttgttaaaataatattggtgttaaaacaatcgctcacatcttcgccaaatgaaaatggcaccttgagttgggcattaatttcaatggtatcacccgaccagcaagtattgttttcggtacgcaatttgtatactccagtttctgaaacctgaatggtttgcgtgctatctccggtattccatataaactttttggcttgaggtgaaacggcttttaaaatatacagcggatcaatacatacacttgtatcgccacctaagtttacttttggaaccttatctatagttacgtttatggtatctttagttgtgcagccattttgagtttgcctaatggtgtaagccccactgctgtatgctgcaatttcacgtgtggtggctccggtactccataaatagctacttgccgatggttctacactcaaaattaagagtgtattttcacaagcagaagtatctttaatcggtttttgtgcacctaataatgttatgttaatggtatctctaacactgcacaatccatcagtaactgctacaaaataacgttcgcgagctgatgtgtatatagttggcgtggtatcacctgtattccatttgtatttggttgcattggtggtggaggcatttaataaaaacttttcttgtctgcacagggcagtatctggtcgcaaaatcaatgtgtccattgttgatttaaataccaaaatagtatcgtatgccgagcagttaaaatctgttacttttaaaatgtaaaaatcctgattagaggcggtataggtacttcctgttcctgcagcaaaacttattcctgtagtaaaaatataccagttgtaagtgtaaaagcttttggtttttttggattttaaggtaactggtcggttgaagcaaatagttgtatcacggcctaaatcaacggtgggtttaatattacttgcaatggttacagtatcataattggtgcatgatcctttcgttagtcttacccaatatttgccagtatcggtaactgtaatgataggaaaagtggagccatttttccacaaataattggatgtttgagcgttggtagcagtgagtgttttggagagtgggccatacttgcaaaaagaagaatcgagtcctaaaacgttttctacaacttggtcaaaagtagaacaggagtcgatgagtttaacatcatcaatatagtaatatgcttgttttgcttgtccgccatttatgtttagcaattggcttgcatcatcagccccaaatcgtccgatggttacaaaacgttcgccacccgaagccacaaaacttcctgataattttgtccagtttaccttgtcaacaatataggatgtcgactctatttgaggattgaaattaatttggtttgaatcgtttcgtgaaacaggattggaagtgaataatgcacctaaatttttaacagcgtagcctaataagccactatcagctcgcgaaacaaacatttcaaaataatacctgcgaccagcttttaacggtttggtgagttcagattggatgtattctcgtttaaaaccgggagcacttcctgcaacaggttcactaaaagcacacaatcccatataagcgccaccactgtttgccaaacgtgtgcctacccaatttcttggtacagaaagaccagtgtaatcaggactgcaagctttgtaataaaaacttttaccaagtgtggggcgtttccagcctctggcataactaactacatcgtttgtgtcggctaaattaaacggacactgagaggttgtttcaaaatctccattggttattaagtcggattgtgcatagctatttacagatgctcccaataaaagggttgcgctaataaaatagtatgttttcagccaatgatgtaccatctaaatttcaaaacaacattattgttcggaaggtaaaccttcgtttttccatcgcataaatccaccatccatatctataattttttggaaaccttttttgcgcatcatatctgatgcctcagagcttctgccgcctgatgcgcagtatacaaaaacagtaatattggtatctagcttgctgatttcatcttcaaaatcatctctgaaaatatcaaggtgacgggcatcctttaaatgtccttttttccattcaccaggagtgcgtacgtccaataaaatacctttttcggtagttagctgttttgcgaaatcttttggagataacaataaaaattgagtgttagttgctgatggagagtttttttgagagcatcctgcaagtgcccataaaaaagcaaacgagaataaaatatttttaatcatttgtatttatttgttagttgtacaatactgtaagttgtaaatataataacacaattttaaattatagtttttgtttgtcaaaatatacaaacagcagggaataagatattttccactagccaaaggataaagttacataattacaaatcaaactgtattttagcacactcatgcaaattacatttttaggaacaggaacttcacaaggtgtgccgcttattgcgtgcgagtgttcggtttgttcgtctgcgaacgaaaaagataagcgcttgcgttcttctatattggtacaattacaaggtttggatattgttgttgattcaggaccagattttaggcaacagatattacgatctggaattaaaaagttggacgctcttttgtttacgcatgctcacaaagatcatattgccggaatggatgatattcgtggcttcaattttaaaatgaaaaccgctgttgatgtttattgcaccgaacaagtggaaaagcaaatgcaccaggagtttcattatatttttagtgagattaagtatccaggaattccggaactcaacatacatcgaatagataaaaactcacatattgatgtgaaagggatgcatattcaacctattgaagtgatgcactataaattaccagtattgggttttaggtttcatgattttgtgtatataaccgatgccaattttattagtgaaactgaaaagctaaaaatgaaaggttgtgatactttggttttaaacgcacttagaagagaacagcatgtttcgcactttagcttgcaagaagcgcttgatttgattgctgaactcaaacccaaacgcacttatctcacgcatattagtcatcaattgggtttgcacgatgaagttagtaacgagctccctccaaatgtgtttttagcttacgatactttgcaaatagagtgctaacatgagcattccacattctcaacaccaacagtatccaacaatcatagcgcttgcaaaaaagcttgaaaaattattaagtggcgcaatattgaatgatgcttatacactaagctctgatgagttggttttggtatttcaactgccttctaatattttttttacctttaaaattgttcaacaataccaatcatgttttttattttttgaagaaggtaaacccgaaaaaatatcaaacgctcaagcctgttttgatgcaatcatcggtaaagctattcaacaagttaaacatcatataggcaatagatcatttacgtttattgtagatgcaaatgagcaattggtttttaaaatgtatgacggattggtaaatgtattgttgtttacagatggtaaagttacagatgttttccgtgagcgaatcacaaacgattggaatctttctcttgccgattttacgaagaacccagcagttgaggaagacgaccatgtaggtaaattctatctatacaaacgcaatcatattcatccgctgtatttttcgataaccaaacaaccagataacttattgtttgagtcggatgatgttacacaaacattgaatgagtttagcaaagtatgtttaaatcattaccgttttgcaagcaccaagcaacaattactcagtaagtacattgccgaagcaaataaattagaggtgctattacaaaaaacaaaacaaggattagaaagtaaacaaacagaaaccagttcggaagaaattgccaatattattatggcaaacatgcacctcataccgttaaaggcaaagcaagttgagttgtttgatttttaccatcaaaaacaacttgtagtaaaactcaaagaagatatgaatcctcagcaaaatgcagcatactattatcgcaagcacaaaaatggaaaccttgaagttaatctgctcaaacaaaaattgcaaagcagcgaggaacgtttgtttgtaatacaaaaactgatttcggatatcgaaaaagcctccacttaccgtgaacttaaaccgtttttacccaaagaaaaagaaaagaagcaaattgcaatgccatttcgccaatttgagtgtgatggttttttaatttgggtgggtaaaagtgctgccaataatgacgaactcaccttgaggcattcacacaaaaatgatttgtggttgcacgccaaagatgttaccggatcgcatgtattggttaaatggaaagcaggaaaggaattccctaaaaaggttattgaacgtgctgcacaattggctgcgtattattcaaaacttaaaggaagtggatgggttcccgtgagttataccctaaagaagtttgtccgaaaacccaaaggttccgaaccgggacaagtgctagttgataaagaagaagtagtgatggtggagcccaaagtttctgagtaagtaattgcaagttttgcaaatggctcgttagcgtgttgtaatctttgcaatattaattcctccaattgctgtattatcgttgttgccaaaaataccacaagcttatttttgattcattaaattaccagtgcaatgaaacaccttttactcagttttacgattctgttgagcctagttgttagatcccaagacacagcatctgttcagaaaaaatttcaaattacgcccatgcccattttattgtttgatccctttacaggatttggctatggggttttggctaactttaattatttacttggcgatgccgctacaacgcgttactccaattcccagtttattgcaatgaataccacacgcgggcaaacagccattcaagctaaccatcaaatatttttgcacgatgaaaagtttttgtggcaaggaaaactacagtttttaaattggcccgaatatacttatggcttaggagcccgaacacctgacacagagccaaccaaggaattggtttcgtacagagcaattgaattagaagaacgattaatgtggcgattgggtaaaagtaaaaactttataggtccgcaataccggttgtattcaagctggaatttagcatccaaccaacccgatagtgtaagtttctttaagcaagaggccattggtaaccaatcatacattgcttctggtattggtttgcattttgtacacgatagccgagataatgtgcaaaatgcatacaccggaaaataccttgaattggccattaatccttttgtaaaagtgttgggaagtacccaaaactggactaatttgcgcgttgatgccagaacatatacatcatttaagggtaggcataaacaagttgtggcaacccgatttttaggcgaacaagctattggcgaagttccctatatgctaactcctatgccaggtaggtactttgccaccagagggtttgttcagggacgttatcgcggtaaaacctttttaagtgccgaagtggaataccgcagaaatatttggaaaatacttggcggtgtgttgtttgcaaacgtacatacggttagccaacccaatggttctattcaatacttcaatccggctttaggtggtggtttaagggtaactatgagcgaagcacaacgcattaattttaggttggattatgcccgtggaataattgataatggaggtttgtattttcatgtaacggaagcattttagggtttaacatctttcggcttcaatgtttgttcaaggcaacaactaatataattgttggactagttctatttgtttgcactttggtcaaaaaattgtttaccagctaatatgccagcgttactattccgttatgctaatttgtattttaatacgaaaaggctatgtttgataggtaaattgatattcaaacccatgtacccctttttaagtaatctttccaatctacatgttcttgtactgcaaaaccttggtatcttaaacggtgaggcttcatgcttggaattcgtatattttttaagaaaaaaaaatgcccccgttaaagtcgagggcaacttaatgttttactacagagctgcaaaggagcatgttgcttgttatgaacttcctttaaaagtgattataattcatccaatctttatatatcgatacttagaaaagattatatactataattatttcgaaatgcaaacagctctatttaacatattcattctgcataaaaaagctccacggagtacgcagagcttaagagttatcttcggcttatagccttattgtgataagctttcaaaaacgaaaatagaataaaaattaacataaacaaatatggaaaaaatattaggacttgatttaggaacaaactccgttggatgggctattagagaggttaataatgaattagagaatcaaattattgagaaaggagttttaacattcgataagggagtagccgaagataaatcaggcgaacacccaatggttcaaaaacgaacagaggcaagaggtaaaagacgaaactatcaggcagagaaatatagaaagtgggtgcttttggaatgtctaatcaatgaaggtatgtgtcccttgtccatagatgaacttaatcaatggcgtcattattcgaaaggttcaggaagaagatatcctcaatcagaaaaatttattagttggttacgatttgattttgatggcgatggaaaacctgattttgaaaggcttggtcataataaacatgagagcttctatttgtttaggaaactcatagttgattcaagtaaggttgaaatatttaagagagaacctcaaattattggtagagtcctatatcaattagtgcaaaggcgaggatataacgatggacaaaatattgatgaaaacgaaaaagatgaactaagtaaaacgataatgaaaggaggaggagacgctggagcggttggtgttaatgacattctgccttacctagaaaaatatagaacgctaggtgcagcgctttatcacattcaacaagataaaaatttacgtatcaggaaacgctataatttaagaagtcattacgctaaagagttaaacgaaatctgtaatgttcaaggattagaacatttatataaggaattatggtcagcaataatctggcaaagacctttacgcagtcaaaaagggttagtaggagtgtgtacatttgagaaaaataaaagaagatgcccaataagtcatccattatatgaagaatttaggacttgggtattcattaataatttaaaaattaaacctgtagttaagaacgatatttcgattaattcaattgacattaaggaagctctacataagattgtttatcctcagttttttaaagctgctccaaatttcatgctttcatctattaaaaaggtcttagacaaggtgggttttgaaattactgccaagttacctgaggataccaaagtaactagtttgtcttttttatataaaatgaaggaagtgtttggtgatgaatgggaactaatcggagattgggataatgtattaacagataaggataaaacacatcaatacaatatagaagatttatggcatttacattttaccaaaactactaataaaaaaacaggtgaggaaccatttgattttttgaaaaggtttgctaaagaaaaattagttattaatgacgaacaaaaggcagaaatatttgctaaaattagattgcaacaaggttatgcaaccctaagtattagtgcaatacgaaagatattgccttttttgcaccaaggatttatttatagtgaggcagtatatttggctaatttgccaaaagtattaggcttaaaaagtttaagtgataacgaaatagaatcgtactcgcaatttatccgaaaaataattgctgattataaatacgatcaaaagaaggttgcaattatcaattcattaattgcaatttattttgaggatatcctaaattttgaagccaataaaaaggatttaattagtcgtaccatctcagaaaattatggtgagttttactggaacttattaccaacgcaaaaagctgttaatgttttaaatgatattacggatgaaataaataaatttttaagtaagccaaaatggaaagccgaaaaccattttataaaaacgggtcggttacatgaaaaaatatttacagctttattaaatgaaaaaggagtagccgcaaataatattaaatacttatggcatccatctgaacaagagacctatttgccagccttagcaaaagatggcaagtattatttgggtagtccagaacctattagtaaggggtttaaaaatcccatggctttaaaaaccatgcataaacttaaaaaattaattaattatttgatacaaacaggtaaaattgacaaagacacacgaatcgtaatagaaatagccagagagttaaatgatgctaacaaacgaaaggcaattgaacgctggcaaagggatagagagaaagaaaacgataaatataaagtccaaatagtggagattaacaaagagtgcaaaactaattttaatgaaaatgataaaaatctcatagataaaattagactttgggaggagcaaaaaaggcaatgtatttatactggtaaaactattggactttgtgatatattggatggttcaaagtacgattttgagcacagtataccttcaagtatgagttttgacaacgagttaaaaaacttaaccattgcagataaaacttataatcaacaaataaagggcaagaagttgccatcagaatgtccaaattacgaaagcgactacacatttaacggggttgtctatccttcaatactgttaaccatgcaaatcatgtttgggaaaatgaccgaaaccgaaaagaaagtcaaaggaaaaactattaagaaaagaagttttgagaaaatagaacatttggaaaatttgttggaagaatggagagcaaaaaaatctgatgataagggtataaaggataatataatacaaaaacgacatttgataagaatagagcttgattattggagaaaaaagctacaaacatttactgcaactgtatataaagcaggttggcgtaacagtcagttacgagatacccaaaccataactaaatatgctttaccttatttaaaaactgtatttgataaggtagaagttcaaaagggtaacatcacatctgattttagaaaaatatataaaatacaaccaaaatttgaaaagaaagagagaactaaacacagtcatcatgctattgatgccgcagtattaacattaattccttcgtctgctatacgtgataaaatattacttaattataatgaagcaaaagaaaacaaacaagattatcacgaagtacccaaacaatggaaaaactttaaagcaaaattcatcctagacatagaagataatgttttgataaattaccaagctcaacatagaacactaacttcaacttataaaacagttaggaaacgaggtaaagttgagtttgtattcgacaaagaaggtaataagattccaaaggtagcaaaaggtgatagcattagagggcagttacataaggagagtttttttggagcaattaaaaacaagggtgaattaaatcttgtagagcgttatccaatatcatcgtttacaagtattaatgattgtaaacatattgttgatgacaaagtaaaggaattggtgcaaaatgaattgcaaaagcgaatggaagaaggattaagttttgataaagccaaattggaaccaatacctttccataaaggaaatgaagtaattaagaaggttagatgtaaagttgcggctggtaggggttatctaactcctgcaaaagcccttgaaattcataaacacgattctaaatctaaacaccattataaagaatttatttatgctcaaaatgatcaaaatacttattgtctttactatgaattgttaaatgacaagaaaattgaaagagcatttagaatagttggacttttcgagctatcaaaattggggttaaaaactgaaaatgatttattcaatgatacatactataataatttagaagttggaaaaggaaagaatatacaaaatgcctttttacattcaattattaaagtgggtttgaaagtgattttctataaagagtctatcgatgagttgaaagaactttcaaatgaattattaataagacgtatcttcagagtttataaatttaatgagatgggcaccccaaatttatttttacaaaatcacattgaagcaaggcgaaatgaattattagatgatggtgatacagagtttaatcaggataagtatcaataccgtttaaagattaaggcagataaattcaagtgtgcaattgaacacaaggatttcgaagtgaaattggatgggcaaattgtttggttagagtgaggttgtgatttgctttcagattttaaaaacgatctttgatatacactttacgcaagtttggagtaccaaaccatcgtgttgtgatttgctttcagattttaaaaacgatctttgatatacactccgcaagccttaacgcgctttcttcacttagttgtgatttgctttcagattttaaaaacgatctttgatatacactttaaagcgagcaaaacgcccataaagccaagttgtgatttgctttcagattttaaaaacgatctttgatatacactggcaagcggaaacggtgcaactagtggcgttgttgtgatttgctttcagattttaaaaacgatctttgatatacactgagcgattccgccaagtcctgcgaggattggttgtgatttgctttcagattttaaaaacgatctttgatatacactgagcgattccgccaagtcctgcgaggattggttgtgatttgctttcagattttaaaaacgatctttgatatacactctagcccattcgtactcccattggcgttgagttgtgatttgctttcagattttaaaaacgatctttgatatacactaaagtcattttctaagcacttttaataaaagttgtgatttgctttcagattttaaaaacgatctttgatatacacttatttaaacctaaataggttgtatttcagtgttgtgatttgctttcagattttaaaaacgatctttgatatacacttttgcaatgatgcaagcgcataactttttagttgtgatttgctttcagattttaaaaacgatctttgatatacactcacaagaaaaaaacacgttcacaccagcagttgtgatttgctttcagattttaaaaacgatctttgatatacactttcgccaacttttatctctaaaatgacaatgttgtgatttgctttcagattttaaaaacgatctttgatatacactattttctatcaacgtttattgttgattctggttgtgatttgctttcagattttaaaaacgatctttgatatacacttagctaatgctaatgtgtttaaagaaaatggttgtgatttgctttcagattttaaaaacgatctttgatatacactacttgttggtttgattgttatcatgttttagttgtgatttgctttcagattttaaaaacgatctttgatatacactcccatgtttaagcagacgtgcaagcggttggttgtgatttgctttcagattttaaaaacgatctttgatatacacttacggcttttgctccttgagcttcggctgcgttgtgatttgctttcagattttaaaaacgatctttgatatacactctagcccattcgtactcccagtttctttgagttgtgatttgctttcagattttaaaaacgatctttgatatacacttaatatgttacctgaagcgacaaaatattgttgtgatttgctttcagattttaaaaacgatctttgatatacactcttctttattttcaaaaactttatactcaagttgtgatttgctttcagattttaaaaacgatctttgatatacactaagtgattcatatacttgttgaacatactgttgtgatttgctttcagattttaaaaacgatctttgatatacactactgttgtaaatgaagtgtctgaaattatggttgtgatttgctttcagattttaaaaacgatctttgatatacactggattttcattcaataccgaaacttgtaaagttgtgatttgctttcagattttaaaaacgatctttgatatacactttaataaacctttgattgccaccttctacagttgtgatttgctttcagattttaaaaacgatctttgatatacactaaattatggttcccgttttggtgtcaaatgttgtgatttgctttcagattttaaaaacgatctttgatatacactttttttcttaggctctgccattaatctgtgttgtgatttgctttcagattttaaaaacgatctttgatatacactccgcaagccttaatgcgctttcttcattaagttgtgatttgctttcagattttaaaaacgatctttgatatacactaattaaaacacgtttattcagaacgtcaaggttgtgatttgctttcagattttaaaaacgatctttgatatacacttaacgatgttaacgggcggcaatattacaagttgtgatttgctttcagattttaaaaacgatctttgatatacactgcaatgcttcatcaaacgcccccggcataagttgtgatttgctttcagattttaaaaacgatctttgatatacactactacctatgattgatgttggggcaagtcgttgtgatttgctttcagattttaaaaacgatctttgatatacacttctaaactactataccttagtgattgatatgttgtgatttgctttcagattttaaaaacgatctttgatatacacttttttttcattgattaacaggtaggctaaagttgtgatttgctttcagattttaaaaacgatctttgatatacacttatttatgtcgaaaaccttgttttgggttggttgtgatttgctttcagattttaaaaacgatctttgatatacactttgattctgatatttcaaattcgttataatgttgtgatttgctttcagattttaaaaacgatctttgatatacactgtaccaatcttgatattttgatgaattaaggttgtgatttgctttcagattttaaaaacgatctttgatatacacttgaccttattgcagctatccaatctttatagttgtgatttgctttcagattttaaaaacgatctttgatatacactttcgatttaacatttcgtttagcagctttagttgtgatttgctttcagattttaaaaacgatctttgatatacactggcacggatggcatttaccgcagggtagcggttgtgatttgctttcagattttaaaaacgatctttgatatacactataccgcatcgtttatgtcaactaatcaaacagttaagtgtaaaagtggatgaaaaaaaagtgtagtcattgaagccatttcgacaacctcggaatggctttttttgtttctacgggttaattattgcttgtttttaaaattagttgtattttcgttttgtaaatacgaatcataaatatgtcaacgttcacaagtactttacccgatgacttgttaagcaaactttcggatgctgcaaagtcgctttcattgcctaaaaataaggtgatagagcatgccctgcgtttatatttggagcaattaaacaaggctgagtatatcaagtcgtaccgcaagatgagtgaggatgaagatgtgttgttgatggtggaggaaggaatggctgcttacgctaaacagttagctgacgaggaatgaagcaaggcgaaatttggtatgctaacctaaaccctacagaaggaagtgagcaagcgggttttaggcctgtgctgattgtgagtggtaacttggtaaatgaatacgcacctttagtggtgtgttgccccataacaaccaaactcaaacactacaaaggaaatttgattcttttacctgatgcgcacaatgggcttaaacaacaatcggaagtaatggctattcatattaggagtttatctaaatcacgattaaaacaatgtattggatatgtttcaatggctgacgtgaatatgttgaaagcaacgattaatgacttgttacgtttgtaaacatgctttaaaataactctaactgttgcatgggttcttcttttgcagcctgtttttttccataaaatagctccatcataccaaactgtttatcggttacacacataattccaatatggcctttttcgggcaataaattttttacccgtttaatatgtacatcagcattttcgcggctggggcagtgccgcaagtaaatactaaactgaaacatcgtaaatccatcgcgcataatttcttttcgaaacttagcagcaatttttcgttcggttgccgattcggttggcaagtcgaaaaatactaatacccacataattcggtattcgtttagtttcatacaaactctggatagagtattttacggttggttccctcaaaacattcggccaaacttgccgttgttcgttgcaatcccaccattaatgggctccttttaccatctattttgatatcgagtgttggaatggaaagaagttgttttttgagtgtaatatcaagtgtattataactggctccactttgcactattcccacaaccacttcatcaacaaaggggcggtaaggttccataatatcatcggccaaacaatacgcattgtattggtttcgatgaaagatacccattgtaggtaataatccagatgccaccaaaccacgagccacggttgctctgagtattgcataaccataatttagcaatccattgggttgctccccatctcgttctcttctaaaatccaattcagccggaaaaaggtttgcccaataatatgcagcggctctagcctcgtgaaattcaccatcgccactttttacatcatttgcccaaagcatcatgttttgtgtttcaataccttttttacgcaggagtgaggcttggttggtaattttagctttaatggtttgctgccacaattgttttttgagtggaacacttgcatttaattgatcctgaaaccttgcttgttgcagtgtgtgtccacttaaattgagcatcaatccgcttggtaagtgtcggtcatcacaattgattagcgcaacattgttgtcgctaagtttactaataagatgttgtgtgatggttatttgttggtgatcaagtataacaatgccaatgtcttcaacaggaatggtattccctagcattttatcgaaaccttttgcatgtggcactgaaataaccaattgatcattttggcaactcaaataagcggggttgccaaagtacagtgttttcttaatcataggctttaagtttaagaactagcatgttacctataatcgtgccaaaactatttttgtattatggataacataccaaacatttccatctttcctcattccttttcttactttcgcagcatgaccgttgacgaaaaatacatgcaacgttgccttgagcttgcccaattgggagcaggaagtgtttcgcccaatcctttggtgggatgcgtaattgtgcacaacggtaaaattataggtgaaggctggcacaaacaatatggtggcgctcacgctgaagtaaatgctattgcatctgttgccgataaaagtttattaaaggatgcaactgtttatgttaatttggagccttgcagtcattttggaaaaacaccaccttgtgccgatttattggtgaaacatcaagtgaaggaggttgtagttggaatgatagacccttttgctgcagtatcaggatcgggaattcaaaagttgaaatccgcaaatattgttgttcggataggcgtattggaaaatgattgcaaagaactcaataaacgattcgttacctttcataaccaaaaacgcccctatgttatcttaaaatgggcacaaactgccgatggtaaaatagcccctgatgcagcaatactcaatgcagaaacctttgaacaaaagcgaaacataacaggtgctattgttcaaacacttgttcataaatggaggggtgaagaagatgctattttagtgggaacccataccgttgaaacagataatccctatttaaacacacgtgcttatacgggtaagaatccagtgcgtattacgtttgatcaaaatggcagattacctttatcttcaaatttttttgatggaacccagccaacattagtttttacattgaatgaaatacaacaactacatgctcaaatggaatattctgtaattgattttaccaaacccatttggccccaagtatttgatgaattgtacaaccgaaacattcaatctttgattatagagggaggcgcatttaccttacaatcggttttaaaagctgggttgtgggatgaggcacaagtgtttaaaacttcatccataatgggcgaaggtgtttcggcacctgctatttcgggtgtgctcaaacattcttataaaatcgacaacagtgaattaaccatttatacacaagcatgatatttttactcttaagcatttttttatcggtactcactgtatcttttttcaagttgttcgaaacttatggtgtcaatacctttcaagccatattcatcaattatatcacttgtattttagtgggtaatttactatcaacagatgctattatcctacattctttttggctcgaaccttggtttatctatgcatttctacttggatttgtgtttatttcggtgttttatgctattggactcacttcccaaaaaatgggggtttcggttagtatggttgctgccaagctatctgttgtgattccggttgctatggcgtttttcttgcatggagaggttttgggcgtgtttaagatagtaggtatcatactgtcgctggttgcagtttttttaattagcaaaaaagaaacaacacagcaggcaacaaatggtaaatggatttggctgctgccagtatttgtttttatgggaagtggattgattgatgcaacactcaagtatatgcaacaacagtttattccacctgcaaatgcgggcgatatggtaagcactatttttttggttgcctttgttgtgggtttagtggttatcattgttaaaaaagaatctattcagctcaaaagcgttgggtggggaattgcactgggtgtgccgaattatttttgcatgtattttctggtaaaaacgttagaacagtttgaggcatcctttatttttcccattaacaatatcgctattgtagtatgttctacccttatttcattggtttttttcaaagaaaaaatgaatgctgttaattggagtggtttcgtactagccattctttctatcctaattatttcgcttgcctaatgctgtttaccgatacctataaagtgcccggaaaaaaagctgagggttcatttaaagataaagggagtaaatttttatctttcatttatccagtcaaaactgaggaagatgtaaaaggatatttgcaacaattaaaaaaagaacattttgcagctgcgcatcattgttatgcctatgtgttaggttttgataagttaatacaaaaatcgaatgacgatagggagccatccaacactgcaggaaaaccaatacttcgctgtattttggctaacgatttaaccaatacattggttgtagtggtgcgttactttggagggaaattattaggtgttcctggattaattcaagcttatggcgagtccgcaaatgatgctataaataacgtttcaattgtagaaaaaatcatcaccgaaaaacacgaattgagttttgattacgcgcacgaaaacgaagctttcaaaattattaagcagtttgggttgaaaattttacaacatcatcatgcctcgcaaatatccattatatttgaggtaagaaagtcgcaggctatggctgtgctaaacactgttcacgacaaacgaatatttgaaacaacctttttaagtgaggagtaatctatcatacgatataccttttatgcataaatttattttatttcttctgttactgccattcacggtttttgcgcaatcgcctcaaccattaactgaggccttatccaacgcagttaagcaaattgaaaatgcaccggctattgccaaatttgagcaattagctattccaataaaaggaacacaatcaatagcagatgcggtaaggaattattatcaaaagcagcatccatttttacaacaacaagcaacagatattaacctgttacatgccaagcatacagtaattggatggcatttatattttcagcaaatctacaatggatttcctgttttgggagccacattaaaagttaatttgaatgaccaaggtgttacgctttcggtatttgataaattagccaatacccaatattggaatgtgcaaggttcattaaatgctgcagtagaaaatagagtatggcttattgtaaatgatgagcccatcatagcataccagcagtcagtttcaggttatcagcgtttgtatgatgcgcaaggcaatttgatcatagaaaaagatacacgcttatattttttgcatgatgataccatagtaagtgccaaggtttttcggcccgatccattaacacccattggggtaattgccggattaaacggaacttaccaacattttaaagatagcgattatgctttgattaataatcaacgagtggatgtaaaattaccggtaacatttaatggctctgtgtttcaactcaaaaataaatacgctcgtatttacgatacatcatttaaggcacccaatattgatcctgcaacatcattaactccaacgtttaactttacccgccaacaaaacggatttaaagatgtgatggcgttgtatcacgttaccaatactcaggaatatttacattcattgggaattgatgaagtgaaatatcaattaaaaatagatgcacattcgagaacaagcgatcagtcttattttgagtatgatggcgatacctcacttaattttggaacaggtggagtgcccgatgccgaagatgctgatgtgattgtacatgaatttacccatgctgtttcgtttagcatcaatccaagtataaatatgagcagtgagcgaagggccattgaagaagctacttgcgatataatggctgctatctattcaaaaagatatgctccctttaattggcgcagattgtttaattgggacgcgcccaatccgtttgctactggtgtaaatcctttttggaatggtagaaatggaaattccaccaaaacgtatgctaatttaacttccgatccttatggtagctctgagatttggacaagtacattgttggatattgaagagcaaattgggagcgatagcacaatcatgttgatgtttgcatcgcttgcatcctatactgataacacaaccatgcctcaagcggcacaactgtttatgcaagccgacagtgtgctgatcaataaacattttggttggaaaattggtcccgtttttaatgcccgtttattgggtaatttcccaacaagtattaatgagcaacttaacctaacaaatggcctaaccattcttaatactcagtcttttgctagtggtgagggtaatgcaatcgtaaacatcccgctgctagctaatgtggtggtgtatgatattcaaggaaaaaaactgatggagtacaccaagcaacaaggagcgttggtgctgaatcctgctgattttacctcaggaatatatattgtaaggataactgcagaaaacgcacagttgagtttaaaaattcttaaatactaaggaatattcatatacttgtgtacctgcaaacttatttcccattgggggtttgcttttacgtaatcaataattagcggcagcatttgtgccgatttatcccactcaggttgaaggaatagtttacaatcggaatggcaaagtgctgcatgttgttcggcccattcaaaatctgatttgttaaaaatcacaactttcagctcgtgcgccaggacaacaacctcaggaagtggggctttaaattttttgggagaaacgcatatccaatcccatgaaccagatagaggcgaggatcctgatgtttcaatatttgtttgaattccttttaattgaagtgcagttgttaactcatctaaattgtgtagcaagggttctcctccagtaatcacggcaagtttggcatttgcatttgttacaaaagaaacaatatcgttaacagcatattgaggatgtttactcgcatcccaactttcttttacatcgcaccaaacacatcccacatcgcatccacccaaacggatgaaataagcagcacgcccctgatagaaaccctcaccttg

SEQ ID NO: 4319 - DNA, 24035 bp, synthetic construct
  misc_feature 1..24035: note = Synthetic
  source 1..24035: mol_type = other DNA
aaaatacagtggtggcgcatcgtaccggcacgggatatggctcatacaatgatgcaggcattattaccctgcccagtggcaaacatcttgcaatagtggtctttatttcagaagcacaggaaaatcctgaaaaatgtaatgaagctatcgccaggatcgcaaaactggcctgggattattattcccgccattgatcccggaagccctccctgcaattgaaaaggaacaacgtctctattttgagaatgataatggcaggtttaatatggactgtgctcctgttacacttataccatcaacggcctgaacatacagccggtaatattgcgggttttcagggacctgtaaatggatggatagaccggtgccagcctcctgcatgtaaataacttctccggtatcagttgtttttagcaaccgccattcaaaccgtatattcttctctctgtcgtcagcaaatcgccagcctgttccatcatttaccaacacccaatataacagcgaactgcctgcgaacacagtcttggatggccggaggatcttgatcgcaggcaaatgcggagcatcgctttttcctgtccagctttgttgcaagagatagaatcccggtttctggcgtccccactgatctaaaagaccatcaaacgttacataatcacgtgtttgctggtcctgccactcttttgcaaatacaggcaagctgttttctttatccaatagcacaaggttttcgggtgatatttcgctgataaaaacaggttgccggatattttttattgatgatatgcctgtagtgtcctggccaatgatcaatccaaacatgtcaactgccggcacacgcaaccggattgaagaaagcgttgcatctatgtgagctgataaattaacgtcgatggaaagcgggcgtttcggatctatgtcctttattttacggcttagctgatcaagccaggagaaaagcatttcctctttgtaaaaggaaaaaggcttattgtagttgtcttgtggtaattgattagtgttgccgacggaccatccgatgatactctcattatttttcaactgatctatctttttgagaatatcctgctcagcctcagcgagattttttgtatcatcatcctgcgatccagtcaatacagggatccaaaaggaataaaccatcttcatgcccgcttgccgggcttcagctaacacgttgtggtcatatatgcctggaccataacgcctgatcgtggatatccccaatgttttcatcctttcaaaatcgcgctgcacctgcacgcgcagcagttcatgaaagttgcggtaccaatttttacctgtattataattcactcctttaatactttgcaacaggctcaccggtacattttttagctgcattatttctttttcccggataggtttccatggtccggccagtctgctgctgtctatccgcgggtatttcttcaaaagagacagaacagaagagggttgccgccattgccagttgagaggacctggtttaagctgttccggaacgttgtagtcatgagcagtattaaagaatatcattccttttatttccgggaatcgatattgtatattgctgaaggccgtatcaaaccatgatgcctgttttgcagcatctgccagcgagcccatttccccgatcataacaggaatgcctgaatgaaaaacaggtaactgatgaaaaggcttataaagagccctgaacgaattggattttttataaccagcagctggcccgtaatcaagggctgtaacgcttaaccaatccacataaggttttccgggaaaatacagctttgcttgttctgcccgccatggattccatacccacaccacattattgacaccatttttaaggaagaactcatacacatatttccatgcagccctgtattccatgggggtattgtttcctgtaggtgaccatggataagcaggattatcaggttcatgcgcaaaacggataaaaacggggcggttcagtttttttacctgcgagctgaactgttggaggtagtagtcaagctctcctttaatgatatgcgcaaatatctttttttcactgcggagttcattgttaccggtttgtttaaaaagactgccccagggctcccaggtgatcatcggaagtgagccattgttataaataaattgaacaacagtatccggtaaaaagcattgcggtgcatcgccccaggggatataaagtgaaatgatattgaatttttctccggagctctggacctgttttacttcttcaaaacttacaaggccttcgctcgtcccaggttgatatataccggtaagaaacggcgtgccttcctgtttttccgggggtatcactttgggagggtcagcattcagcttcagcaggtaccaggaagcaaatacggtaagtgtcaataacagcaacccggttttacgaagaccgctgtaaataaacgtgtgccgcattaaccaaagctgccgtttcagcaacagtggatatttgaggcttttcttaacaaaagcattgcggtcgcgcaggcgaacggaatcgccccttaaactgatcaataatactattgtaagaatgaggcaattgacgcccgcaatacatgccatgaccagtgaatacgggttccagtcataccacaacccataagcgatggccgaaattgaaataagcagcatcaggagattgggcatatacaaaacccacgaatccggtgttctatcatccttgggtgtcggtatatagggcactttttttctgatcagcgtatatacgaatcctgtgatgtaaatccaccaggtgccgatctgcaacaaaccgcctacaacatgaaacccgcgttctttttcttccatcacccagcgttgtacataatgacggataagaatggtagaagcgatcatcggcattcccaataatacaaagctggtcatatccatgcggaaaggaataagaccagtgcaaagagatagaacagggatcataaaattgataaaagcgataaaaccagacaggtaatagagtggtatggttccgtaatgtatcttttgacgccaactgaatttagtaaaaagccggaagaaagtagtaaagaacaattcaaatgtccctcttgaccacttcagttgctgcgcataataagcagacaaagtagatggcaccaatcctcttgccaataccgcaggcacatacaccgatttccatccttttgcatgcaattgcatagccgtatgcatatcttctgcaaggccggccgcatgtccgccaatagaatccaatgcagcgcggcggaacgtacagttggcaccaatggccagcacggtcccatagctgttcatcgtcatcatgatcgggccatagaactggaaagtttgttgtgcagcacctttggcaataaaagtgttatcgagattgctgtatgcctgcacaatctgcacaaagccgatcttgggattattaaaatgcggcactatcgggtcaaggaattctggctggggcacatgatcgggatccaatatcacgcatagatcaccggtggcatattgcagtgcattgttgatattgccggcttttgcatctttcttatcctttcgtgtaatgtgccggacacctaatctcctgcagacctctttcaggtatggatcatcagcttcatcacatagatatgttgtatgcggatagtggatctgctggatggcttcaagtgtcttttcaaccatttcgcgtggctcgcctgcacaaaatgttgtgaagatatctacagtaaatgttgaattgccctcgggctctctgggaacagaaatggaaaaatagtgataccattcatgtatcagtcggagacaactgaatgtaatggccggcatcagtatccagtaaaaaggagcaaaacctgcctgcgccctgtcgaacaggcaatacaggagatataaggtgctgacaacgccgatcaggatcatcaggcgcaacatgatcagctcatttttggaaggaccagaaacagagttaaagggtttactcatttttccacaacataaaaaggtgtattggcggtggagaaatacccttttttatcataaatggttacgaatacccggtaaggcccttccacagatggcgtgcggaagcgcatttctgctcccggataagataaaagcaaactatcaaaactgtgtggttttttcaaatttgcctcctgtatatttttacggaaccagtcttcctgcagcaattcccaccggaaatatatcgaatcgccaaccggactattttccataattacttttgccgtgtaaatactgtcaggcttcagcaggatattatcccttgctccctcttgcccgatcagcatatattttacgggtggtgaatgatgagccggttgttttcccttccacaggtattccatggcatttactatttcatttttttcacctccgggcgaaaagaaattataccaggtatgcgttccttcctgtttctgaccccaataaaaacagcaagcgccaagaaaccgggggtcattattaggaataaacttagccctttcaaggtattgttctgcttttttgatggatgtgttttcaataggagctccccaggccgttgcttcagattcccatggcccattaattccccattcactgataaagaaagggccattccaaaaccacttgaactcctgcaattctttctccaaaatagatattcgaccgaatgtattgatcgcgataagatccaggtcaggcacttttaccttaatattataaacacatcgcctggagaaattggccagtgctgttgtaacaggatggtcaggatcttcgtgatggatcattttcaacaggtcattataggctttatagaaagaacggaaaccgggtcggtaaggaaaatcaatttcgtttcccaggcaccacatgagcagtgcggggtgcgagctgtactgtttaacgatatgctggtaagcccggaattgttcccctacctgtgctgtatcgcgatagaacgactgatgaaggcttaccggcaatgacaatccgacaataacagcaatgccattggtttctgcttcatctaaaacatgccggatattggtagtgtcccaggtacgaagcgtattaccacctgccagcctaagctcagcaagattaccagaccccgcagcgcccttaataaaaaacggttggccattacggtaaagcgtaaaatgatcttttgtatgaagcacaaataccgtctttgattgcatggtagttgcagtacggtctctgcggaaataaagaaacaaacaaaacagtacaagtatgagcagcagggagatgccaaaaaaaaagcgcaggtacctggccatagggttgagggtttggtaagataccccttcaatataggagataaacggggttttgccaaacggatacccaaaatgaatgctattatctctttcccacagggaatctgccttttatttcattccgttcaaacatactggaggccctgatatcaatgaaaaaaggcgcaatgcttcgcttcccgcataaacattgcgcctgatctgcccttaagtgtatttattctacaattttttcatgggaaattttcttgccctttgttgtccattcacggtccctgatatttcggccattaatgaaccttctgtttccagcatatagctgatcttttgcgggaaatcatgtgccggattttcaaataccagttgattggctgatgaagaggtcagtttgaattttaccggttgatcattattctgaccttttacggtagggatataaaaaagatcatctccttcttttttcaggacaatggattccaggggaatggaatcggtagcagtgatcatatagcttcggcctccataggtggaatcatttaccaaagaccattcttccaccatctttccgcgttgggtttgattgccccattttccgagaagccattttgcatcggaaagggacgaagtgttttgtgcaaataaattatgggagataacaaggataaaggcagccgttaaataaggtttcatgtaattgatttatggtgactgcaaagctgactactattccgttttttaaattgtaaaaaagcgacttctaatcaaagctgaaaaatttaaccagcggcagatgttctgcgaaatactgctttggactcagcccggaaaattcgcggaagtctttaataaaatgagcctggtcataaaagccgccgctgtaagccagatcggtgagtgtattgtagcgtttctgttcagttaaagacaatacatattgaaaacggctgatacgggcgtattgtttgggattaaggccaacggcagcaacaaactgacgctcgaaatgccggcgtccgatattgagttgggcagagagatcttcgatattaacagcgccattcacctggttgatcatatcaacaccgcggttgactaaggcatttacagcagttggttgtaattgacgcaataagaactgttctatgatctgtactctttgttcattgccagaagcttccagcatacggttttccaactcacggccggcagcgccccagatatcagctatttgaatattgctatcgttgagctcatgcgtattaatattggtaaagggtcttaatccatgcggctgaaacctgacgctgaacatgcccaccctgccattgccaccgatttcgatgaagcgggtgagttggccatgaataaagctgcggggttgaaaattgctgatcccgtccgggtagtatttttgaaaaaggtttccatagtggaataccagctcgatgcagccgtcagggaatatgcgttgctgggtacccggcagttcttctccttcaaggctccagtagcatttgataaagctggagagggatgaattgggcgtgtaaaggcgatagtgcatgagtgatctgaagataatattttttcgtatattgaaatatgcttgcgcggattcataagagattgggggagcgtcctgctttttatgttttaccaaatatggaaaactgttttacctggtcttttcctgaattcatgccgttttgtgttcagctctactatttctcctctttaaaagacttttccacgttgccccgggtctgaagcagacttgggaagagtcattcattaaatttttagtcgttaaaatttgggctatgcaacgtaatctgcagggtcagtccaccaatggtgtgctgatattcgttttggttttgataagtatattgatattggagcgggggatggtggggagtagtaagtggtattggtttttgttggtgacggtaccggggatggtggtggtttgggtgagagggagaagggaatagttttgggttagatatgtaaagggctggtggaataccggccttttttagatttatgaaggggattgggagatgcatcgggttaaatgatgccagccggagatactattcatccttgttgctggaaagtgaggcttttaagacaggaatatcatttgacactacttgccaaaccagcgtgggggctatgccaaaatattcgtgaatcaaaatgtgcctcattcctacaatctgtttccattcaatttccgggtaaaggcttttagtttccggagtaatatagttagccgcttctccgatgatctcgatctgtttaattgtcgcgaaacgcatcattgaattggcgatgaactgttcaagacttatatctgcagtataggcttcaatctccataatggcatccataatatgcccgattcgttctttatcgccaattttgccacgcattgataagggaatgtaatgatcaggcttcgtaaatcaattgcttatctgattcgatataaggcaggatccttttgctaacgccgtcagaagaaaccaggtcgactgtccttttgagcttctcttccaggtcaaatttcatttgtacaaaggcgaatccgatatgtctggagtagtccaattcgacgagaatgtcgatatcactatctttatcggcttcatcccgggaataggagccaaagagatatgctttcaacacaggcttgctggtgaaataatcgcggatgatctgtatatcttttggcttcaggcgcataggcgaatttactgtttttcggtggcttgtcctaacctccccacggaggcaatggtttcaatccattgcaaggatggaattaaacatgatgagtttcctggtctccaaccccggatcattgtctggggcaagtgtttcaaatacaccttgatctaagaaagagaaatactcatcctcggaaatgatcaggtgatccagtagtctgatgttcaggaagcggctggcctccacgagtttttccgtcgccgtcttatccgcatgggatggctttaagctgccggacggatggttatggatcaccacgatcgatgcggcccttctcagcagggcgcggtggtagacttccattggatcgatcaggacggtacgttgagtgcccaatcccagcagttccagcttgcggactgtctgggagccgtcgagtgtcatcatccagaggtgttcgcggtcgcggtccagtttggagtagcggcggaagatgggttgaaggatctggtagatatcggaggaggattggatgtggattttttgatggggtttgagacggatgttcatataataaggttttcggtaattaaatattttacaatccgaatatagtattttttagataataaaatatcaataaaatatattttattatctaaaaaagttgatgaccaaagcaaaaatatcttctcaagcctgactatcaattttttatatttttactttgacaatcgcttatggcaaagaaggactataacaggatcaaagttgtattagctgagaagaaaaagacaaacaaggagctcgctgagtatctgaaggtgggagccgttacagtttcgcgatggtgcacgaatgatagccagcctaatattgctacactatttaaaattgcaaaattcctgggcgtaaaagcaaaggatcttcttgtcgactaatctttcttccatgagaactttaatgtttgttcttgccggtttgccgggaaataattcaaatgccgatttaggaatactgcatgcccaattgcaagagtcattaaagaaaaagggcgtcagtctatcatttgaacgaaaaaaagaacttcttctcgccagatttgaaggcgtggcctattactgctcctttttgagtcataagagtgaattgaaggactggtttatgatggcaaaggactttaagttgaagtgcaacaaaagacccttgtcaagtgacgatctgcagcagcaatatgcaaacttatggagtgagtatccggatatgtacagacctattcatttttctatagctgagattattttcgaggagatagggagatttaatgatgtggatatttatgcgtttcattagaacagctatttgatgccgaaaatcgactaagatccctgtaaaagaagaaatcaaataaacaaccacacgaaataaatttagcgggcagcttgtaagaaataaccatttttcgtagcattgcatctgaaagcttatcacaataaggctataagccgaagataattctttagccctgcgtacaccgtggggctttttatttgggattaacggaataattataaaatgagtgaacagtcgaaatcgctacgaacaggctgataatgaaaccatcatataatcaggaaaatatatttttaatactccccactttcagatacatttgcttcgaaagcctgtggtggtttgatttcactatatcaggggcaccaatccctggttaaacggcctccaaaaccgtttatggctttcatttttatcaggcgggccgccgtgaccacatatagccaggtaatcatttacttgtgtaagtggggagttgtgatttgctttcaattattggtggtggctcgtctgattttcaatatatttaaaatccaaacctatccaccatgaacaaaattctcggccttgacctcggcaccaattccatcggttgggccatccgcgacgccaccgaacccggcaaccagatcatcgacaaaggtatacttacttttgaaaaaggtgtcggcgaagaaaagggcgtcgaatttcccctcgtgaaaaaaagaacggaaagccgaagcaagcgccgtcattaccaggcagagaagtaccggaaatggacgcttttgcaaaccttgatcgaacacaatatgtgtccgttaacgatcgaagagctggatcaatggcgtaaatacaccaaaggtcaaagccgcaaataccctcaatcccctgatttcattaactggctccggttcgattttgatggtgacggcaagccagattttgaaagactgggattcagcaaacatgaaaaccattacctgttcagaatgcttgccgtaagtgataattctgctcataagaatatttttacggacaatcctcatttgctgggtcggatattttatcatctggttcaacgaagaggtttcagggggcgtgacgatgaagaagcccgtacgatcctgcagggtagtaaagatggtaaagtggctggtgcagaagccatctcaccattgatccatcaataccaaacgcttggcgcagccttataccatttacaaaaagataaaggcgagcgggtccgcaagcgatataatcttcgtgccgattatgcgcatgaattgcaactgatctgtcaggtacagaatatcccggatacgatttacaaaagacttgaaaaggctattgtatggcagaggccactcagaagtcaaaaagggctcgttggtatctgtacatttgaacaaaataaaccaagatgtccagtaagccatccattttatgaagaatacagaatatggatcaatataaataatctgaagatccggcttccggatggaatagataagcaaacatatatacgggaaaagatctatcctatcttttaccggaaggacagagactttaagctaactgtcattctgaaggagcttcgtaaggttggcggcagcctgggttccaaatttaaggacgataccaagatcccttctgcaacgctgctgaatgcattcaaagaaatactcggagaagactggaagaatctctacggttgggatgctgccttacagaatcaacccaagtcaattccttactcatttgatgatatatggcatgtgcttttcacatttgataaccgggaaaagcttcagctgttttcaaaagaaaagctgaagctggatgaagaaaatgctgaaaaattctcgaagatcaaattgcagcaaggctatgctacattaagtatttctgcgatcaggaaaatcttgccctatctgaaagaaggttatttgtacagtcatgcaatttatctggcaaacctccacagggttttaggaaagaacacgcttctgccttcagatgcgcaagcattctctgttgctcttagaggcataattgatcagcatcgatccgaacaatcatggatagcagcagtgaatggtctgattagcgatcaactaaatggcgacgcaagatttggcatggatccggtctatcaacttgatcgtgatgatatgaatgatattgaaagaaagcttgaagaagaactgggagaatactcatggaagaaaaaatccaaagaagaaaaaaatgctgccataaattttgttgctgaaaaatacctgtcatttctcaggagacctgttcaatattcaaaagaaccagtatatagtaagttgccacgattacatgatcgcatacttaactatttgcgcgagacatacgatgttcagcccaaaaatgagaagtatctctggcacccctctgaacaggaaagttatccggcggctaaatatatgaacggtgtaccggttctaggagatcctatgccaatcagcaggggatttaaaaatccaatggcattgaaaacccttcatcaattgaagaagcttttgaaccatctgcttaaaatcggaaaaatagatgaagacacaaggattgttgtagaaatcgccagggaattaaatgatgccaacaggagaaaagcaattgaaagatggcaacgggacagggaaagggaaaatgacgaataccgtaagaaaatagaagagaatccagagcttaaaggattgttcttggatgtaaaaaataaggatattattgataaatacaggctttgggtagagcaaaataaaaggtgcttatatactggcaatattatcaatgtatatgatttatttaccggaaaattcgattttgagcatacaattcctgccagtgtcagttttgataatgaattaaaaaatcttacaatcgcagacggcaagtataataaacaaataaagaaaaaattgtttccaacccaactgccgaattatgacagagaggcaacaattgatggagtaatttattcagcaattaagcccaggctggagtctattgaaaaaaaggtagaagagcttgaagccttgcacgaagagtggacaaataaaacacgattcgcttctacaaaagagataaaagatgcttgcatccagcgccgtcacatcatcagctttgatctggattattggagaaaaaaactgaattcattcaccgtaactgaatataaagccggatggaagaatagtcagttacgggatacgcaaataatcactaaatacgctttgccatatcttaaaaccgtgttcagaaaggtggaagttgaaaaaggaagtattgttagtgatttccgaaagatctataatattcagccgaaagctgaaaagaaagagcgcacacgccatagccaccatgcaatagatgccgcggtcttaacattgattccttccgctgctatccgggacaggatcctgggaaagttcaatgaactgaaagatcaaaatgttaatcttatttatcatgaacctgtaacaaactggaaagattttaccgcggctcatattctatctatagaagaagatgtgctgaataatttccagcccaagcaacggacgttgatgcaaacgtataaaaacgttcgaaaaaggggaactaagcaattcgtaaaagaaaaaacgccggaaggaaaatggcagtacaagttggatgcgaaagggcagagaatccgattggttgctaagggtgacaatatacgaggtcaacttcataaagagagtttcttcggtgccatcatgttggatggagagaaatggttggtcgaaagatatccggtatcaagttttacaaatattaaagattgccggcatattgttgataataccgtaagacagatagtacaggaggcgcttgaaaaacgacttggggaaggaatgccttttgataaggcaaagcttgatcccataccgtttcctggaggtaaagaagttattcggaaagtcagatgtaaagtggccgcaggcgctgggtatctcaccccgaaaaaagctcttgaagttaaccagcatgactttttatcaaagaatgattacaagagatctgtctatgcccagaatgaagaaaacacgttgtgtttgttttatgaaggagtagttaataacaaagaggaaagagcatttagggttgttggtctatttgacctttcgcaattaaagcttaaaaaaattgaggatataagatctgaaaaatactatcaggcggttgaagcaggaagagggaaaaacaaggccgaaatcccattatcgcatataattactgttgggattaaaataattccttttaaaaacagtaaggaagagttaaaagaactatcaaaaagagatctattgagaagagtatatagggtttacaagtttaatgaaccagctccctcaactgtatatgtatatatgcaaaatcatctggaagctcgtccaaatgatgagttaggtaatggagagaaagatttgaatttggagatttatcaacccaggatatttctgaatgccacaaaattcacttgtgtaattgaaggccgagacttttctattgatctggatggaacaatacgctggttattctgaccttttgagaatgctaattctggaggagtgatatactaaatgaaatacagggttcgttttcatcatccaagccaattcctatgataaagcggaccctctattttggcaatccggcttatctgaaaactgtcaatgaacaactcgtcattgagaccatcctgcccgttcctcttgttcctgaaggggaagataaagaagtcaagaccattgccaaaaccattcccattgaagatatcggcctgctgatccttgatcaccggcagataaccattacgcaggcattattgtcgaaattattggcgaataatactgcagtgatcagttgtgatgaaacacatcatcctaccggcatgctgttcaatctggatggtaattcccttcaaagccagaaattccaggcacaattgaactcaaccattccgctgaaaaagcaattatggcagcaaacggtgatcgccaagatccaaaatcaagcagcggtgttggccattagacgggaagagaataagatgttgctcagcctggcgaatgatgtcaggagtggcgacagtaataactgcgaagcgcaggctgcggcgtattactggaagcgggttttcccggatacacttcaattcaggcgggaacgatacggtccgccaccaaataatctacttaattatggatacgcgattcttcgggctgtggtagcgcgcagcttggtgtccagcggcttgttgccgacgctggggattcatcaccggaatcagtataacgcgtattgcctcgcggatgacatcatggaaccgtacaggccgtatgcagacctagtagtgtaccaaatcgtccggaataacggccaatatcttgaaatgagcccttcaataaagaaatctctacttgaaatacccgcaatggatgtagtcattgatggaaagaaaagcccgttaatgaacgcagtacaacgtacaacagccagccttgcgaagtgctatgaaggagtacaaagaaagattctataccctgcgattggttaagattatcaattctatacttccgtcccctcttattcaatatcctttaaacccttttctatgaaacggaagtcaaaaccattggcaaaggttggcaaactgcgcagcattcagcaaattccggttaggccaaagagtcaacttaaaacagatactatctattgtggggacaatcttcagatgttgaaagagattcccactgatagcattgatctcatttatatagatccgccatttaacagtaatcgtaattacgaagtattctggggagataaccaggagaaaagagcgtttaatgatcgctttggcgatgccagcgcttatatcgcgtatatgcggccgcgtattattgagctgcatcgtgtattaaagaagacgggcagcttctattatcattgtgactggcatgctagtcattacgtaaaggttctgcttgaccaagtatttgatggtaataatttcaggaatgagattatctggaaaagaactacagcacatagcgattctaaaacatttggaaatggccatgacactattttcttttacacaaagtcagaaaaattccattttaataaaatttaccaaccatactcagaggagtatatcaaacgcttcaaaaatatagataaagatggaagaagatggcaggatgacaatctaaccgccaaagggctcagcggtggcggttatgaatatgagtataaaggggccaaatctttatggagatgtcccttggaaacgatgcaaaagttggataaagaaaacagacttcattttacgaagaccggaggtattcgactaaaaagatttcttgacgagtctaaagggcttccctgtcagtcggtttgggatgatgttaataatattaactctcagtcctcggaaagagtaggttatccaactcagaagccaattcctctactggagcggatcatcactgccagttcaaacaccggtgaaaccatcctggatgctttttgcggttgtggaacaaccttgatcgctgcacaaaaacttaacagaaggtggatcggtatcgatattagtccgactgcctgcagggtgatgagtcagcgactttgggatatatttcggctgagcgagggacgggatttttatgtggaagatcttcaaaaaacagaagcagagttaagacgtctgccgcattttgaatttcaaaactgggcttgtatcgcgctgggtggtattcctaataaacgcaaatccggcgatttcggcatagacggtaaactttatccgattgaaataggcaagaaaaagaaagagggaaaagatttgtttggagatgctgatttttactaccccatacaagtgaagcaagtggacaaagcaggtcgcccagacattgataattttgaaacggccgtgagacgcgacggccgttccaaaggatatttcgtagcctttgatttttcaagtgatgcgataactgagataaaacggctggacaaagaaggtgatattgaaattgttcccgttacggttaagagattgctggagatagaaaacatttatcgggtgaaggcctcataaccgggtaatatgtttgaaagacttaatgcttatcggattatgtgggtactcgtattcttcgatcttccgacagaaaccaaaaaggacaggaagatctatgcccggttccgtaaagatattatggcggatgggttccaaatgttccagttcagcatttacctgcggcattgcgccagccgggagaatgcagaagtgcatatccagcgagtgaaaaggatcctgccgccgaaaggaaatgtcggaatgatgtgtattacggacaagcagtttgggatgatggaaatttttagcgggaggaacatcgttgaatcgccggaaacagtacagcagctggagcttttttgacaaaagtaccggggtaaacagggctttacaaacaaaaaaatgggtgaagattccatttttttgtttgtaaaactcacctcaaataactagcaatcaacaagttttgagagtcctgttgtcgaagagctaagctacatcataaattgaaagcaaatcacaacttacatccgctcgatcaaaaaatgggcaaagttgtcgaagagctaagctacatcataaattgaaagcaaatcacaacttttttggagaaggtgcattgcaaccattcgttgtcgaagagctaagctacatcataaattgaaagcaaatcacaactctcgatcgcagagttaaccatctgttcgtgttgtcgaagagctaagctacatcataaattgaaagcaaatcacaactggtataccccgtctttacagacgtcgtatgttgtcgaagagctaagctacatcataaattgaaagcaaatcacaactctgagttcatgagctgcaggtagtcgatggttgtcgaagagctaagctacatcataaattgaaagcaaatcacaaccggccggggttacatactcattccccactagttgtcgaagagctaagctacatcataaattgaaagcaaatcacaactccacacgtagcgcctcattatatgctgcggttgtcgaagagctaagctacatcataaattgaaagcaaatcacaacgggtatccctctttacctgtatctggtaaagttgtcgaagagctaagctacatcataaattgaaagcaaatcacaactatgtacgttactaggatttttcttctgaagttgtcgaagagctaagctacatcataaattgaaagcaaatcacaacccggcgcagctgcgccttcataatcgcgtggttgtcgaagagctaagctacatcataaattgaaagcaaatcacaactcgatggtttccttgatattcttgatcctgttgtcgaagagctaagctacatcataaattgaaagcaaatcacaaccatacctaaactgtataaaatggattccgggttgtcgaagagctaagctacatcataaattgaaagcaaatcacaacgaaggaatagtaattaccggcgtggtcggtgttgtcgaagagctaagctacatcataaattgaaagcaaatcacaacgatgcgcgtaaggcgttactgaatggaatcgttgtcgaagagctaagctacatcataaattgaaagcaaatcacaacgtacgggctggagtacaaaagagaggaagagttgtcgaagagctaagctacatcataaattgaaagcaaatcacaacttacgaattggcgatttcttgaattttacggttgtcgaagagctaagctacatcataaattgaaagcaaatcacaaccacattgctacgcgacatgcagcggctggatgttgtcgaagagctaagctacatcataaattgaaagcaaatcacaactgtttcacgggctcggttcatcggaacattgttgtcgaagagctaagctacatcataaattgaaagcaaatcacaactcagtatttcggagtgccacagcgacgcagttgtcgaagagctaagctacatcataaattgaaagcaaatcacaacttccaaaaacagagccccggaataaataatgttgtcgaagagctaagctacatcataaattgaaagcaaatcacaactaataaactttcaacgcttgtatgtagtcggttgtcgaagagctaagctacatcataaattgaaagcaaatcacaactaccgcaatatcgactatatcgggaacatcgttgtcgaagagctaagctacatcataaattgaaagcaaatcacaacccgctttaatgaaagcgtcccagagttcgggttgtcgaagagctaagctacatcataaattgaaagcaaatcacaacagatgaaggatttggccagcggtacgctgggttgtcgaagagctaagctacatcataaattgaaagcaaatcacaaccaatctaatgccgtcccaatacacagaaatgttgtcgaagagctaagctacatcataaattgaaagcaaatcacaacagccaaaaagcaggatgatcaatatcgttggttgtcgaagagctaagctacatcataaattgaaagcaaatcacaacccacaccataagagtttttcaattcgacgaagttgtcgaagagctaagctacatcataaattgaaagcaaatcacaactcatgaaaaggaatgcggttcgttcaactgttgtcgaagagctaagctacatcataaattgaaagcaaatcacaactgtcggcggtgcttatgggatatctaaactgttgtcgaagagctaagctacatcataaattgaaagcaaatcacaaccgcaacgtatgctggcggatggcagaacgagttgtcgaagagctaagctacatcataaattgaaagcaaatcacaacgtagtgagttcacaggccttttggccggaggttgtcgaagagctaagctacatcataaattgaaagcaaatcacaacctcatccctgggcgcggaaattgccgttaatgaaacgcagtacaatgttactcgcccgtaccggaaaatacaggtttacatacgtttaagcgcctcttgcttggcgcttaagtattggtcaaattgttctgaattcattgtatatttgtaatagataaccagtggggtcatataggcaggctaaacacctgtggctgtagtctcgctggttatcgttttataaacagtagatcctctcttcttaatttggtcgctctttccctgatcagttcgtacatggtctctgcgatcattgtctcgttttatctcttgctatcactacaatgggtgattctttaaaatatttggtataaaaccgaacgattttaccggccttcctggtagtccatagttaatctggtgttgtcgaagagttaagctacgccataaactaccctcctcctcaactgcagtattcttttataaagcttatcggcaactacaagacaactgtccggagcagaccagccaggctatacctgctttcattcgcataaaaaccagaaccgactatatgcagccttcccgtaaataacaatataataatcattaccggaacagtttttgattacttcttctattgtccaaactgcaaagcatatgaacccctgccttagatcagcatcatcaaaaccatatatccttttactattttttaccctgctggcgaacacctcttttactcaacaaagcaagtacatacacgccgcatttacaggaacacgctgggaccccagctccatgatgggaggcggattggaaagaacggaaattattctgtatttccggtcggatggcacttatagcactaccctgggtgatggctggcaaactgatatcagcggccattatacgatctccaacggcaccatcaaactcatcgattccaaaaaccaggttgaatctatcccttatgatggaagcggcagtttctggtataatggcaccactatttttcaaaaaaaacctgccagtaagatcccacctggctattacagtttcagctattcttccggaagcggcggcatcggctcaggcaccaatgccccttatgttgggaacagggcccacaaaggaatacagtttaaccccgacggcagtttcagttccggcgcatcaagctccacatatatttccggagggaatgtaagtggccatggcaacaggaaaacagaagccgatggcacttataccatcaaagacggagtgcttacgcttcatttcaagaatggagaaaaaagtgtgaacagttgctttacgtcggatgcggtttcatccatcgttgtcaatggcactacttactatgccgatgaagataaaaaaagcacaacaaaagagccggatacaaaaaccaaacccgccgcatccccggaagatgtacgcagcggactggcttttttgaaaaaagccaatctcgccaacggaggaaaatacctggatgaagtaaagacagtaaaacttgaatcctcactggggaatggagcgttgcagataactaccctgctcgatctgccacaacaaaagatacgctgcgaatacaggaagcagggccaactgatcggcatcgagcagacggaaggcaatgcaggatggaaatggtccaacggtaaattcacaacgctgcctacagacagagtcaaagaattacaaagcgcaaatttctccgggatattcagtttgcaggagccggtgttgaacagcgtatctatcatatcagcacccgggaccagcaataatcaaacaagcatcatcatttccagagagggcaactacacggctatgttatttgataaagaaaaccgcttgacaggaaattccagcaaaataaacaacaggactattacccgttctttttcagatttcagaaaagtgaaacaggttcttttaccttacatagttaaggagatgagagataataaaacatttacttatcaatacagttcaattgaactgaatccttcattaagcgtcaatgattggttgaagccaaaatcttaagagcaatccctgttgaagttgttatattagcttcctgatgccaaaacatcaacatattgccatgtctgaacacaatcatgactgcaacgacacccgcaaaaaaacgcataatagcctcatttttcatattactggaatgaagctcattgtttcaacgatctttctctttttccatttctatgctgatgctgccgatagtatctacatccggataaaccaactcggatacactccttcgtcatcgaaaattgcagtagcaggagtcaaagcaaatacttctatcagcagttttgaactcgtagatgctgccagtcataaaactgtacttaaaaagactaccggtaaaaattttggtcaatacggaccatttaccaatacctaccggctcgatttttccacatatacaaaagaaggaacgtattatatcaaagcaggaaatgcaacttccggcctattcaaaattgcaggcaacgcttatgcgggcacagcagattttgtgctccggtatatgcgccaacaaagaagtggttacaatccctttttaaaagactcttgtcataccaaagacggctatatcgtttacggtccaaatgaaggggcatatatgaatgttaccggtggctggcatgatgcttcggattaccttcaatacagtactacctctgcaaatgcaacctatcacttactggcagcctatcgtgattttcccattgttttcaatgatgcacaccaggcgaacggagacgatggttccaatggcttggctgatgtactggatgaagcccgatgggggctcgactggttgctgaaaatgcatccgcgggaagactacctgttcaaccagattgctgacgaccgtgatcataccggctaccgcctgcctacactggattcagttgattatggttatggaaagggcaatggaagaccggtttattttattaccggcgagccacagggtctcgggaaatataagaaccgggcaaccggcttcgcctccactgccggaaaatttaccagcgcctttgcattgggtgcaacgctgttcagcggaaaggatactgcactggtgcctttattaaaaaagaaagcactgtctgcctatgcattgggcagagccaggccgggagtggcacaaaccgctcctatgcgcgctccttatttttatgaagaagataattgggtggatgatatggaactggcagccatcaatctttatcatatcaatcccgatacaggtctgttgcaacaggcattgcaatatgcggaacaggaaaaatcaaccccctggatgggtgctgatactgcaagacactaccaatggtatccctttcacaattttggccattatgaaattgccaggaacagttctggcagcatgaaacagcagatgatatcctattacaaacagggaattgaaaaggtatgggcgaaagcaaatcataacgcattctatcgcggaatcccctttatctggtgttccaataatttaacgacctccttcgcgatacagtgtattttataccgtcagctcagtggggataatagctatctcgaacttgagcaggcctgtatcgactggctgtttggctgcaatccatggggcacgagtatggtctgcggcttaccggcgcagggcgattctcctgcagatccgcattcctctttgtcggagatctatcattatcccattgatggggggctggtagatggaccggtttatggctccatttacaggaaccttatcggcattcacctgaaagctcctgatgagtatgcagccctccaatctgattttgtagtgtatcatgatgatgccggcgattacagtaccaatgaaccaacgatggacggcacagcttcgctggtatacctgatggcagcacttgaacaacaggctttaccgaaagcagagaaagatagctatggcgctatcaggagagctgatactgcttctaaaaaaatggccatcgttttcaccggtgatgaattcctggaaggtgcagattttatcggcaataccttatcaaagcatcacctgaaaggttctttcttttttaccgggaatgcataccgcaatccatcatttaccaaagccataaaagagttgaatcgtcagggtcattacctgggtgctcattcggataagcacctgctgtatgctgactggaatgatcgcaataaaacactggtcactgaagaagcgttccggcaggatatcgccaataatttcctggcaatgcagaaagttgggatagcaacagataaggctaagcttttcctgccgtcgtatgagtggtacaattccgcgatcactgaatggagcaggaaagctggattaaccctcattaatttcacaccgggtacaaggtcggctgccgactatacttttccggcgatgggtgataagtatctcagctcggaagctattttccagtctatcaccgattatgaacaaaaggatccttccggtctcaatggattcattctgctgatccatgccg

SEQ ID NO: 4320 - DNA, 24035 bp, synthetic construct
  misc_feature 1..24035: note = Synthetic
  source 1..24035: mol_type = other DNA
cacccaactacttgatcatgtcagcgcccgaggtgagcgcggcatactgatctcacaacatccgcaatactatatcggcttcaacctgaataaacggttcctgttcgacagcattatccggcggccggtccgtcataccatagacgcttcaaaaagaacagcaacaattgaccttccggtgctcgaaccaggcataagcttattgctctcccaacccgttgccacataccggatcatcatggtgcttggattggcagccgaccagctatttcatacagaggcaagagaccgttggttttggggcgaacgggttgttgtcaccacggatccgcttctttccgggcaggtctatcctgcacagcagtttgagctggcattgccgctgccggaaaaaggaccgaaggatgggacattgagctatgtgctttcaataggtatagagattgagatcgctgacatgaaaaaacgtaaaatggtgaagacgggatcttcgaagattttggatattgtagctgccgtggtgtgaggtggtcgtatgctattgacaaatctctggttaaataattaagttatcccccggcttgggaaacttatccgcctttcgtttaagagttaggaataagtttttaagcattgatatgtgaccatcgtgtgtgatcgacaggaagcaaatgtgtgaagagtgtccagggaaaaggaagtataatggcctttgttctgtaattatatttacttataattatggtcaggatttacccttttcatacaagtcaaaacaaacagtttaatgacactaagaatactttttatcgtacttacggtattcacattaacaaaggctattggacaagagaagatctggacaaagcagaccaaaatttccgaagtaattgcttttgaaaaagaaaatgatccccgcgcgaaatttctgtcaaaaagtgtttcactttctaaagattattatcctttggcagataaatacccggtggcaaatcctataatcgtacaaagagaaccgctggtttaccttccggtttacgcagaatatttttatacgcctggagattccattttgcggcttgcatcatatgactgggaaaaagggcgctacgacaatttctttgagaaacaaaaaatgtgggaggaagagagtaaaaaatttgacacttacaacagcgagtacgaaagaataagaaaggttctcttgttgcagttgggaaaacctgtttccacagacactgcagctaaatcagaaagttcaagccgtggagattattttaccagaagcaccgtttggaaaacggaagaaatccatgccaaactggatatgacttttgagtctatgacatacagggtaaggtttactttgtattggaaaaaataatttcgtgcgaactcgcgtaacctgtatggaatatagaatttgtatcaggcagccgttattaacacaaacaataaactaacacaaaatgtaatggggatctttgatttcttattcggcaaacagataaaaatagaaaatgaattctttggatcaatgcttttccttggagataaaaaagagccggctaaaagttattttgaatgcagaagagatttcaatccttccgggaaaatcatagagatcggaattcacggggatatctcaggacctacagagaaacaagtgatgtttttcaggtcaattgaagacagctatcccagcattgtgaaatccattactcctttaattgaagatgaatttggaaattggaaggagggctttaaaatacaggattttcttaaggaattcgagcctgtttacctacgactcccgaggtgtgaaaacaaaccttttgtttgggaaatatcgtttgaatccgagcatgatagaaatcacacgtttactttaactatgagcgattttgaagcaaaggaaatattaattgatggatagagttaccatgaaaggaccgaaataatgaaaatatacctatcacccaatacagtcggaaggcatggtggaagcctgagtgggaatctgcggcacatggaccggcatatacaaaatgaattgggcaattcagcgttcagatcgtcatttgatgaactttggctaacaatttcctatccacctatgtatgttttacccggtattgccggcatggaagtcgcatttatgaagaattacgacaccctgccctattgcaggttaaatagaagatataaaaagattgagatggtgcttaaagcaccggaattttcagcgcattttgataaaaaagaacaaaaagcgtataaacataaatttgagattgaacctcaattccggaatattaccgaaactgagcttggccggattttaatcgacaaatacctggaggccggagaaatcatatactctaaattaaaaaaggaggatacgtttgactacgagattttcacaaacaccctattggcaataaaggatgaaattacaccagactttttacagcagctgaacaaggttcaggaagtggaagctgaagacgaagaacttgacagagcaaagaaattaagaagcgaaagactttcggttgataagccgaaagataaacgcatcagggatttaagggtttattataatgggctacccaggagggcactctatccgtatgactatgtttatacagaaatatttctgaatttattggcaagggaaggattgatgtgtccaacatatcatcatttgtatattcaggtggcgaaaacaactgacgaagcgctaagacattctttttcctttgacgattggtatgttaatggaatctccattgtcgactttgataaataccaaacgctatcggaaaaagagaaggaccgggcggcatttgaagttatcctggcgggacttaaagatatagcaactcttgataaactcgatatgaaaatgattgacagagttgcaaaacaaatcatgactgacggtgtggataccgaattgctctacaaaacaatcgaaaatgatgatcataaattaaccataacttatctttccagaagcatggaagaagagtgccctatatttttcaaccttactgacaaggctaaaaatatcacaaaaagacaccagattgggaaagcagataatctacagtttcgtttgtggttgcaaaaaataaccttgaacaaaaaaaagatcaaagtcaagtcaagcgactcaatccgcggccaggtttggctgaaaggcaagcctaccacactcgagtttgaaatttcggaattgatgaaatgaggagaaattagtatagtaaaaaatgaaacagtactcgtgtacctgtctcactcatccgcgaaggtcgcgcactctttattgacgataatttattatgataaaatccgacagctcaattcacaatatttgcattgcttccattaaaagaagtacaatgaagccgtatgactttaaatggacaaggttttatgaatccaatgcagactttgcttacgctggtctgcaacttaacctggcggaaaatgaacttattatctgctcaacaattattgacgaaaacaatttcagcattctgacgacaaggcgattattgacaaatgaggagggacaattaagtagcaaaggcattcaaaatgcaaccgataagttatatggcgattttaaagggtatagagataaggcgtttacatttgggcaaattcatttggaggacggggctgaattgagatatttcatcgaaaccggtaatgcttctatggttatgatacacggagtgaggacagtaatccgaacaactcaaatgacaactgagcaaattgaaaaagtgacaagaatctggaacaagcaaaacgcacggacggagaatcaataatgactgccagcatgaacagggcgtggcgatgcaggcataatgaacaactaaatgaaaacgattacagacgatatcttttccggcgatttaaattctgccaggcaatggctggtaaacggtgcagaaattaactcaaggcatggagtggccgggatttatcctattcagtcggccattaatagcagtaaaccggaagtgctgcaatttgttatcagcaatggagcggatgttaatatcgaaaacggactccctctacttgaagcgatagatctggcaatagatggaattatccaaaacggtttgacatggccggataacacagatttggagatgatcaggattttattggagaatggcgccgatccggagataatcaacagtgaaggtgcaagaccaattgatattatttaccgttatgccggccaatcagtgcattcgatggaaaaattgatatcttttttccgaccattattgccaaacagtgacaccctgctaaaagactgaattttgtgaagtaaaggaggcaaaccagataactgctgcaccgacaacaactaattttatccagacttattttgttaggggttttgatcttgttatcgggagtgggagggtattcacaggatgcgaaccacagtttctggatggttttcctgaaactcatgatgatcctcaaagcgaaaacttcaatctcatctttacatatttttttctttatcaattatctccggatgatgcgtcagctcatacacccgttctttttccagaattctgaaccatagggccgcggggaaattcttatttgaatgtatatccagccggtagatcagtttatcggttgcgataatgtagatttttttcttgcgcttattgagtttgtaaatgaccgcataaggaaaatcgtcaacccgggcttcgcgataaattttatttgcacggctaccataggcttccggacgttccaggatctcaccgatctttttccttactgacctaagaaatctatcacctagtcctttttgtttttcttcataccatcgatacccttcgtcataatcctgcctgatcaacggatgcaggtcatagctaaagctcatgatcttttttgtttccttgttttgtatgcgtcccgggctccctgttccagttcatctagcgtcaggccttttaccttgccgctttcaagttcttcggttctcctgtcaagttctttcagaaaactcttatcttcccaccaggcgtattcgtctttggcaaagctttttaccacacccaagacagcctttttctgatctgcattcaggtattccaaataatgatttatctctttatctattgcttttacaagtcccatacagatgtttctttaggtttaaataatttaatgcttactgaaaccttgatgtttcaatttactgattttttatttcactcaaaggcacaacaaatgcgtcgaaagacctgacacgaatcagatcatgctttcaatccatagccaaaatgctattgaacatgatatactttcttgtctctattcccggatcggggtccgggacaagtgtttcaaatactccctcatccaaaacgctgaaatattcataaccggagcctgccccggaccatgacccggggaaatgatcaggtgatccagcagtttgatgttcaggaaccggctggcttccacgagcttttccgttgccgtcttgtccgcacgggatggttttaggctgccggagggatggttatggatcaccacgatggaggcggcccttctcagcagggcgcggtgatacacttccatgggatctatcagaacagtgcgctgggtacccaggccgagcagctccagcttgcggactgtctgagaaccgtcaagtgtcatcatccagaggtgttcgcggtcgcggtccagtttggagtaacggcggaagatgggttggaggatcgagtagatatcggaagaggattggatgtggattttttgatggggtttgagacggatagttattagaagagtcaaaaagtcattgaaaagaaatcatgtataaaataaagctgttataaacatttgatggcgatatctggcatattagtaataaaccattctggaataaaattccgttcaattgactccataactttagctttttgcagcaatgcaattgataccggtgaaggttgtgaggtgtcaatgatctgtacttcatcaaaccaggaaaaatgtttgttcaatttttccatgttaccgtaataattccctgccagtgtcatcggatcaacataatgtcctccggcatttgcccgctcaatgacccgcgcctcagaaagttccaaacttgaaagcccaagaaaaatcaggttgattatatatccctgatccttgaaccgcctgggtatgctccaggttgcttcattggtgaaatgccttcataaagaaaatccctgttctctgccaatgcttcttccacgagccgatcgaatgtttcgttgacgaagccactggcaagatttcttgcttctttaaaagacctgatacctgatctgatcaattcacttcgtttgtcgaggaacagtttatcaccatcgaagacaggtgcatgctgaaacacttcgggcaggaaaaaccgtccgatagaagacttacctgctccatttgagcctgtaataatgtacaaagaaggcatacaaatctcagttcagtttgaactttttgcggacggcagcggcctcatcaacgctgagatcacggacgatagagaattcccgggagccggacttcacttcagccagctggatcagaccggaggcaaattcaagatagacaaattgcgtaggcaattcattgctatagatcataaaaggctgaccagtcctgaatttttgctggcgcaaaaaccggacggcgaggctgcctctttgtgatatttgctggagttttgtcacctttcaaaagtacgaaattaaggcgggataaccgaagttatccctgcctattcaatccatagcgagaatgctattgaacatgatgaactttctcgtttccagcgtttcaaacacaccttcatccagaaagctgaaatattcatcttccgaaatgatcaggtgatccagcagcttgatgttcaggaaccggctggcttccacgagcttttccgttgccgtcttgtccgcacgggatggttttagactgccggagggatggttatggatcacgactatggaggcggcccttctcagtagagcgcggtgatacacttccatgggatcaatcaggacggtgcgttgggtgcccaggccaagcagctccagcttgcgaactgtttgggagccgtcaagtgtcatcatccagaggtgttcgcggtcgcgatccagtttggagtagtggcggaagatgggttggaggatcgagtagatatcggaagaggattggatgtggattttttgatggggtttgagacggatgttcatataataaggtttaaaaggtttaaatatggtttagaaatcgttgaataaccatcatgatactatgactcttaacttcagcatagctgctgcaatggtatttaactgcttctgcttactaagataataaatagtcgttaaacgataataataaatcttaaaacgactataaatttatttatatctaaatagctataactttcaaaatcaatcgatcaagtgccgcaaaaaaatataaacaggattcgtgttgttcttgccgagcaaagcagaacaaataaatggctggctgaacagttaggcgttagtgaagtaactgtttccaggtgggtcaataatacacaacaaccaagtgtggaagtatttgtggaaatagcaaaagtgctgaaggttgatataaaagatttatttgaatctacgattaataagaaataatgaatcttataacgtgttcgggtaggtaagtaacttttctgagctattcacatttaattcaggagaccaagttcgggctgttgatgatttggaagaagaacagaggtgaccaagcggaatagttttgtgatgatttgccttcggtttagcagcgatcatagaaaagctgcttatatacagctgatgttttgttttttagggaagctgaacaagtaagtataaatttgtgacaagtgtatttctaaacgtagaagggtactttatatgaatactttaaaaatcaaaaaacttggtccaatctctgaagccaatattgagttcggagatctaacccttttggtcggtccgcaagccagcggaaagagcatccttttgcagctcttaaaactaataatagacaaaagacatattcgcaagaccctaaagcaatatggattcatttggggaagtgatgaaagcttgattttggatagatattttggcgaaggaatgtctggtatatggcggtctccaacaaagatagaattagatggtaggtcatattctcttgattttttgctgccaaaacagaaggaatctatttctgatgcagaggagagccttttctatattcctgcacagaggatcgtttgcttacagaatggctggccccgttttttcactgactatgaggattcggttccatatgtattacggcattttagtgaaacgttgcgtcaactactagaacgaaattccaggcaatttgaagaaggggtcttccctcaggcgcaaagacttaaggaacctcttcgcgattttttcaacgagaatatttttcatgatggcaagattatcattgaccagacaggaaaaaaacggtttaaactcaatgtcggtaagtcaagtattcccttcatggcgtggagtgcagggcagaaagaattcatgcctcttttgttaagtttttactggctttgtccctcgtcaagatccagcacacgagatgatataaagtacgtgatcatagaagagccggaaatgggattgcatcctcaggctattaaatcagtattactacaggtacttgacctgatgaataggggatataaagtcattatttctacgcactcacctgtgttgcttgaatttgcatgggcatttaaacgacttcaggagtctaaggcagactaccggatgcttgcggagctgtttgatattataaaccttccgccatccttaaaaagtatgctgacaaacgacatgtctaaaagcattaaaacttattattttaaccggtctgccagatcagttactgtgaaggacatctccagccttgatgccggaagtaatgataaatctatcgcggaatggggagggctttcatcttttagcacgaaagcgtcggacattatcttaaaactggctgcaaatgaagagtaagaagaaagccttggctggaaaagaaaacagttttgaaaaggcggttaatgcgacaaaacaaatcagcgggtcatatcagaaagggcttcaggctttaggccaatatgctaacaaaataactttaggagataccaggcaatgccaaggaagcgtagatattgattcggcggttgaacgtttacacagcggtgaaaacaggtgggattattgtttttgttataaaaacgaggctctttttgtagaagttcatcctgcaaatacgagcgacgtcagcgtcgtgctcaataaattgacctggctggtaaactggttgaatgaagaggcgccggaaattaacaagttgaaggcaaaatctatgcatccgttttactggatacagacaaagggcttccatattccacctacttccagacagttcagacaagttgttgaaaaggggttgaagccaattaatttattgaaaataaaatagttgtaaggatttgcttttttgaatgaagatttctctaacttagatacgaaagcttatcacaataaggctataagccgaagataattctttagccctgcgtactccgtggggcttttatatatcaaaaaataaatatttttgatattgaccaactactatgatatttacatggtcttagtagttggtcagttgtgatttgctttcaaccccacactattattatcaaatatactggaccttgtagattcgaatactgcgaagctgttggacagcaatccaacggggataagtaagttcaatctacagggttttggtatatttaagctcttcctcacgcgctttaagtataaacctatccaccatgagcaaaatcctcggactcgacctcggaaccaactctataggctgggccatccgcgacacctccgaacccggcaaccagatcattgacaaaggcgtactcactttcgaaaaaggcgtcggtgaagaaaaaggcgtcgaattcccccttgtaaaaaaaagaacagaaagccgcagcaaacgccgccattaccaggcagaaaaataccggaaatggacactcttgcaaacactgatcgaaaacggcatgtgtccgctgacaatagaagagctggaccaatggcgcaaatacactaaaggtcatgggcgtaagtatccgcaatcaccagcattcattaactggctccggttcgactttgatggggatggtaaaccggattttgagagattaggctttagcaaacatgaaaaccactacctgttcaggatgcttgccgtaagcgccgatcctgatcacaaggatatttttaaaaataaccagcatctgctgggacgggtattttatcacctggtacaaagaaggggtttcaggggccgggatgatgaagaagcccgtacaatccttcagggtagtaaagatggcaaagtggccggtgcggaagttatctctccattgatcagccaatacaaaacgctgggcgcagctttgtatcatttgcataaggataagagcgaacggattcggaagcgatataacctgcgtacagattatgcccacgaattacagcagatctgccaggcacagaacgtcgcggagccggtttataaaaggcttgaaaaatctatcgtatggcagcggccactcagaagtcaaaaggggcttgttggtatttgcacatttgagcaaaataaaccgagatgcccggtaagccacccattttatgaggaatacagggtatggataaatataaacaacctcaaaattcaattgcctgatggaatagataaacatacatatatacaggagaagatctatcctcttttttatcggaaggacagggattttaagctgaccgttatcctgaaagaacttcgtaaagttggtggtagcctcggttccaggtttaaagacgatactaagatcccatctgcaaccttgctaaatacgtttaaagaattcctgggggataactggaaagatcagtatggatgggatttagctttagagaaccagtccaagacagccccgtattcatttgaggatatatggcatgtgctcttcacatttgatgacagggaaaagttagcccagtttgcaaaagaaaaattgggtctggatgaagaaaaggcagagaaatttgcaaagatcaagctgcagcaaggatatgccacattaagtatttctgcgatcaggaaaatattgccttttctaaaagggggttatttatacagccatgcaatttatctggcaaacctgcacaaggttttgggaaaaaacactctttcgttttcagattcgcaaatgttttccaccgctctcaaagatattatcgatcagcataggtctgagcaatcatgggtagccgtcataaatggattgatcagtgatcagttgaacggagatacccggttcggaatggatccggcatatcaacttgacaaagatgatatgaatgacattcaaaagaaattggaggaagaattaggggaatactcctggaaaagaaagtcggaagaagaaaaaaatacagccattaattttattgctgaaaaatacctatcatttctcaggagaccagttcaatactcaaaagagccggtatatactaggctgccccgtctgcatgatcgcatactaagctatttgcgcgagacatatgatattccggttaaaaacgaaaaatacctctggcatccttccgaacaggaaagctatccggcagctaaatatgagaatgggataccggtcctgggagatcctatgccgatcagtcgtggatttaagaatccaatggcattgaaaacacttcatcaacttaaaaagttattaaatcatttgcttaaagccgggaaaatagatgaagacacgcgagttgttgtcgaaattgccagggaactaaacgatgccaataaaagaaaagctattgaaagatggcaacgggatagagaaaaggagaatgatgaatatcgtaaacggatagaagaagatccggaactaaaaggattgcttttagatgtaaaaaataaggacgttattgacaaatacaggctctggatagagcaaaataaaacttgcctatataccggtaatattattaacctgtatgacctttttacgggcaagttcgattttgaacacacaattcccgccagcatcagtttcgacaatgagttgaaaaatctgacaatcgcagacggtacatacaataagcaaataaagaagaagctttttccgacacaattaccaaattatgacaaggaggctacagttgatggaatagtttattcagcaattaaacccagattggagtttattgtaaagaaagtggaagaacttgaagctttgcaggaagagtggacaaataagacaagatttgcttctacaaaagagataaaggatgcttgcatccaacgccggcatatcatcagttttgatctgggttattggagacaaaaattaaactcgttcacattgactgaatataaggcaggatggaaaaacagtcagttacgggatactcaaataattacgaaatatgctttaccttatcttaaaaccgtattcaggaaagttgaggttgagaaaggaagcgtggtaagtgatttccggaagatctatagtattcagcccaaagcggaaaaaaaagcgcggacgcgccatagtcatcatgcaattgatgctgctgttttaacattgattcctcctgccgctatcagggacaggatcctggcaaagtttaacgagctgaaagatcaaaatataaaccttatttaccatgaacctgtaacaaattggaaagattttaccgcagctcatattctatcgatcgaagaaggggttctcaataattttcaacctcagcaacgtacgttgacacaaacgtataagaacgtgaggaagcgtggagctaaacagtttgtaaaagagaagttagccgatggaaaatggcaatataaactggatgggaaaggacagcgaattccattggttgccaaaggcgataatatacgcgggcagcttcataaagaaagtttcttcggggcgatcaaattggatggagagaagtggctggttgaaagataccctgtttccagtttcacgactataaaagattgccgccacatagtggatccgaaagtgagagagatagtgcaggaagcgcttgaaaagcggatgtcggaaggaatgccttttgacaaggcaaaactagaccccataccttttccaggagggaaagaggttatctggaaagttagatgtaaagtagcagctggggttgggtatctcactcccaagaaggcccttgagattaaccggcatgactttttatcaaagcatgattataagcactctgtttacgcccagaacgaagaaaataccttgtgtttgttttatgaaggagtggttaatggaaaggacgaaagggcgttcaaggtggtcggcttatttgagcttgctcaattaaaacttaagaagatagatcatataaagtctgaaaagtattatcagactgttgaggcagggagaggaaagaataaggcggaaataccattatcatatataattactgtaggaattaaagtgattccttttaaaaatagtaaagacgaacttaaggatctatcggaaaaagaattgctaagaagaatatacagggtttataaatttaacgaaccggctccatcaactgtatacatctatatgcagaatcacctggaggctcgaccaaatgatgaattaggtaatggagagaaggatctgaatttggaaaggtatcagccaagagtgtttctgaatgcagcaaaatttacctgtgcaattgaaggacgagatttttctattgatctggatggaacaatacggtggttgttctgaccttttgggaatgcttattttagcgggtgtgatatactaaataaaataccgggttcgttttcattatccaaaccaattcctatgataaagcggaccctgtattttggcaatccggcttatctgaaaactgtcaatgaacaactcgtcattgagaccgtcctacccgttcccctgatttctgaaggaggagataaagaagtaaagaccattgccaaaacaattcccatcgaagatattggactgttaatccttgataacaggcagatcactattacgcaagcgttgctcgccaaactactggctaataataccgctgtagttagttgcgatgatactcatcatcctactggtatgttgttcaacctggatggtaactctttgcaaagtcagaaatttcaggcgcagttaaatgcaactgccccgttaaagaaacagttatggcagcaaactgtaattgcgaagatccagaatcaggcagctgtactcgcgatacgacgcgaagagaataagatgttactgaacctcgctaatgatgtaagaagcggggatagtgaaaactgtgaagcccaggctgctgcttattactggaagcggatcttccctgatacattacagttcagaagagagcgatatggccctccgcctaataatcttcttaattacgggtatgctattctaagagctatagttgcacgaagccttgtgtcgagcggtatgctgccgacactggggatccatcaccgtaatcaatacaatgcctattgtcttgcggatgatatcatggagccatacaggccgtatgttgacctggtggtgtatcagatcgtccggaacaacgggcaatacctggagatgagcccatccatgaaaaaatctctgctggaagtgccggcgatggatgtgatcatcgatggcaagaaaagcccgctgatgaatgccgtacagcggacaaccgccagcctggccaaatgcttcgaaggcgccagcaggaagatcctgtatcctgtgctcagttaagagccgccagattccttttaatcaccactatgtttgaacgccttaatgcttaccggatcatgtgggtgcttgtattttttgaccttccgactgaaactaaaaaggacaggaagatctatgcccggttccggaaagatattatggcagatgggttccagatgttccagttcagcatttacctgcggcattgcgccagccgggagaacgcagaggtgcatatccagcgggtgaagaagattttgcctccgaagggaaatgtcgggatgatgtgcattacggacaagcagttcgggatgatggagatcttcagcggtcgggatccggtggaatcgccggagacggtgcagcagctggagcttttttgaggcaagacggctttaaaaacagggattttacaaacaaaaaagtggaagagaataccgcttttttgtttgtaaaacctgactcaaaatgcttgaaatcagcgggttttgaggttcctgttgtctaagaactaagctacagattaaattgaaagcaaatcacaacacaatggccacacgcctaaacaggaattccgttgtctaagaactaagctacagattaaattgaaagcaaatcacaacgttcggggatatctacgcaacaaacgatatgttgtctaagaactaagctacagattaaattgaaagcaaatcacaaccgcgctatgggctatcgggaatagtatattgttgtctaagaactaagctacagattaaattgaaagcaaatcacaactttcctttcattcagttttgaagaatgatggttgtctaagaactaagctacagattaaattgaaagcaaatcacaacattagaattttttacaacaaagtggccgagttgtctaagaactaagctacagattaaattgaaagcaaatcacaacggctttagatgtggctcacatgaaagcagggttgtctaagaactaagctacagattaaattgaaagcaaatcacaaccaccggtgtgaagtatgacgagccagcgccgttgtctaagaactaagctacagattaaattgaaagcaaatcacaactcaccagctggaatgcttttacttttgcaggttgtctaagaactaagctacagattaaattgaaagcaaatcacaacttaaagaagtggcggtttacgtccgccaacgttgtctaagaactaagctacagattaaattgaaagcaaatcacaactgctccggacaagctgcagattgtaagcacgttgtctaagaactaagctacagattaaattgaaagcaaatcacaactttataatgattgattcaatatttccaaaagttgtctaagaactaagctacagattaaattgaaagcaaatcacaacttgcgtggaaagtaccatcgatgtaaaggtgttgtctaagaactaagctacagattaaattgaaagcaaatcacaactttgatgacagggtagttgctttcgttgaggttgtctaagaactaagctacagattaaattgaaagcaaatcacaactacatcggccatcacaagcgtgttggttgcgttgtctaagaactaagctacagattaaattgaaagcaaatcacaactgtccctgtcgagcttcgccgtggtgactagttgtctaagaactaagctacagattaaattgaaagcaaatcacaactccttcactctttggcctttatttttaccagttgtctaagaactaagctacagattaaattgaaagcaaatcacaaccaatattgtaaagaactggccggaagataagttgtctaagaactaagctacagattaaattgaaagcaaatcacaacccctcgactttgaatgtcgtgccgtcgatggttgtctaagaactaagctacagattaaattgaaagcaaatcacaactaggaaaattgttatgcttctgtttcttcggttgtctaagaactaagctacagattaaattgaaagcaaatcacaacaacgttgtgtgacataccgaagtatagaagttgtctaagaactaagctacagattaaattgaaagcaaatcacaacccccgaagtttcggccaatgtttccatggagttgtctaagaactaagctacagattaaattgaaagcaaatcacaaccaaaggtcagcggtcatcatgcgtaagcgagttgtctaagaactaagctacagattaaattgaaagcaaatcacaaccgatatcgatgcgatcgaccggtcacgctgttgtctaagaactaagctacagattaaatcgaaagcaaatcacaaccgcgacacatgcggaccggctgaaaaagatgttgtctaagagctaagctacagattaaattgaaagcaaatcacaactacatttcaaagcggagttaaatataaagtcaaagaacgtagagccgaatcgacaccgagtcggccttacctttttcaaaaggaaaaatactattatttagatccttttttaaacctgctgttttttgacctcttcttcagtggcagcttcttcacaggatgctcttctgcatattttcgccatgttgcgaaaatctccttctcttcttgtgttagataatcccgcaaaagcgtccgttttcttaacataaatgaaccggtttgtaaattgagatctgccgagctcgttgccatcataattggacagccgaattttgaagcatggtaaggatataaagatattgatgggttacttttgcaatctgcaaaaaaggtgaaataaagcgtgccatttagtgaatcaacctgctccaaatatcgctgatagctgatatcatcgattgtggtatccgtaagctgacgagcttgacgagggccatattttacgtcctcatgcctgatattaaaagggtaccccgttgtaagcctgaatgtatcgtacagaaaatgcgatcccatgagccttgcagtatcagacatatttgagtattcataaagcgaacttgtacggaagtcaataaaaacaaccctatcaacccgcacaaacctcgtagttacataattgacgttccgggtcacagacgtgctaatctcttgtataagcatgctgtctatctgccatgaatgctctatattataaaatacagtatctctgccatgatttaaatattctccggcttcagttacaaattttgcagaaaatctggcttgtgaaattgctgtgacacaaaggaaacagaaaacgcaaatacaaaccagtttttttgaatacctaaaaacagcagtcattacggaaataatattgaatatgtaaatttaccttcttcttcaatagggcgatctggcaaacctagcacaactttgaaaccttgaaccaaaatctcagcaccttgtccgttgtttgttaactcccagctgacctgatatactttccatgcaaaattactaaatacagtagtcggcccctcggtcgatatatgttgaattgaagtgaaatgtccaccatttggtaatgatgctttttttatcgctttaaatttatcggttgaatataccttccaatcaacaagaacagaatctgtataaactaaccatgtatgatttgtgctaacttgaacttccggatcagggtcaggtccaccacccccgccatcacctggaggtagcccttcgttgcacactcctgatggctgacatagtggatcaaagcatgttgtacctaaatacgtttcagtggtatatgtggagccgtcgctataaaactcagtaataaccaggtaccaatccgtgcaagttgactgaacagcaacttctggcgtcccattacgattctgaccgctccttgcttctgcgtacctaacctgccttcctccttcgaatgtcttttcgtataaaagattatcaaagatggttaataaagtaaaacttccattcactttaacatcgttgcaatcccacacattaccaatagttccagcgggtaagatagtatgggctgaaccagcagaattgaactgcatgacattacctttgtaaactcctttgctgttttcaaataagagcagatactgatcgacatctttatcctggttgtgattcattttgaacgacgatttcagggggataatgtaaagtgattcgccgttttctaatttttcaacagtggatttttcggggatgagattctccttaatggcattaattctctggatgcgcgccggtcccgacttagttgctttattatctagccaacttattgcattttctttggccttggcttctacattcccttctggcgatagatcatttttggtgcacgaaaaaataaaagagattgaaaaaataataaggatgcgcgtgaagatgcgcccgcgcaagagcgatgaaattatcatagatttaggttttggtgacttggtttaatccaatcggatttataaatcacatgaaaaaatcgttagcagcaaaaaaacatttgatgcgtaagtgttaacctttaatatcataatttgatcgtttattataggtagaagactagggtttaagtagcggaacttgccagtcaaagcattacagtagttcgatgaagatgggctgggctttgttattctaacactggaactgcataatgcccgcgtgcgaacaagcttattttgggagttaatagggtgaaggtttcgagcgccatgccatccattgggcgtattgattatgagcaggccgttcctgataagtaacaatatttcggactgggagggaactttgttggaatatgcacaactctacctcttcctcctaaaaaattccttcatcaacgccccacattcttctctcagcacaccgcgggtcagttccgtcttgggatgaaaggcccagtttgttcctgcggttttccggtatccgtttttttcgtcttcggcgccgtataccacgcggccgatcttgctccagtagagggcgccggcgcacatgaagcacggttcgacggtcacgtagagaattgcgtcagggagatacttgctaccgagggcattaaatgccgatgtaagggcaatcatttctgcatgtgcagtggggtcgttcagccgctcggtcatgttatagccgcgggcgatcactttttcattcattaccaccaccgcgccaacgggcacttcatcttcgtcgaaggctcttcttgcctcctttaaagccaatgtcatgtaatattcgtcggtcatagcgcggtgaaaatacaaacaatccgcaattgcacggccgatcggggaaaggacaggcggcgtttgattatttcgatcataaggatttgtgatcgcgtgatatggcatgatattttgacatgagtaggtattcgttcatttcaaaaaacaccggtatgaataagatattagttggttttacagcgggactggttgttggtctgctgtttgcgcctgcaaaaggctcagaaacacgtgagacaattgcgcgtcgcggtaatgatattaagaataaattcaacgacctggttgactctataacagacaaattcgattctctgacagctgatgctgaagagatggttgatgaaggtgttcgccaggcaagaagttatcagaacgaagtcagttgatccgtaccagaaaactcaaacggcaaaaagggcagatgatcagactcatttgccctttgttattttacctatgataggaagttcttttagattgttcgatggtggatgttcgatggtcgatgatcgggcttcgcggggagatgagttaatttacgtgtaaccctcctggttagatatacttgctgtagttaaggaattgttgatgtaccggaatccgaccatcgacggccgaccatcgaccatctaacatcgatcatctaccatcctcctgcgctaccgcttcggcggacacagtcgaacatcccccaaaaagcgagagcccgtgaagactcacgggcaagaagcttgttgccttacagggcaacgactcaaaccgaaaaaacacaatgtatagttcttttagagaaggaggatcagtaagagaatgatgatgatgatcgctccgaaggaaaggtagatccctttgatctctttcgcttcttttctcatttcgcgtaattcttttttaagcgcttttttctcttcgcgcgtcagcgtcgatttgtccatcgctttgatctcttcaacacggagacggatctcgtctgcccgggccgctttctgctcttcggtcattgctgcgatgcgttcctttacgggacgtttgtcttcgatacctgctgcgaatgtgttgctgatacttgcagttaataagatgcaagtgaggatgatgctgatcttggttttcatgtcagtcgtttgatgaataattgggatacaaaaatatgtccagttttaaatgtacacccaaatgggttattttgttgaattaaaaacaaacgggtggggtggattttctacaaaattgcggatgattgtggtttgtgttgttgaaacggtttgagtaaattggggtgggaggaggttggggaagtttggaaggtttgggaggtttgagaggtttgattagttccagaagttccagaggtttcaaaagttccagaggttgtcgtaatcgaattgaacagtgtataagtcagtggagtatagaaaataaatattaggtttaaatcaagatagaattctataaaccgatcaggctgcataggtttacggaatttcgaaacgttttgaacgtttcagacctcttagcctctcaaacctcctaaacctcccaaacatcttagccatgcctgccagctatacaactcaattgcaatcactacggaagtattttaacgaaggaaatacgcgaagttattcgttcaggaaaaatcagcttcgggcactgaaggatgcgatcattcgtcatgagcaggcattgtatgatgcactttataaagacctgcataaaagccgtgaagaggcctgggtgacggagttgggaattgttgtatcggaaattggtcttgcactgaagaagctgaggaagtggatgaaaccgcaacgggtgaggacgaatctgcttaatattccttcttcgagcaggatcattcatgagcctttgggcgtagtgctgatcattgcaccgtggaattatccgttccagcttttattgaatccgatgatcggggcgatcgctgcagggaactgcatggtggtgaaaccaagtgagtttgccacctcaaccgatgaggtgatcggtcggatccttaaagaggtgtttccgccggaatatgtgctgtatgtccagggcgatggcgcggaagtggtgcctgggctgatgaatgaattccgtttcgatcatgtattctataccggtagtaccagtgttggtaaggccgtatataaaatggcagcagaacagcttgtacctgtgacgctcgagctgggcggtaaaagcccttgtgttgttgcaaaagatgcgaacatagaagtggcggcaagacggatcgcgttgagtaagttttcaaatgccgggcaaatgtgcatcgcgcccgattatgtattggtgcatcagtccgtaaaggatgcattgattgctgaattcaggaaagcgatcattcatttttttggtaatgatccattgcaaagtgatgaatatggacggatcattaatcagaaacaatttgaccggttggccggttatctgaataatggttcagttgcttttggcggaagcgtggaccgcgaggcactttatatctctccgactattttgcaggatgttgacttaagatccaacgtaatggaggaagagatctttggtccgataatgcccgtgatttctttttcatccgatgaagaagtgaaagagatcatttcacaacatccggatccgctggcattttatctttttacaaagagcaaagaagaggaagataaatggcttggatcggtggcttttggtggaggttgtgtcaataatacggcgttgcattttacaaataaccgactgccttttggcgggcggggaaacagcggactgggccggtatcatgggaagtattcgtttgatacattcactcatcagaagtcgatactgaaaacaccaaactggcctgatccggcaataaaatacccaccgtttaaagggaaattaaatctgtttaaaaagatcattaaataaatggccatacaaaagaaaagaagcaggctgaaaaggttcctggtatttatagccttaattttgctgttgtttgtggtctatgttgaaataatgaatacgaatacaaagaacatgacataccggcaaaaggtgctgaatgcattttatcccgttctgatgtttttcagcaaggcgaccggcaaaaatggaaagtctatgagcaacacaaatggcattactccacctgcatctatttatgatctttcgatcacgctgaataatggaacgcaggtgccgttgtcaacatataaaggaaaaaagatcctgttggtgaatacggcaagtgattgcgggtacactcctcaatatgaagatcttcaaaaattatatagtacttaccaggataaactggtgatcatcggatttcctgcgaacgattttaaagagcaggagaaaggttctgatgaacagatcgctgcattctgcaaactcaactttggtgttacatttcctctggcaaaaaagagtacggttgtcaggggagccgaacaaaaccctgtcttcaactggctgagtgacccggcaaagaatggctggaatgatcagcagccgacctggaatttttcaaaatatcttgttgatgaaaagggcatactgatcaagtattttgatccgggagtttctccgtccaatccggatgtgaagcaggccatagaaatggaataatctttttttgaacagaccgtgtaaggttttgcggtgtttactgtgagatcttacactgttatttttttacctaatcccaggagttatgaattggatcatgttaattattgccggtctttttgaagttggctttgcaacctgtcttg

SEQ ID NO: 4321 - DNA, 20174 bp, synthetic construct
  source 1..20174: mol_type = other DNA
  misc_feature 1..20174: note = Synthetic
ttacaaccaccagttataagcaatgagcatgacaacactactatactaataattatttggtaacttttcataatttatttttatatcattattgtgcaataaactttcaaaaagaaaaatgtactccaacattatataccttccatataggataactcagatcattggctgattcaggatcaaaatattttataggtaaatgatcaaaagtcaggatattgaatccgctcacataaattcgaatctgagatgcgctgatctttcgggataatcttcgaggaaaagtataaccaatttcgacattctttaaacgaatataattgtcattaacaatccaaaaatcactaggtaattgattagaattccctcccggaactaatctgggataagttatttttccatgattctcatatttctgctctgtccatgcctgcaaatgccagtccgtaaaattaccttctgtttcccatacgcctctgtcattaagataaatactcatatcagcggctccctgaatgaggaaactgagatcaaattgcttgtaatttaaatcagccgaacccccaaaagtccactcagggacgttaggatagcctattggagcctgatctttcacatctattttcccgtctccattcaagtccagatattttatatcacccggttgagggggggcacctaaagaagtttggtcggcccatttattgatctccgcccgcgaattaaaaaagccggcagtcctatacccccacatttgcccaagaggatatccagtttgcctatagggataggtatagcctttcggtaatttcacttcacttacatagacaactttattcctattgtaagctccatttactttcacgcgcaataatagcttatttccaatcctcgtgtggaagcccaattccatttcaaatcctttattccatactttcccattattgataggtgggagattagtttgcccaaacatattttcaggtataagtccattattaataagcaaaatattattcctaatttcatagaatatgtctccattaatctcaaacatattcaagaaatccccgtcaatgccaaaatctgccttgttgctaacttcccatgaaatctttttatttggaatagaattttgtacagtggccgccggaagggtaaaccatcctgctccactgccccaattatcaagatacaagaatctcgccgcacccatctgatcattcccaacgcggccgtatgaaaacctcaatttcaaaaaattgattacagactgatttgccaggaaaggttctcctgaagcgacccatcccagagaaagggcggggaaaaatccaaaacgatgactgggagcaaattgctcagaaccattatatcccgcatcaaattccgctaaatatttccccttgtaggcataagttgctcttccgacaaatccaacataattaaaaggtagctcaatgttaatcactttctgaatacgattaaaaaggagcatgccagtaacatgatggttctcaaatttcctgttatagtttagagatgcatctaactgatataaattattaaatctctgaaactgttgatcgacaaggggactgttgttagtggaccctagcttgacgtacgtaatggaatctcctgtaaagtttgcttcataaaccgcaaagttcctcgaatgagcctgagtattaaaagctgttgcatcataggagaaatctcctttgatagataatcctttggttataaaatccaaattctcgatggctccaagggtactagtaatattgttttgatcactaatctcgtagcctgatcgatttaaataaccaaaaggcgtttgtgaagcgccacctacagcatatcgtgttgatccttccacttcaccatctggggtataatcattatatgccaaattaggagtggattcaagcttggccatcaaaagaaaataaccgttagtaccaccagtaccagcaaatccattaagaattacagggtctcgttgtcttaatacgtaccctccgacattcaaatacatacttaaagacgatgtcaaatcaatatcaatattagacctaaaattaaatctattgacttcttcattagcattataattaaattgattcctgagaggatctgatttagttttgaaaagccctgattgattcatatatccaatggaagtaaagtaacgcattttagtagagcccccgctgacatttatatttaccgttgtctgtggggcaaaatttttggtaaattcattcataaaatttctaaccggatatctaattgggtcatccccaagtttataatgctgtaaagcctcatcattataaggcagaggctgacctgcttgttcggcaacttgatttgaaagggttgcatattgataggctgaaaccatctttggtaaaaaggtaggtgcttgtaatgaatggttaatattaacgtcaatatgatttttgccggattcccctcgttttgtagtcactaggataacaccattggcaccacgtacgccataaacggccgttgctgaagcatcttttaaaattgaaatggaagcaatattatagggatcaaggtcgttaaagcttcgttcgactccatctaccagaatcaagggttgctgattatttaaagtacttctccccctcaaatataagtcaactgaatttgttcccggttctccactgcgttgtaatacagtcaatccagggaggcgccctgcaagtgataattcaatattggaaacgggacttttttcaagatcaaccgcacttatggatgaaatcgccgccgtcacactagcttttctttgttctccataacccacaacaactacttcgttgagacttccctggtccggtaacaagacaagttcgatattacctttgtctgctgaaatagtttgagactgataaccgatataagaaattaccagcgagtcagtagggtctgcatttaattcaaacaccccgttcgtattggtaactgttccttgaggcttcccttttattcgcactgtcacgccaaccaatggattacctaatttatccttcactatacctttaatgtgacgttgtttcgaagtagttattttcttttcagacccattggcaacaactaaatcttctttagtaattccatattgttgatttcccatggatactaatttcacctccttactttttaataactcagtcagtgtcgtaatcaactcattctttcgttctttcaaaacagctactggtaactctactcccttaataacatcatcgtcatacacgaactgcatatgatactgccgttgcagttgagttaataaatcctttagctctatcacttcagtatcttgtgcaccggtttggaaattataatgtaagattttagcattatttgctacataagattgtgcatgcagcaataccggcaaaatgaaacatagcaacggcaaaaaaaccacccgtctcttttgtatgaaatttgtcatagtcagtatgaatttaaaatcatgaaatacttaattatttattttttaatatttattattattctcttcccatttttttccaccttcgcatggaacatgacttccagggttttccataaaacagcctcattctctgacgacacggtaccgctaatggtttttgtttttaatgccgattcattttttaccaccaaagtatatccgtaataatctttgacaagcccggccaattctttcagcgaagtatgattaaaatgaaattcaccgtccttccatgcgaggtataatgcagggttaatttgttgcttagaaaaagatccattatcccattccgttttctctccaggcttcataacaagagaaatatttcccacaccagcttttactttaccattgatcagcacgactctggcagcgctatcaatgctttttacagtgaacgaagtccctaagacagtaatgttttccactcccgcatgcaccacgaaaggcacagcctcattttcaacggtgcgtaaatgttttatatcaaaaaaagcttgtccgtcaagccaaaattcacgatcattacccggatgatatttcaatgtggtataactattcaggaaaatttctgagctatccgacaggataaggtctttttgttcatttcctgtttgcacaatgacaaaattctccttccttatatacgtctccttatgaagaagccaccccgcacccagcaatattgaaacgacggcggcagccgaccattctaacagtcttatgcgaaagattttctttttgcgattcctttcaatgccagcctctatacgttgccaaacttccctttcctcttccttctgatgatttatcttatcaaacgatattaaagcccgataatggtctatggcctcccttacatcttctcttttatccggatgttcagcttgccactgttcccaaaaagaatttatccgcttatcttcattccgcatccatgcaagaaaataactatctttcaggaaatcttccgcacggtaatgggtataattattctttctgttcattgattcttctgataaatacatataataaacagagccaatgcgggaattaccccatccatgagaaagaaatcctaaaaaagcgtgaacggacaataagcaatcctcagaggaacaaagattatacgttttgatatatcccatccaattaatgacatataaatttcgtaagtaaatcttcttcctttataccccgcagatttcgtggtctttcgcgtgatcccaatcgaatgtttagtcgtacactcaatagaacgatgggcgtaaatgctgattttcggtataaaaatctgcgaaaatcggcatcatccgcgagaaaagcagacagaagaaaaaggaacttccattgttgaattctgaaaggatataaaacccgaagagtatccggaagattgtgatgataagactgcttatctcaaacgcctggaagataaatatgagaaataaactcttaatggatgctactataattgccggatttttatcggtcaggcttgaatctgtataggctcaaatagtcattgacagcatcacgaacaataacatatccgataccagcatctccttaaaatatttccgcataattgttatggccctgcccatgatcttgtaagaagccttcaccgaaacatgcatagtctctgcaatttcggtatattcaagccctatataaaaacggagaaagatacattccttctgatgatgggtgagtttgtttaaggcagcccttatttgacgtttttgcatagcctcttcatcatcctgaataagcgaatcttcaatatttgtatagcgcaggtcaaatattggcattctcatagcgcgaatcgcacgttctgtcatgcgatgcatctggtctgtcttattcagtatagttcctcttaaagcgctgaataaataaggttttatatgtgtggtctcctgcaaagtattcctgttgagccacattttgataaataaatcctgaatgcaatccttcaccgtttctttatctttacacaatcgtatgccatactcatataacagagaaaaataattctggtaaatttccgcataagaggatctgtcaccttgctgaaaagatgtccagagttgtgcatcatgcctattgaaagtatcattttgcataagttcaaaagatttatgaatgctaaagtatatctaacttccaatacaactatcctgtactgtgctgccttacctacataaaggcggatcaggttagttaatagatttcatttgataaataggtgaagagcctctgttacgaatgaattgaatatcagaaggcgggtattaagaaactcacttaataagcaaaatacaacaatgatttgacaaaataatactattcggaagaattactaaagtcaagtactaaactattattttcagggagcactctcagaataacgtctccgccaggttgagtgaataaccctgactttgcctcaatcaaataatttattccttcaaatcggctatttatggcgccggaacttattcgtctaaaaggcagacgggctgaaggagcagcagacagatcgagaaaccagttaatagaatgactcccattcattttaatgtttatttgcctttcactaatatccatcacgagtgtatcttcaaccggttctacgggccacgatatgtgtaactttccttttatgctgcttgtaatttgtggattaccgctacccttcatcaagatttcttttccatttataagtgtcttaaaccacaatccggccatcttgtcttttgcgctccatctgtttccgtccacaaaaggaagtgtaaaaaaagaatattttcccgaggttgatttctgatacagataggcagaaaccatattctcattgaataaatgaatatccctgaaccgtaaggtaccgtttctccatagtaaattcattctgtaaaatctactatcaaaccagacagttttaagatcactaccgtctgaatcatcacttgcgaccacagaggtagaaggtgtgactttaaaatttttacgaaaccatttccccgtttctgccaaggtttctacctttatttttctttgatccctcaaacgggcaatcaaaggcatttgaatattaaacccctttcccattctcttccatgtaaatgaattttcctgacctgcctggacgtatgcaaatgccaacgattctcctctaatgaattgtttgaaataccaatgaacccaggctgaatcgcctccgccaaactggtacaccggctccaaggtaacaacaccctgcctgttggcgccaatcccattatcatattgacgaataggatcgcttcccaacatccggaaaacaggaacaggtatctgatttttcggatcctgcgccggcatataagcatttttcttactcggataatatgcctgattccaataacctccccataacgtatagccatccgtaccgatctggtctttgcaattacaggaagccacaataccgtactttttatataagtaacttaaagtataggcatcaataaaccacgagccgacggaccccggataatacccaaagatctctttaaactttctcatataagtatccgccaatttcttcctttcatcaggagaatatccagtggaaaagtccgcacttgaatacggatcccaagaggttttccctctccatttaagacctgcatcctctgcaaggggttccgggatttcccaccaggcgccaatctcaaatgagtcggcgggaagcgctttcagaagcctttgataacccgaatcaagcagcgcatcatattgcaataaaaacgtcccttttagtttatattttctcattattgctacctgattcacgaccgtttcaaacaacacctctttcgtgatttccggatcccttggctcatctaagcggataaaattgacaatattcactattttaggatgcgcgattttgattggagactccattttacgttcagggaaagtaaaggaacacaatacatacacacccatcgctatgcaaacgattaaactgaataaaattatttttatcctactcatataaagttttttttacccacacgattttatagcgtgcaagcaaatggtaaggatgtagtgtcatgtcaaaaataatgtgtcaatacctgaaatatattgaccgcaatttaataaactatcccgggatacaatcttttacttatgggattatttatcggactattcgttcacaatccggctaaaccccgtatgggactgatttgggaaaagctgacgctgtcgggattttataaatacatgaaacagcctgcatctctgtagctccctgcaggcagacattttttatatcctatttcaaaaactatgagaaagatcatattttttcttctttttgctcatagtttttcagcattcacccatagtaattttacactgtcattttaagaatgagccgttaatcgtgaacgaagagtcccgatatccggacaagaattaacccccccctgaaaattattataactatctcagttttgttatgggtacaatataaccccgtgctattggcaggcatacgctgaagcatggaatatccggacagaaataaaatgcccggaatacatctccctgtttaattcccgcctctttatgttttatttattaaaataaaaatcataaagtcatggaacagcatgtaaaagaatcgccggaaaaagaaaagacgattacagatcacgtcgggcaaaaacctatctccagaagtcgcttcttaactaccgcgggtataatcttagcgggttcagcagggcttgctacggcaggcgaagctttccggcaatggccgcgacgccacaggccagttcagccacatcaatccggcggtcaggcttctgttaagaattcaagtcaggatatgatgcccgtcacacaatctcttttaaagccggtacgggtgtctgcagacccggccaatgtcccgcttccaattcatcgctccgtgcctgttactcaaaaagtcaggttagaagccaaagaaataattggagaaatcactgatggtgttttatttcactatatgacctttaatggccaggttcctgcgcctatgatcagagtccgcgaaggtgatacagtggatttaacgttgactgacaatacccatagtcaacaaagtcacagtgtggattttcatagctgttttggtaccggaggaggcgctgcctatactaccgtttcacccggccagtcgaagcatattcgttttaaggtcatgaatccgggggctttcatctatcattgtgcggtccatgatctggattatcacatcagcagcggcatgtttggcctgatcctggtagaacccaaagagggactggctccggtggatcatgaattttattttggtcagaatgaaatttatgtggatgaccctcaggataaaaatacacccgctgttttcaattttgacaacatgatagcagaaaagccaaagtatgtcgtgttaaacggtgaattcaatgcaattaccgccggcaaatacggggctttaaaagttagggaaggagaaactgtccggatattctttgtaaatggaggacccaacctgatcagcagctttcatcctatcggaaatatctggaataaattctggctgcagggttccctgaccaatcctccttttacgatgatgcagacggtacaggtaaatccgggcagttgtgccatccttgaaatgcaattgccggttccggaggtgatccggcttgcggatcattccattaccaggacagcccgacaggggttgttagcagaaattgaagtgtcaggttccccggtgcctgatatatttgagccggtaaaatcgtgatcgccgtagtctctccggggctggtaaacccatcttgttcaccgctgatggtttggtagtataaggtgaccatctttttcactttgctatcatggtggtggcccgcaatgcctgaactaccatatcgctgccaccatgattgatcattatttgaatgatgaaaaatcgtccgctatacctgtttttcactgtttttacctaaaattttaatctatttataaaaatttaactatattgaggcgtcgttggcgaactatccttttattttaacctaaaaaatatactaatgaaaacgaaagacagggggaattatttagagcatcctgcattcttattccctttccatctgcagctcaatcccatttattcagtacttaccttcttcctttttcttccgaaccccgggtgaggaaataacaacaattttctatcggtttcttagatccgtataaaaaagacgatcccggcatagccgggaccctcttaaatgttttcaaaaaaataaagtcccacggagtacgcaggacttaagaaaaatcttcggcttatagccttattgtgataagctttcgaatgcaaatctaataaaaattataactcaaatggaaaaaattcttggacttgatttaggcaccaattctattggttgggcaattagagaaataaacactgggttagaaaatcaaataattgacaagggtgttttaacctttgacaaaggtgtggcggaagacaaaagtggggaacaccctatggttcaaaagagaactgagatccggggcaaacgaaggaattatcaaggggaaaaatatcggaaatgggaacttttaaagtgcctaattgaaaatggaatgtgcccattgacaatcgatgaattgaatgattggaaacaatacagaaaggggattgggaggaaatatccccaacgaaaagaatttattaattggctaagatttgatttcgatggcgacggaaagcctgattttgacagattgggatttgataaacatgaaagctattatttattccgtaaactgattgtggacgaatcaaaaattgaaatttttaaaaaggaaccacaaataattggaagggtcttatatcaattagtacagcgaaggggatataatgatgggaatgatattgacgaaactgaaatggaggaattgagtaagaccatcatgaaagaaagtaacgaaagcggagcggcgggtgctgatgaaattagaccatatattgagaagtatgtgaccttaggggccgccttatatcaaatacaaaaagagaaaaatgttcgaattagaaaaagatataatctcaggagcgattatgaaagggaggtaaaagagatttgccgtgttcagggtttggagagattatataaaagtttttggcgggcaataatttggcaacgtccattaagaagtcaaaagggtttggtaggtatttgcacatttgaaaggaataaaaggcgttgcccgataagccatcctttatatgaagaatacagaacctgggtattcatcaataatctaaaaattaccccaatccttcagaataatgtcctaataaattcgataccaattgaagatgctttgaaaaccattgtttatcctcaattttataaagcttcaactgatttcaaattatcaaatatcataaaagttttaaaaaatgaaggcttcgaagtaaccgcaaggtttccatcggatacaaaggttttaagcattggttttttatataaaatgaaagaacttttcggagatgattgggaaaatattattggttggaatgatttgctaaaagattttcccaaaaaagtaaagtacaatattgaagatctatggcatttgcttttcaccaaaactgacaataaaaagacaggagaaaaatcattcgatatcgtaaaaagatttggtattcagaaattacaacttacggaggagaaggctaaggtttttgcaaaaattagattacaacaaggctacgccacattgagtctaaacgctataaaaaaaatattaccttatcttcaaaaaggatttatatatagtgaggcgatatatttggccaatctcccaaaagtaatgggaaggaagctggaagagagtgatatagaaacctgtattcttttaataagagaggtaatcaggcatgatagatatgaccggaaaaaggcaggtatagtcaattctgtaatcgcttcttattttgaggataaaaaaaactttgagttcaataaatcttcaataattgaagaacaaattatagaaacctacgggaaggaaagttggaataaattatctgtgcaaatccaatgtaatattaacgacgatatcaggcaagtaatagaaaaattccttcaagaaccaaaacaaaagccggaagatcactatttgaaagccggaagattacacgataagattttcaacatcttacgagataaatatagtttaccgactgaaaatattaaatatttatggcacccgtcggaacaggaaacttatgaagatgctaaatattatcaggaatttcatcttaacaataaatcatattatatccaggaaaataaggtcggaaacttcttaaagaaaaaccctgatgcaaccaaagggaaattttatgataaactgttgggaactcccgatccaattagtaaaggatttaaaaatccaatggctttgaaaacattgttcaaattaaaacatctgataaattacttaatcgaagtgggtaagattaacgacaacacgagaatagtaattgagttagcaagggaattaaatgattcaaacaagagaaaggctattgaaaaacgacaaagggaaagagaaaaagagaatgaaacttacaaaaagcagattgaagaaataaatagagaatgcaaaactgcgtttgatccaaataataaagatttaattgataagataagattatggaacgaacaaaataagatatgcgtttatacaggtaagaccattggtttatgcgagatacttaacggcggaaaatatgattttgaacacagtattcctgcaagcatgagtttcgataatgaattgaaaaacttaactatagcagacaaaacttataatcaacaaataaaaggcaaacggttgccgaccgagtgccctaactatgacaacaataccaccattaacggtataacctatccgagtatcctatcaacgatgcagacaatgtttggtaagatgacggaaaaacctaaaaaaacaaaagggggaatagttataattagaagttttgaaaaggttgaagaattagaaaagcaggtaacctcttggctaaacgaaacaaaaaaagcacaaacaaaggaaaggaaggattattgcatccaacaaaggcattattataaaatggaattggattattggcgctataagctgcaagcctttaccatcgaagaatacaaatcaggatggagaaatagtcagttgagagacacccaaaccattacaaaatatgcagtgccattcctgaaaaccatcttccttaaggtagatgtccagaaagggaatataacttctgactttagaaagatatataaaatacagcctcgattagaaaagaaagaaagaactaagcatagtcaccatgccatcgacgctgccgtgcttactttaatacctcctgctgcaatacgagataaaatattattggattttaacgaagcaaacgaaaaaaatcaaccttatcatgtaaaaccaagacaatgggataatttccaccaacaatatgttattggaattgaggatgaggtattaattaattatcaggctcaacatcgaacactcacaccaacctttaaaagagtcagaaaacgcggtaaaatccaatatgtaagaaaaaaaatttcctatggaaaatggcaaatcaaattaaaccatgagggtaaaaaaatctccttaaaagcaaaaggggatagtataagagggcagttgcataaagaaagtttattcggagcaattaaaatgcctgaatatatagaaatacacggaaaatttattccaaaaaatgatagtaatggaaattttatctttcaaaaaaatgaaaaaagaggtgatgaattatttattgttgaccgagaaattgatttgacaaaatttaaaacattggaagattttgacatcgttatcgatccgaacctaagagcctaccttaaaaaagaaatccaaagtagaattaataaaggattcacattttcacaatccataattcaaccaatttacgcctttggtaaaataaaggataaaaatggaaattctatccgaccgattagacacataagggttagggccaaaggcagtggatcctttgttcaggctccttcaattataagatcaaggaataactttatttctgaaaaggaatacaagaactttgattatgcaataaatggtgagataccagtttgtgctatataccagacaattatgaatcatcgtcttgttcgcgagataaaagccttttcaatcttggaagtatcaaagagtaatatcaacaaaaagataatcagttcagtcgaacaaaacattgaaaagaaagttggtaaaagcaaagttttggtaccgcttcttcatattctacttccaggaataagggtcatattttttaagaatgaattagccgaattaaaagatctcaatttcaaagaaattataaatcgattatatgtagtaagttcctttgaggaaggaaaaatatattttaaacatcatttgtgtagtatggaagaaagtgaaataaaatcccatctgagaaatattggtatctcagagaaaggagcatcatcattaaattttgagcatccattccctaaattgagattgagtcagggtgccttaaattttgcaattgaagggaaacactttgtaactaaacctgatggaacgataatatggttataaaatgattaaacgcactctctattttggaaatccggcttacctgaaaacagtcaatgaacagttggtcattgaaagaccggacagtaccgaaagtaaatcagaacccatcgaggatttaggactcgtcattttggaccaccagcaaattacgattacgcaggcattaatagccaaactgctggcaaataatacggcggtgatcacctgcaatcaaacgcaccatccgaccgggttactcatgaatttagacgggaatactttgcaaagccagaagttccaggcacagattggggcctccgtacctctaaaaaaacaactatggcaacaaacggtagaagctaagataaacaatcaggcagtcctgcttcaaatggaaagaatggacaaccggatcctgctcaagtatgcccgtgaagtcaaaagcggagacagtgataattgcgaagccaaagcggctgcttattactggaaaaatatttttcctgaatttcttattttcaaaagagaacgtgaggggggtccacctaacaatctgctgaattacggatatgccattttgagagcttccgtggcaaggagcttagtggcatcgggattattaccaactctgggcatccatcaccggaatcagtataatgcttattgcctggcagatgacatcatggaaccttaccgtccatttgcggacaaagtggtttgtgatattatccgcatgaacggcaggttcctggagatgacgcctaatatgaaaaagcagttgttaggcattccggcaatggatgtaaacatagacgggcaaaaaagtccgatgatgaatgcgattcaacgtaccacagcatcattagccaaatgctttgaaggggaaacgaggaaaataatttatccggaactgccattggcgcattaataaggggatctgggcatgcggaaagtaaagctgattttattcacaaattatccattgggttaaaggaggcaaatgaatcagattattggttggatttattaaaagataccggttacatttctcaaagtgaacatcataatctaaaggatggcctgaatgaatgattgcgactccttaccagtattataaaaacgagtaaaggcaaaataaaataatccatgcattgtcaattatcaattatcagttaaatgtttgatcgtttaaacgcctatcgtattatgtgggtgctcgtatttttcgatttaccgactgagactaaaaaagaccggaaaaactatgccgtattccggaaacggatcatgtcggatgggtttcagatgttccagttcagcatgtatatccggcattgcagcagcagggaaaacatgaatgtacatatccagcgggtcaaaaatattcttccacccaagggacacattgggattatgggtgttacggacaagcaattcgggatgatggagatttaccggggcaaagaagaagcaaaagcgtcccctaccgttcagcaattggagttattttgacattttctaaaaaaatccccaagaaggaggcgggttaaaactgtactcggaaaaaaattacctgacaggaataaaaaaaacagaaaaaccttggttttttcattaaaaaaatagcctcaaacaccctactgtaaggcatttgaggctatcctgttgtttaagagctaagctacaaaaaaatttgaaagcaaatcacaacgtaaagttgatagggaccaccacttatggtgttgtttaagagctaagctacaaaaaaatttgaaagcaaatcacaactttgccaatttcgttttaccgcctgaaatcgttgtttaagagctaagctacaaaaaaatttgaaagcaaatcacaactaagggatgaaagatgaagcgttagccggtgttgtttaagagctaagctacaaaaaaatttgaaagcaaatcacaactgaaggcgagaattgcgaggtatgaaggcgttgtttaagagctaagctacaaaaaaatttgaaagcaaatcacaactaagagatgtgaagattgatcgggtgaatagttgtttaagagctaagctacaaaaaaatttgaaagcaaatcacaacttgtacttgtttgggatgcaaagacaggtagttgtttaagagctaagctacaaaaaaatttgaaagcaaatcacaacttagacatgaatattctattaaaaatcctcgttgtttaagagctaagctacaaaaaaatttgaaagcaaatcacaacttaactttttcaatacgtgatgtctggcctgttgtttaagagctaagctacaaaaaaatttgaaagcaaatcacaactttcggttccttcggcattactttcactctgttgtttaagagctaagctacaaaaaaatttgaaagcaaatcacaactgacagagtattgtatccccgaagatgaatgttgtttaagagctaagctacaaaaaaatttgaaagcaaatcacaactgttggcgccatatcctggaagaaaacctggttgtttaagagctaagctacaaaaaaatttgaaagcaaatcacaacgagctctgctaaggtagagatgtttaataggttgtttaagagctaagctacaaaaaaatttgaaagcaaatcacaaccattcacaccttcgctgccatccagatagggttgtttaagagctaagctacaaaaaaatttgaaagcaaatcacaactgttaattatgaattggccaatttagaatattttctgcggctggcttcggaacgattaacgaattgtaagagcacatcttttacatcttcaatagtaacaaagccctctctttcgatagcctttacaaaaggttcggaaaaacgaacatctacaatacgatctgctttttttgccggtcgcttctttttgccgctaatgcccttttgttttttagttatactcatatctgcatggtttccaatatagcaagtttgaatgaccacaaatttaggaaaaattttaataggaatgatataatatccgccttccgctgcaggtaaaatacctaaccatttatttcttctgtttttaaaaatagttgacctggccagcgtttgttgggcttctacatataataacggatgtatttcaggttcagaaacatattcctcagccaaatgctgcgcatacatgcctgtccaaagaatcgaagtttcccgtttcgtaaacggacatttccgattagaagattaagtgttgacataaaattgttgtttaagagctaagctacaaaaagatttgagagcaaatcactaccaatgaaaccggatccatatacttaatgatttatgacagatacaaccttgtttcgtcctgccttctctttacaaggtcgttatttaaaagtccgccggaatatacatattcattcatttcatcagccgtttgctgtgtcgtatatccattgtttatatttttaattacttttgatgtgcttccaaatccttcattataatcgaaatcaagcaatgctgtcatctgattgtggcttaaaggactattcaaagccattgttatttttatgtagctgcctttcacataatctaataaatcttgctccgcctgggccatgcttattgtacccggtggtttattatttttgtcataccctgccgcagtaccatatccccaactccatcgtttgttatcccaatatggatcagcgctgaaaccttcctgatttttaataaaatcaacggcatcagtaaaatcaaacgaccgttcagatgctcttgcctgtttatacttcatcatgtattttcttaaataatatagcgatccaactcctccaataataatttataccaccattgcacatgcacctctaagagggctgcagcttatgagaaaaactgaaaagaataagcccggcggcacggattactgtcatacccatcataacgttcactctgccttccgtagtatcctgttcgttcatggtcgtccccagaccgcattgtacaaaaaaagcttcgcgagctgtggcacccataaaggcgccttcaatccatttcctgttcaaataattttcaatcacattgcggatcatcagccatgtatttgcatcatttggttcaaacactgcccagcttgtagctttttttaccgactcttccaccatgaagaaaaatcttctcacagaaatataacgctattcattatcgtttccggcaagggtacgtgctccccggattaaggttccctttccttcaaacgtgcggattgcattaatggatttaccggtcacggcatctatgttcaattccccctgataagccttatcaatttttataacgggctctatgacaccgacaaggctcacattggcaggcgctttccagacaccgtgaacagtatccaccgcagcatatactcctgccacagtgccacccgcaggcagcaccacaaaatgattctgaagctctatcctgataaaattatagagtgaaccattcatcggttgaagggatcccaaagtagccccctggggatatccgaaaaagctattgtattccttcagggagtaaattttaacaggcttcaggatcagatcattatcttctgctttttttgcgatctgtgtgtaaccgataaaggccggtacggcggtttccacttccgtaacatcaggcgggaatattttattttcttccacataaacacctggtttcctgtaggttgtcatagcttgggggttaagagtttgataaaaagcaacacttataatggattaaggcggcctgatcaatgcgccttacaacaaattgaaaatcccgccgatcagggaatcagctatgccagtgattgagtttgttgttctatttggacaatctggcttacggcatcattatattgcatataaaatccttttgaggctaagctactaaaagatttcagcattgtatcatcccatttcttcgggaacaacttaaatcatagttacacagaatatttaacccacgcgggtttaactcctttcattcaatgccataatatttcccgttacatctttagattcaaataataaaatggaacgggtaagccatttgataatgcctcccggattttggatggcagtggctactttcgaaataacggaatctgtatttctgatgacctgatcctctattccggagctcatcccgaccaataattttgcattattccaagccgtatctcttgctttctgcatactgaaattaatcactgagttcgtaccccccatatcgaagggtcttaagaacactgcaggccatgctattttccgaagagctttatccattgaattatatacattggcaataatttcattgatctgattataatcatgatgcatgctttccaaattatccgatgtggaaatagatgcagtagcaattcccaaatctaaattgatatgagcatttattccaagcaataaatgctgaaccaccgtgaggttcatttgttccgaggctttaaaagcgtacatccatgaatgagtgggttgtctatctgaaatatacatgttataagcgtccagatagcgattggcaaaagccacatccaatcgttccatgcgtgcactgtcttcgaaaaccttttgttcaatgcccgtctgtacacctaaggtcatggctttatataaagaggcaaaataacctgtcctggaggatttttcttcgcaggaccggatgattttatcgagacagataattacttcattgatggagttggcttgcataaaatgagcatcattcaaaaggtcattaaatatttagttataactattcgtcctttactgaaaaacagtcaccacaatgtcgtctatcaggaatcctttaatcctacactattt

SEQ ID NO: 4322 - DNA, 19918 bp, synthetic construct
  misc_feature 1..19918: note = Synthetic
  source 1..19918: mol_type = other DNA
ttaaaagattactacacaaactgggcaagccaacaatttggaaatacttatgcaaaagaaattggagagatcattaaaaaatattcccagtacaatgcaagaaaaaaaccagaattattatcacctgaaacatacagcgtggctaattataatgaagcagataatgttgtaaacgattataataaattggctgatgaagcagaaaaaataaatcagcaattacctgctgaatataaagatgcattttttgaattggtacttcacccggtaaaagcatctgctaatttaaatgagttgtatgtaactgttgcaaagaacaggttgttctactcacaaagagcggctgcggcaaataagcttgctgatagagcgaaacaactttatttaaacgattcactaatttctttgcaatacaatcacactattgcaaatggcaagtggaaccacatgatggatcaaacacatattggttacacgtactggcagcagccacccataaacaaaatacctgaagtgaaatatgtaccgaaagactcgataattgaacaaggaataaaagttgatgtaagaaatataactgcagaaaaccttataccaaaaagtttaaaaggaatttttttttatgagaaggatggttatgtttccatacaagcagaacattttaccaaagcaattaatacatcaaacattcactggaaagttattcccgatattggaagagatggttccggcatcactacatttcctgtaacagcatctgcgcaaattcctaatacaaacagtccacatgttgagtatgatctgtttgtttatgatagcggaaaagcaactattaatgcttacttttctcccacattgaattttcataatgatgagggcttgaagtatgctgtttctattgatgatgagctgccgcaaattatctccatcaataaagaagataataacgtaagaacgtgggaaggatgggtagccaataatattattatcaaaacaacaaatcatacaataacaaaacaaggaaagcatattttgaaatattgggtggtaagttcggctgtagtattgcagaaattagttgtagattttggcggcatgaagacaagttattttgggccaccggaaacattgaagaaataaatgattgaataaatactatgatgaaaaaaataatttcaacaatactatcgcttgctctcttttggatgcaggctggtgcccaattgcaaagtgtaactatacctaacacacaggtgcagacaattacttcttccattgtggcagaacaggaatatcaactcttcattagtttaccagcgggttaccaggatgcaactaaaaaatttcctgtgctttatgttctcgatgggcaatgggattttacattggcatactccatttttggtgagcaatattttgatggatttattccaggcattatcgttgttggtattacatggggcggaaagaatcctaatcctgacagcctgcggacaagagattttactccaacaaatgttaagtatacacctcaatctggcggcgctccaaaatttctttcttttataaaaaatgaactggttccttttattgattcaaaatatcatactgcaaaagatgaacgtatattgatgggaagttcattaggtgggctgtttactttatatgctctttttaatgaaactaaactattcaaccgctatgtacttacaagtcctgctgcaggttgggataatgaagttatctacacgtatgaaaaaaattattttgaaaaaaacaaacagttgccggcaaagctttctatggctatcggtggattggaacccggagtaaatgatttcaataaactggttgcgcatctgcaatcaaggaactatgaaggatttcaaatggatacaagaatattggaaaatacgggacattccggaggtaaggcagaaggttatacaagaggtttgcaggccgtgtttgctaaaccttctctaaccataacgccggaaacattaaaacaatatgcaggaacatatacgactgcttcaggaaataaaattgaaatagctgttgccacagatcatcttattttaaaatttcccggcggtggaagcaggacattaaacactgaaacagaaacaaatttttatgtatccggagaatttttctttgttgattttaaaaaagatgagaaaggcgggattacaggtttctggttaaaacaattttctggagaacagtttttgaaaaagattaattgacactattacctaatgcaaaataaatttaaatattctgtttttttaatggtgatcattctattgcaaacttgtattttatatggccaatcatccgatctgaaaaagtggccaaaaggtttttctccagaggaagtaggaacaaaagttgccgggcattttcttgcaacaccgcatccggcttattctgccgacagcaaacctcatattccttactttgaagtatgtacctggtatggcgcattaacctttgccaaagaaagcggggataaaaaattagcggatgatcttgctcttcgcttccagccattatttgataaagactctaccttgctgcctgttcccgatcatgtggattatagtgtgttcggtactgttcctttagaattatttatgcaaacaaaagatcaaaaatattttgatttgggaaaacattatgcagacaagcaatgggatgcacccgaagggccacgggtaataccggaatcatttacgttttataacaagggactaacctggcaaacacgattgtggattgatgatatgtatatgataacaatggtgcaggcacaggcttaccgtgccaccggcgacagaaaatatattgatcgtgctgcaaaagaaatgattgtttatttagacagcctgcaaaaaccaaacggtcttttttatcatgctcccgatgctcctttcttttggggcagaggaaatggttggatggcagcgggtatgactgaattacttcgggtattaccaaaggacaatacagatcgtccacgtattatagatgcttataaaaaaatgatggcttccttattatcttatcaaatgaaaacaggaatgtggcggcagcttattgatgatgcggaagcgtggcctgaaacatcaggcacaggtatgttcacctttgcaatgataacaggtgtaaaaaatggatggcttgataaaaaaatatatggagaggctgcccgcaagggatggcttgctttgacatcttatataaatgaaaatgctgaaattacggatgtgtgtgaaggaacaggaaagaaaaacgaccggcagtattatttggatcgtaaacggctgaccggcgatatgcatggacaggcgccggttttatggtgtgccactgcattgctgcgcaaataatagtaatgaggcgaatgtatttatagaagatgccaaatgatatgcagatgaactgagcctgcctaccgaacaggcaggcgtagcaagggacgatgcccgcccataccgaacgttggtatccaatagtaaaactaaaatccggtacgttcgggcgggccataaatcccgatagctatcagggactaaagccggataaaattaaaccggatatttattcgggagcaagtgtttcaggcaatgaaatcaaacttaagataccggcatttccggtagtggtgctggagttgaaataataaaataagcttttaaaaaattttaaattgtctgacggtctccgtctgacaatgtttttaaaagaaacgaaattttaagattgattattctaacaactttataaaaattacatcaatgtcatacaaaaaaatctatcagtataaaaaggtatttactctattatgttttttcttttcaggtttttgttttgctcaggatcaaacaaacaaatatccttttcaaaatacaaacctaagttttgaacaacgtgtaaatgatctcgtaccccgtttaacgcttgaagagaaagtggcgcagatgttgaattctgccccttccatcacaagattagaaattcctgcttacgattggtggagcgaaattttacatggtgttgcacgcacttcgtttaaggttacagtatatccccaggcaattgccatggcggcaacttttgatacaaattcattgcgtgttatggcagattattcggccatggaaggcagggcaatttttaatgaaagtaatcgcatgggtaaagccggacaacgatatgttggattgacttactggactccgaacataaatattttcagagatccccgctggggaagaggacaggaaacttatggtgaagatccttttttaaccggcactttaggaaaggctttcgtgcatggtttgcaaggcgatgatccaaaatatttgaaagctgcagcctgcgcaaaacattacgcagtgcatagcggccccgaacctttacggcatgtatttaatgtatcacccagcgattatgatttgtggaacacttacctgcctgcatttaaggaacttgtagtgaatgcaaaagttgcaggtgtaatgtgtgcatacaatgcttttaaaacacagccctgttgcggaagtgatcagttaatgattgacatcttgcgtaaccaatggaagtttacaggatacgtaacatcagactgctgggctattgacgatttttttaagaatcataaaacgcataaaaatgcaaccgacgcttctgttgatgcggtgtttcatggaactgatgtggaatgcggcactgatgcttataaatctttagtgcaggcagtaaagcaaggaaagatctcagaaaaacaaattgatatatcagtaaaaagattgttcatgatacgttttcgtttgggaatgttcgatccttcttcaatggttaaatatgcgcaaactcctgcatcagttttagaaagtgcagaacacaaagcgcattcacttaagatggcacgacagtcaattgttttgttgaagaatgcccgcctgccggggcaggaaaacaacactttgcctttatcaaaaaaaataaaaaagatagtagtacttggtccaaatgctgataatgcaatttcggttttaggaaattacaatggcactccttcacaaattgttacagcattgcagggaattaaagataaagtcggcaacaatgtggaagttatgtacgagaaggctatcaattttaccaatgatactttgcctgtgtataatgatgtaagtgagcaatatttttatgaaggtaaaaaaggttttaaggcagaatactttaataacaaagagttgaatggcacaccattattcattcgcacagagagcaatattgataatagctggaaggatggagatatggttgctgataatcttaaatctcataatttctcagcccggtacacaacaaactttactgccagatatgatggcaatattaattttgaagtggaagcagatgatggatataaattcattgtaaacgataaaacacaaattgatgaatgggcacgaaaccgctggggagcaaggatctatacactgcaaacaaaaaaagacagtgtttataaacttgttgtagagtactggcagggagaaggtaaagccaatgtaagattgagagcaggaaattttcaaaagacagatttcaatgctcttgtcaatcgtgttaaagatgcagacgcaattatttttgtaggcggtatttcaccacaactggaaggtgaggaaatgaaagttgattttcccggttttaatggaggtgaccgtacttccattttattgcctgctgttcaaaccaaattaatgaaagttttacaatcaaccggtaagcctgttgtgtttgtaatgatgacagggagtgcgttagcaattccatgggagaatgaaaatattcctgcaattgtaaacgcatggtatggcggacaatcagcaggcactgcacttgctgatgttttgttcggcgattataatcctgcaggtcgcttgccagtaactttttataagagcgataatgatcttccttctttccaggattactcaatggctaaccggacatatcgttattttaaaggagaacctttgtataggtttggttatggattgagttatacttctttcatgtatgatcaactcaaaatgcctgccactgcccactctgctaaaaatgtaccggtaagtgtaagagttacaaataccgggaaaatggatggagaagaagtagttgagttgtatgtatccaatcaaaataaaacaattaaagaacccataagggcattaaaaggtttcaaaagaatatttttaaaagcaggagaaagtaagatcgtaaagtttgaattaacacggcaggatctatcaataattgacgatgcaggcaatgcaaaaattcttcagggaaaaatattgattagtgttggtggttgtcagcctgatgaaaaaagtaatgcggctaaaaaaacaatacagggatttttgaattagttttataaaaagtttttataaatatgaaataccgctcatttaaaggaacagatatttccgaagttggattaggtacgtggcaactgggaagcgctgattggggcaacgtttcagacgaagatgcattcaatattttaaatgcatttactgaggacggcggaaattttattgacactgcagatgtatatggaatgggaaatagtgaaaaagcaattggcaggtttttaaaaacagagccaaaagaaatttatgttgcctccaaactcggaagaagaagtgatggcaaatttggctggccacaaaacttttcatacctggcaatgcataaacaggttgtaagcaccttaagaaatcttgatgtttcagaattgtttttagaacagcttcattgcattcctatccaggaattaaaaaatggtgaagtgtttgatcatttaagaaaactacaggatgaaaaattaataaggcattggggtgtaagtgttgaaacaagtgaagaagcattgatctgtttggaacaggaaggcattgcttcgttacaaattatttttaacctttttcggcaacatgtggctgatgaaatttttgcaaaagcgagagaaaaagatgtagctattattgttcgtgtaccattagcaagcggattactcacaggaaaatttaatgaacaaacaactttttcttctaacgatcaccggaattataatgcaaacgggggatcctttaatgcaggtgaaacctttgccggtattgagtttaacaaggggattgagttctctcatgaaatagcaaaattattaccggatgaaagaatggctcaatggtctatccgctggatattggatcatccggaagtaacaacagttattcccggggcttcaaaagttttacaggttgaaagtaatgttgaatcttctgacctcccaaccctttcaaatgatatccatacaaaactgcgtgagttgtatgatgaaaaaataaaacctgtaattcgcggacactattaatatttttttgtggatgaaattttctatgtgtaatctatgttcctacatgattttatctgatgaaaatctacacataaacaatcaatgattctaaaatttaaaagagaacataaatttttctaatgaaaaaaattttcgttgcactgctactgctttttactttaagtgtttatggtcaacataaaggccaatacaataatccaatccttgcaggcttttatcctgatcccagtatttgtaaaacgggggatgattattatttggttaattcaacatttgcctattttccggggcttcccatttttcatagcaaagaccttgttaactggaaacaaattggttttgcaatggacaaaccagagcagcttgaccttgaaggcgccggtgtttcaagaggattgtttgcaccaactattcgctatcatgatggtctttattatatcgtttgcacattaatagacagaggcggcaattttattattacagcaaaagatcctgcaggtccatggagcaatccaacatggcttaaagaaattgatggtattgatccttcattattttttgatgaagatgacaaggcccgcccggatgaccaggtcggacgggcttattttatttacaatagtattccgccaggcaacaaatccttatgggatgggcaccgcacaataagaatgcgtgcttttgattataaaaatttaaaagtaacaggtgaagaaaaactcatcatcaatggcggtactgacatttctaaaaaaccagtatggattgaaggcccgcatgtatataaaatcaatggcttgtattacctgctttgcgctgaaggcggaacgggctacaatcattcagaggtggtgtttagaagtaaaactgtagaaggcccttatgcatcgtatgaaaacaatcctattctaacacaacgggatttagatccgaaaagagctaatccaatcaccactacaggccatgccgatttggtggaaacacctggtggatggtatgctgtattcttaggatgcagaccttatgaagacaatcattacaacataggcagagaaacttttatggctcctgtgcaatggaaagatggctggccaattattaatccggattataaagaagttcaatatcattatccttttccattttcatcaaccaaaaaatatacaccaaaatatagtggtaattttttgtacagagatgattttaataaaaccaatctggattataactggcaatttttaagaactcccaaagaaatgtggtacagcttttccaaacaaaatggtttaatgataaagcttttgccacaaacctgttccggcaaaaacaatcctgcatttctcggtcatcgtcagcaacaccttaaaggatatgcaagtacttctcttaatttttcagcaacatctcaaaatgaaaaagccggtatgctgatatttcagaatgaaaatcatttttattttttatgcaaatccattaaggataacaaacctgttatacaattatataaatccattgcagataatagcggcaagatggaattactgcaatcacaaaaacttttaagcgcaggcaaacttaaattaaagattgaggctaatggcaactcgtattcgttttattattccgataaaaaaagaaaatggaatttgctgaaagcaggtgtagatgcaaaatttttaagcactaaagttgccggtggttttgtgggatgtatgtatgcattgtatgcttcctcatacggaacagtaagcgctgccaaagcttattttaactggtttgaatataagggcaatgattatgtatataaaaatggaaaataacagttggggtgatttgatttctttctaaatttctatgagaagaatttgttgaccagcattcgttttcatggcatcatcgttggtcactcacttgtacttttagttctttgtgcggcttttattttagcgaaagacctaggctagacacaaaggtgtaattgtgtatttcatttgatagcttgctttatcaaactcattatatactcaagatttgcatcatcctcaacatgtacctgataatctccattaccccaatgcccaatgtttgaaacattttgtacaatcttttttggatcatccaattgaccagatttttttggaaatctttttggattagcttgatggttgcctaagtgattaaatgagatatgatgtaacgtgtaacaatatcaaaaaatgtatttaaattgtatttacaataaaactttcttcagtcttcatttttaaaactaacagctatgaacaccgatgtagacaacttaaagtcgtttattgaaaagatcaggtctcttaatttctttcagcgtttatttggatggaaaaacattcggaatgcacttattaaggtgagattgtatagggaataaaaaataaaaaaccccacagagcgtaaacgatgcagggtttaagaataatcttcggcttatagccttattgtgataagctttcgaatttcaaaaataagtctttaaaaattaatacaactcaaatggaaaaaattattggaatcgatttagggaccaattcaatcggatgggcaataagagatactcatgaacaggaaaatcaaatcgtagataaaggcgttctaacttttgagaagggagttggtgaaggcaagtctggtgaatttccattggtacagaaacgtactgaaagcagaagtaaaagaagaaattaccaagctgagaaatatcgcaaatgggctcttttaaaaacattgattgaacaaaaaatgtgtccattaagtatcgaagaattagatgaatggagaaaatacactaagggtgttggaagaaaatatccgcaaagcgaaaaattcattcaatggcttcgatttgattttgatggagatggaaaaccagattttgaaacatttggattcagcaaacatgaaaatcattatttatttagaatgctggcagtaagcgaagaagaacaacacaacaaaatatttgaaaataatcctcacattttaggcagggtgctttatcacttagtacaacgcagaggttacagaggtagagatgatgaaggcgaagaagccaaaacaattatgaaaggaagtaacaaaacaggcactactggtgttgaggtaattactcctcttataaaagaatataaaaccttgggtgcagctttgtatcatttaagtaaagacaaaaatgaacgcattcgcaaaaggtataacctaagaactgactatgaatatgaacttaaagcaatttgctctgttcagaaaataaatgacttaatttataaacaattgtggaaggcgattgtgtggcagcgcccattacgaagtcaaaaaggattggtaggttattgtactctggaagcacctgcaaaaaatgaaagcaataaatttataaaagcaggaaaaaaacgttgccctgtaagccaccctttctacgaagaatttagaacatgggtttttattaataatctcaaaattcacttaccggaaaacgtagataaagcaatcttccttaaagaaaatatataccctcttttttataaagtatccaaagattttaaacttagtagtatcaataaagaacttaaaaaagtaggtggatacattaaatcaaaacatagcaaaggcgaagggaagaataaagaagatgatacaaaagttatttcttgcacacttttgaatagcttaaaagatttgttgggcagtaattggaaagatgaatatggatggatagaaggattaagtagtcaatcaaaaaaatgcccttactcgtttgaagatatttggcatatcctctttacgtttgatagtaaagaaaaactaaaacaattcgctattgaaaaattacgattagatgaagaagaagctgagaaattttcgaaaataaaactacagcaaggatatgcaacacttagcctttcagcaataaaaaaaattctgccatacttgtaccagggttttatctacagtgaagcagtgtatttagcaaatcttcataaagttttaggtgcaaaagaagtaacgcaggacatgattgatttattttctgaagaagtaagaaaaataattactgaacaaaatgaaagtaagcaactatccaatgttataaataacttaatcagcgatcaattaaatagtgatcagcgttatggcatggatgctaattatgaattagatgcagatgataaaaaggatattgaaattaaacttcaatctgtatttggtgctaaaacatgggaagaaaaagaagttgctgacaaacaaaaatcttttgaatttgttgcgaataactatttgacatttttaagaaaatctataaatgcgaagaaagataatttgtttataagatcagcgagactgcacgataaaatatttgattatttaaaaaacacttatgatgtacctgatgaaaacaaaaaatatttatggcatccatcagaacaggaaacgtatgaagaagcgcaaattaaaaatggcaaacccatgttgggaaagcctcagccaataagcaatggatttaaaaacccgatggcattaaaaactttacacaaattaaaagggttgatgaattacctattgcaaacaaataaaattgatgaagataccagagttgtgatagaaatagcccgtgaactaaatgatgccaataggagaaaagctattgaaaaatatcagcgtgacagggaaaaggaaaatgatggatacaaaaaaagaattgaagagatagctaaagaatacaatttacatcttgatataaacaacaaggacattatagataaatacagactttggattgagcaaaatgagacgtgcttatatactggtaaaataattggttgtaaagaaatattcgacggttctctttatgattatgaacatactattcctgcaagcatgagctttgataatgagctaaagaacttaactatagccaatggtatctataacaagcaaataaagcaaaacaaattaccaacacaactgccaaattattatgaagatgctgtaataaacgaagtaacatacactgcaataaagccacgtttagaatttattgaaatcaaagtaacggaactggaaaagcagttagaagattggaagtatagagcaaaggttgcttcaacaaaagacagaaaagattattgcattcagcaaagacatttaattcggtttgacttagactattggcgaaaaaaaattgatacattcactattacagaatacaaagcaggttggagaaacagtcaattaagagatactcaaattgtaaccaaatttgcacttccttatttaaaaactgtattcaaaaaagtggaagtacaaaaaggttctgtcacttctgcctttagagaaatttataaaatacaaccaagacaggaaaagaaagatcgtaccaaacacagtcatcatgcagttgatgcagctgttctaacacttattcctccggcagctattcgtgataaaattctcctgaggtataatgaagaaaaagataaaaacacaaacaacacttatcatgaaacaccaagacagtggggcagtttcagtcaacaacatataatatcattagaggatgaaatactaataaactttcaggcacaacatcgtacactaacaaacactaaaaagaatgttcgtaagagaggtaagcaacaatttgtaaaagagaaaacccaagatggtagctggcattataagttagatgaagatggaaataaaattcctttaattgcacagggagatactataagagggcagcttcatgaagaaagttttatgactttgattaaacaacctgagtatctgttagtaaacaataaatatattccttcaacagatggaaaaggaaattttattttccaacaaaagaatgaagttgcagaattgtttgttgtaaaaaaagtattgattagtgaattggataccatagataaattgaaaaagattatagacttaaacttaaaagactacttatccagaacaattaaagaaagaattgattctggaagaacttatcaacaagctatacttgagccaatatgggcttatggcaagtcaaaggataaaaatggaaatgcaataaatccgatcaggcatttacgttgcagagttgcaaaagcagcaggattcctatccaaagaaaaaaccttagacattagaaaaaatgagtttgtctcaaaatattctcacaagagagatgttcttgctggaaatgatgaaatggtgatttgtcttttttatcagatagaaaatagcaaaagttttagacttatttcccgctttgagttagctgctttaaaaattaaaaatctaaacgaattatattcacagaatgaatacaatcaaattttaaaaggaagtaaaaagttaatgttgcctttgacttatattattcagtcaggatgtaaagtatttttatttgatgataaggtaaacagtgtagatgatttaaaacaattaggtaaaaaagaactttcccgaagattgtttataataaataactataacattccagctggaaatactatttatatctatttgattaatcacattgactcaagaacaaaggatattttacaaaaggaagaagtaaaaaatattgatacaacaaaatatcaggctaaacttgctttaacagcagataaattcaattgtgctatcgaaggaaaagattttgaaatgaaacctgatgggcaaatcaaatggtttaattaatatcatttatatgaagaagttaaatcgattgaaaatttattctttggctctatatttcttattcatacctaagagaataaagcataaattttatttcaaaacatcccccattgaaaaccttgcaatagcaaaagttatgactatgataaaatattggaaacactttatcaggaaatctaagatggacaaatcacaacacagtattgtgaattaagtcaggccgggcagatgtgaaagaactaagttcctaaaaaaattcgaaagcaaatcacaacgagtaataacaaattgcgataatattcaatgatgtgaaagaactaagttcctaaaaaaattcgaaagcaaatcacaaccacactctgagtttacttatacgtcttccgagatgtgaaagaactaagttcctaaaaaaattcgaaagcaaatcacaactgtggcaagagttgccgtgtgatctgcagagatgtgaaagaactaagttcctaaaaaaattcgaaagcaaatcacaacattggctgaaatgaaatgacaaagtaagccgatgtgaaagaactaagttcctaaaaaaattcgaaagcaaatcacaacgatgctttgatttctttagatatgttgcaggatgtgaaagaactaagttcctaaaaaaattcgaaagcaaatcacaacccaactgtcatctgtccattgtagcgttgcgatgtgaaagaactaagttcctaaaaaaattcgaaagcaaatcacaacaactggactatttcaggagcattgactattgatgtgaaagaactaagttcctaaaaaaattcgaaagcaaatcacaacctttccaatgagcgtacgtaccgatcaaatgatgtgaaagaactaagttcctaaaaaaattcgaaagcaaatcacaacaataaaatcggatgtaaaccaatcttcaacgatgtgaaagaactaagttcctaaaaaaattcgaaagcaaatcacaacgcaataacctactaacaatttaaaacctttgatgtgaaagaactaagttcctaaaaaaattcgaaagcaaatcacaaccaatcccttcatataactgcactttagttagatgtgaaagaactaagttcctaaaaaaattcgaaagcaaatcacaaccgtcaagattggtattatctaaggttgcatgatgtgaaagaactaagttcctaaaaaaattcgaaagcaaatcacaaccaaaaagactgacgtgcaataattactatggatgtgaaagaactaagttcctaaaaaaattcgaaagcaaatcacaactttaacgatcgtgatatcatcacttttttggatgtgaaagaactaagttcctaaaaaaattcgaaagcaaatcacaacctcattacggctgttaattcatacttctttgatgtgaaagaactaagttcctaaaaaaatccgaaagcaaatcacaacttagcgttttaattgcttctttcttttgcagatgtgaaagaactaagttcctaaaaaaattcgaaagcaaatcacaacctttcaattcagaagtataatttattaaaagatgtgaaagaactaagttcctaaaaaaattcgaaagcaaatcacaacgtagttggcggtcatgcagtagttttggtagatgtgaaagaactaagaggcggagttagaggagtaataccagaaaagaaaaattattaaaatggaactcacttacatattcctttcagtcattgcgattctcttaatcgtaattctcattcgtgttttcaaaaaagaaacgaaagaggacaacaatgaattagcagaaataaaaaatataatcagttcactcactcaaaatattaatattattatttaaaactccatgagcaacataaaactatttgagaacagacaagtccgttctgtatagaatgaagcagaagaaaaatggtatttttctgtggtagatgtagtatcaatcttaaccgatagtcccgaccccaaagattattggtatcggatgaagaaacgggaaaaactatctggtgttgagttatcgacaatttgtcgacaactgaaattagaatcggctgatggtaaaaaatatgaaacggattgtgctgatacgcaaggtttgcttcgcatcattcaatcaatcccctcacccaaagccgaaacaactataaattaaatttgtaaagtaaaaatttagcatatgagcaacataaaactatttgaaagcaaaaaagtgcggacacattgggatgcggacaaggagaaatggttcttttcggttattgatgtgattgaaattttaactgatagctctataccgaaaagatattggagtgatttaaaaaagaaactgcagtcggaaggtagtgaagcgtacgaaaaaatcgtacggttgaaaatggaagctcctgatggcaaattgcgtgaaacggatgttgcaaacactgaaactttgctgcgaattattcaatccatcccctcacccaaagccgaaccgttcaagcaatggctggcaaaagtaggttacgaaaggatgcaggaaatttctgaccctgaacaaagcttagacagggcaagagaaaactggcaacgattgggtagaagcgaaaagtgggttcagcagcgcatgaccgggcaggaaacgcgaaacaaacttactgattactggaagcaaagcggtgtggagcagtcggacgaatttgcttttctcaccaacatcattcaccaggaatggacaggattaacagtaaagaagcacaaagatttgaaagggctgaaaacacaaaatcttcgtgacgacatgagtgaagcggaacttatttttacagcgcttgcagaactttctacaagacaaatagcagaaaccaaagaagccaaaggtttaaagcaaaacgcaaccgcaggaaagaaaggcggaagaatagctaagaatgcgcggcttgcattggaacagaaaacaggaaagcgtataattacatccgaaaatttcctgcctcctgcaaaagagaaaaagaaaattgataaaaaatagtaatattcaaaaactatcatgctgatctatatcatacttgccgttcttgcgcttctcgtaatcgtaaacatcgttcttacactcaatgcagcaaaaaaagattcaggcaatgaattgactgaaataaaaaattcaatcagttcacttactcaaaacctgaaagacacagaagcaaatttgaaaggggagtttataacaaaccgttcagagacagcacaaagttcaaaagatttaagagaagaagttggcaaacaaataaacactttcactcaaacttttttagagcaactcacagcactcacaaaatcagttgaagaaaaatttgtttcatttcaaacaacaattgaaacaaacagcaaggagagtagaaaggaactaagagaaaatttagaagcgtttaagaatgagttgagtgatgctctgaaagattacaaagagaaactcagagagaatttctctgatttcaataagcaacagcaaacacagaatgttgcgaatagcgaaaagttagacagtatcaagaaaacattggaaacttcaataaagaatttgcaagagggaaatgaaaagaagttggaagaaatgcgaaacacagttgatgaaaaattgcaaaaaactttagagacacgattaacacaatcatttgagttagtaagtaagaatttagaatcagtacataaagggttgggtgaaatgcaatcgttagcagttggtgttggtgatttgaaaaaagttttgagcaatgtaaaaacaagaggcacacttggagaaattcagttgtcaaatattttggaacagatacttgcacccgaacagtatgaaataaacacgataacaaaacaaggaacaaacaacagagtagaattcgcaattaaaattccacagcaaaaccaagacaacaagattttgttgatgccgattgattcaaaatttccgattgaagattattacgctttgcttgcagcttatgaagccagtgattcagttgcggccgatgcagcaggtaaagcgttggagaacgcaatcaagaaagcagcaagagacattcatgaaaaatatatcaacccacccgacacatcagaaattggtttgttgtttttaccgattgaaggtttgtatgcagaagcagttcgcagaccggcattgatggaaacattgcaaagagagtatcagattattttaacaggaccaacaacactgtcagcaatacttgcaataatttcttttggttacaagacaatggcattggaacaacgaagcggagaaattaaaaatacccttaatgcagttaagactgagttcaacaagtttggtgatgtattaaaaaaggcacaagtaaaaattgcagatgcaggagatgaaatcgaaaaacttgttggcacccgaacaaggcaaattcaaaaaactttaaaatcatttgaaatattgccaaataaggaagttaatttgttattgggagaaagcaatgatacagatgatacagatgatatagataagacggatgaagaaacttgacaaaaaatattaagatttatgggtaggccccgtacttttcgaaataataaaacctttccaacttaacctcaaaaaaacttaatacctctatactacgttactcagacgttactcaatgcaaataaaaaagcctataatctttgagaattacaggcttttacaggaaaggtttggtagtcctggcaagaatcgaacttgcatctaaagtttagttccgcattgcaaagtagcccggacaagaatcgaacttgtatctagagtttaggaaactcctattctatccgttgaactaccgggccactttgcctgcgggatattctatccccgtccgactggcgtcagccgggcgggcattgaaccctgcctaccggcaggcaggtacgggaccaattttgaggactgcaaaaataaagcattctgctgttcattatctctataaatctgtttgctaactgtatctttgcacccccgtccgaacggcgttcagccgggcgggcttaattttttctcatgaagtttatgaattttattattaaataccggttattgctggggggtatattattaattgctgccattggggtaaatatacaaacaagcttttggccatcctttattttgtatttgattgcagtagtttttattgttggtcattttttatttgggccgatgcgtttgatacagggttatatggaatcaggagatatggaaggcgctgaaaaagttatcaattcaatctggttccccggattacttattaaacctgttcgctcggtttattttaccatcaagggaaatcttgctatggtaaaaaaggattatgcatctgcagaaactcacatgaaaaaaagcctttcattaggcagcccgatgaaagaagcagaaggtgcgaacaaattacaacttggcatgttgtcaatgcaaaaaggaaatattaaggaggctgaaagttatatcaggcaggcgatccgctcaggcttaccggataaagagaatgaggctgctgcatacttacagctttcttccatcatgataaacaaaagagagttcagggcggcaaaagaatattttagaaaagtaaaaaagctaaaaccaactactccccaaattgttgaccaggtaaaacaaatggaaaaatacattagcagaatgccgggataaaatccagtcattgttca

SEQ ID NO: 4323 - DNA, 19120 bp, synthetic construct
  source 1..19120: mol_type = other DNA
  misc_feature 1..19120: note = Synthetic
ctggtgcgcgattgcatcgcgttccccccgctggtgcgcgattgcatcgcgttcaatacacagttttaaataggttctccaagttccaaattcaaccgtaatactgaaataccacaataccgtccaacaatcctttttcatctgaataatccgaagcactgctataaacataatcctgagccctataaaccaatccagcctcaacaggattattgtggacataattaatcttctcccaaataaccttgttgctccacaattcgataggtttattatcgtgtctccaaacctgataatctttcacattagatgattttgcagcagcttttttgaattgctccaatagaaattcccttctactctctcgtggattctcctgtatggcttttactactgccttgctcgtgaaccgtttaaaatctcctaacagaagtgatggatgctgcccctttacgcttctaaataccaagtgtacatgattggtcataacacaccacgcaattatttccattccctttactttttggcaataagaaagactttgcaacaagatgtctttgtactcattgcgggtgaaaacatcaagccatcccacaactgcaaaactgacaaaataaagaccttcaggattatggaatttataattgcgactcatattctaaagatattgttatttcttaatatcaggaaaacaaaggctcctaaatcatatcgaaacaagaacagttagtactgtcactacattaaagcttgggagaccacgcgatgcaatcgcgcgggagcgggggaagtacttattccatcgactggtgctccactctcgacactttgcacatcagttttgaccacatatactttcccattatttttcccatcatttcctatgttgtttccattttggtctataaaatcgcctggaggtagtgccatcatcccatccggatcgataaaatatatcggattgttaaatgcatagttgtagggcgagtgcctgcgcatcgcctccgccagcggatcgatgttcatccacctgcccagtgcggggtcgtagttcctcgcgccgaagtcgtaggtgtttatatcaaactcatcttggtactccttcccgccgaacttgtactttaacgtacaacacgtctttttgtgtacgttttaattcaaataattggaaagagcctcttttactgaattaactcttttctttattgttatttgcaattattaaaaacatattttgaatctaaaataattacattgaaagcttcatttaatttaaaaacttgtttcaatgatttattggcacctactttaatagtggcgtttttaatcaaaattttagtgtcagatgtactatgcgagatgtttacatccttttcatttggaagacgtatataaatagtgtctttgctaataacataataattttctatcaaatcaaaatcaggagataaaacagaagataaattaggaaaaaattcatcttctgtttttgagttaaagaaattaataaatgtatatccttcattattataaaaacaattttgtttaacaggtgtttttgataggggcttttttccaatacaagaagtaattagaaaaccaaatatgaataataaagtaagtaattttagctttttaatgatcatggtgttttactctggtattactatctattataatcaatgcgttattctggtatttaacgttttcgatacttggagattccgatttgtcaattacccctgttctaataaattctaatccatgatccaatagctcatgaatcgttatagaacttaagcttggggtagtgagttctccattaccggcgtcgaaggtttgatttttgcctatatctggaaatattataacagaggcctctctcgaaccaataacagataaaaataaacctcctccagtccatcctaaatttccacctgcttcaacaattgttttttcctcactttctctagtaataggttcaccatccttcattccaacaaattctctttttttgaattcagcagttacatattcatcacccccttctttttgatttacttcaattgtgtattcatcgttggacataatttcattgaatccgtcatatattgccttctgttcatcgctatattcttttttttcctttctatgggatttaccgcccttgtgttttaaaactccttttttattaaaataaaatccgtgattctttcctaacaattcggtcaatgtatttttaatcaattcctgagcttcttcgctctctgcaactactcgcattccgtcgggatctttgaataagataggattatttagtgcatatacatatggactaacagatgtatatacttcagccagcgggtcgatgttcatccacctgcccagggcggggtcgtagttcctcgcgccgaagtcgtaggtgttgatatcgaactcagtttggtactccttgccgccgaacttgtacttatacgtatccccaagaaatgggttcacaggtgtcagtgtgatctgtccgccaggagtaacgtcccaagtggtatggttgccgttatatccgttgtgcttgagcccatagggatagtaatggtcctcttccagaatctctatctggttgccattggccgggttctgtgcatactttacccgtatgttccccaaatggtcggtatagctgaatacgtacttgaacgtatagctggtaccgccgccaagacccgagggtattgccttggcgtatccctcggcgtgggggaagaagtcaagcttgccgttcgtgtattgaaaaccgtccatatagtccgtagtggtaatagtagtgccgtccgtcaccttcttttttaatttaaggcccgtggcatcataaaagtattcaatctttccgccaccgccaaatgttatctttacgggaaggttcaggtggttgtagcttatatccgtaatttctttataggggtccgaaaccaaattcccataatcgtcatagccatactgtacattggtccccttaccgttcatatcaaatcctgcgggattgttctccaggtcattgaccttctcaagcaggttcccgtcgttataggtatagtccagatcgtctatttctatgatcgagctggggagaagacgttcataatagtagaaaaaatttaagaagcaccctttatatagtagctaactttcgcttaccttagcttttctaaaaccacctatttatgaaatacttcaaccaaaaattaattttggcagcaatacctgtcagtttatgtatagcagcttgtggtgtaacccgatccggagcttgcatagaccctgcaaagataagtgatggcccctgcaccatggaatacaatccagtatgtggttgcgatggcaagacttatagtaacccctgtgccgcagatcgtgctggacttatctcttggagaaagggggagtgcgcggagtagtgtatatgattaaaagtaaactcttatatggatacttatattttttttttgtatattagatttatccaattaggaaaggtatttatagcataccttttatttctcaatctctcttattttactttacgttaatctggacttcacttggacctgacctggactttatctggacatatttgggcataaactgggagtgtctgggtagtatagccgaacctttctggcaacaatcttctgtttgttaataagggggcttggtcttcgggctgttttatttgcattgcaggttgtcgaaaaatcttggtggtttccaaaatttggtttagtttagtttccgtaggtgattttgagatggacaactgtctatttgaagcaccgttattatttaatattctccccagttaatagccgcaggacttaaaattttgtgggctacgattttttgatatatatatataaatttttcaagaagcgacctcttttgcggggtttggtttgatttataaaaacacaggcaatggcaaggataaaaaatgatatttttaagttgaccggcagtttgggcggattgacttttagccaagatgagcaggggacgattgtgaagatgaagggggaggtaagcaagaagaaattgagtaagcgtacccagcagagcaatatggaaatgggcggggcgagccaagcagccaaggtattgcggttggggtttttgaggcacggaaaagagctgggcgaccgttatttttgtggccgattgaacgggctgatgcgaaaagttgtggccttgggcagcggaaaacctggggaacgaaaattggatttgcgcaaacacggaggcctattagaggaatttgaatttataaatgcacgccccttggtttacagcgtgggaggcataaaggataagcccattttgaacgcgggtcggaatgaggtacagtggacctcacccccacttaaccggaaggaacaaataactgcgcccaagggggccacacacctaaagtttatactgctagcggctacggtgagccattatgagtacagcgccacgaagaatgcatatttgcctttggagcctaaatttaggccctgtagtaagcttatggaaagtgagccgattgcattgaaccaaaaggtacttgcacccataacgctaaagttaaccctaaaagaaactgaagccttgcccgaagcagtggcggtggtgagtgccgtgggggttgctttttttaggaatgtaaatggggagttattgaagattgaagatgctggggggatgcgggttttgggggttgggtgagatcaagaatttaaactaatagaaaataaaaatcccacggagtacgcaggatttaagatttttcttcggcttatagccttattgtgaatagctttcagactgtaaagatataaaaaatttattatgaatacaatattaggattagacttaggaaccaattcaataggttgggcaatacgtgatacttcagaaaataaaaatcaaataattaaaaaaggtgttctcacttttgacaaaggcgtgggagaggaaaaaggcatagaattccctaaagtcaaaaaacgaacggaaagccgtggaaagcgaagaaattatcaagcagagaaatacaggaaatgggaactacttgagttcctaatagaaaacaaaatgtgtcctctaactctaatagaattagatcaatggagaaaatatactaaaggacagccgcggcaataccctaaaactaaagagtttattgaatggttacgctttgatttcaatggtgacggaaagccagattttcacttattttctagagataaacatgaaagccattatatatttagaacgatggcgatttctaatatcgatgaggcaaaaaaagtattttctgagaatccacatatattgggtcgtgttttttatcaattggttcaacgacgaggttttaaaggccgggatgaggaagaagccaaaacaatgctcgaaggaagtaaaaaaacaggaacgtcagggcgaaatgaaattgaagattttatcaaggaatacaaatccttgggagctgctctatatcattttcaaaaaaagacgggtaatcgcattcgagaacgatataatttgaggagggattacgaaaacgaacttaaattaatttgtaaagctcaagaccttgatcaaaatttctatcataaaatacaaaaagcgatcatctggcaacgacccttaagaactcaaaaagggcttataggcatttgcacttatgagaaaaacaaaaaacgcgcggcagtcagccacccactttacgaagaatatcgcacttgggtctttataaataaccttaaaataaagcaacctgaaagttgggaacttgaagagtatttacagcaaaaaatttatccacttttttatagggcctcaaatgattttaaattgagtacaattataaatcaaataaaaaaagatggggcaaagatggagtcaaagtttagggatagacctaaaacaaaggtgctttccgccaagcttttgaattcgtttcaagaatttctaggagacaattggaaagaagaatacgagtggaattccattaataaaagaccctccaagccgacaaaaaaaaataataacaattattctttcgaagatatttggcacatcttattcacttttgacagccaagagaaattaaatgaatttggcagcactaagttaaacctgaacgatgaagaagcgctaagattttctaaaatcaaattacaacagggttatgctactttgagcctttcggcaattaaaaaaataattccctatttaagaaaaggaataatttatagtaaagccgtttaccttgctaatattcacaaagtattgggcaaagaagagataacggatgaatccatagaatatttcctttcagaaattgacaaggttattgatgaaactgatacggaaaagcgattaaataatgttgtcaattctctcattcaggatgagtctataaagtttgactcctacacaattgaagataaccgtcaacttgatgcgagtgaaaagagattggtaaatcaaaaattgcttgatgaattaggcagtaagacttgggaagaatacaaacaagaggacaaagagtttgccactcaatttgtttcagaaaagttcagaaaatatttaaaaaatcgacaaactggatttttggagcaaccgcgtctacatgataggatattccattggctccaagaaacgtacgatattcccaatgggaataaaaaatatctttggcacccttccgagcaagaaaaatatcccaatgcggaagaataccatgaaatagaattaaaaggtgatatagtttatatcaaagattctgaactcgcaactttcttttaccaaaacccgagtgcggagcaagaggctatttcattgaaattactcggtagccccgagccaatttcgaaaggttttaaaaatcctatggcgttaaaaacgctatataatttgaggcatttgctcaactatctattgcaaaccaatcaaattgatgaagacaccagaattgtcgttgaaatcgcaagagagctaaatgatgctaataaaagaaaagcgattgaaaaatggcaagcagagcgagagcgtgaaaatattgtttataaagaaacaatagacgaaatcaataaagagtgtaatacaaattttgacactcataatatgactttaatccataagatacgtttatgggaagagcagaataggatttgtctctatacagggaatccaatagctatgtgcgatttattggacggcaataagtacgattttgagcataccatccccgccagtctgagttttgataatgaattgaaaaatttgaccatttcagaaacctcttttaaccgaaccattaagaaaaaacaaatacctacacaacttccaaattataaagaaacagttactgtaaacggaaaacaatacgctgctattgaaccgcggattcaatttcttaaagacaaagtcgaccattacgaaaatctttttgatgattggctaaagaaaacaaaatatgcaagtactaaagaatacaaggattattgtattcagatgcgtcattatataaaatttgatcttgattattggcgaaaaaagttggatacttttacaattgaggaatacaaggccggatggaaaaacagtcaattgcgcgatacacaaacaatgaccaaatatgcattgccttatcttaaaacggtctttaaaaaagtagaagttcaaaaaggaaatgtagtcaatgcttttaaggaaatatacagtataaaattatcttctgaaagaaaagacaggtccaaacacagtcatcacgctatagatgcggcgatattaacgcttattccaaaattctcattacgcgattctgttttggaaaaatacaatgaagaaaaagacaaccaaacaggtaaaacatatcatgaggaacctaaagattgggacaatttcaaaccctcatacattttagatattgagaaagaaatattgataaataatcaagtcgattttaaaaccttgacaccaactttcaaaaaagtaagaaaaagaggtaagatacaatatgtaacttttacagatgagaatgggaaaaagaattttaaattggacgctaacgacaataagatcccaattgttgcaaaaggagatagtataagagggcagttacacggtgaatctttctatggagcaattaaacaacctaaaagagatgaagataataagatactttttgacgacgaggggaaaatgattttggacgaaacaatatctttagttataagaaaagatttgatttataaaaaagattcaaactccagtggatttacttcaatcaaagaaatcaaagaaaaaattgttgataaagccgtaggcgaaataatagagaaacaagtcaatacagaaattgctaatggaggaaatctcaaatcggccttagaaaaaggaatttggatgctcaacaagaaaggtgagaaagtcaataaaattagacatatccgatgctttgaaagtctaaagtatgaaacggcagctaaagtacatgagcacgattttgaatccggcaaggaatacaagcgcacaaccttagctcaaaatggagaaaatgtattctgtctattttataagggaaaagtagcgggaaaagaagagagaacaatagatataataggaattttcgatttagcgaaaatgggcattagagacgaagaagatttatatggcattccgctatttggtaccacagaagtgggcaggggtaaaaagaaaactactattccattatatcatatacttaaagcagggcagaaagtgctattctacaaagatgaaatggtggaattgaaagagctgtcacaagctgaattatcagaaagattgtacaaaacctatcaatttgaaaaaggaaaaggtggtataaaaataaaattaaaacatcatttaattgccggtgcgaatacagaaatttcaaaaaatctcgataagtcttataaggaagcgaacccattttcattcgacggtccatatcaaccactattaagattgtcaagctctaattgggactttgcaattgaaggtaaagattttgcaatgaatctagatggttccataaaattcaatttttagaatgataaaacgcaccctcttttttggaaatcctgcctacctcagtacaaaaaatgaacagttagtggtcaacttcccaaatgatgaaaagaaggaggcaactattccgatagaggatttaggatatattgtattagaagatccgcagattaccattactaatggattgttgatgaaattggtgcaaaacaagaccgcagtgattacctgcgacaaacaacatcttccctgctcacttttacaaccgcttgtaggccatacagagcaaacggagcggatacgctaccaactggacgcaagccaacccttaaagaaaaatctctggcagcaaaccgtacaagccaaaattgagaaccaagcagcacatttgcaagggagaaataaaaatgagttaaaattaaagcggtgggccacacgggtaaaaagtggcgatggcgacaaccacgaggcctatgccgcggcccattatttccaacatatttacagtaacatggtgccggaatttagtcgcaaccagaaaggcaaagctccaaacaatttattgaattatggttatgctatcttaagggctgtagtggcgcgggcattgattagcagcggcatgctaccttcggtaggtatctttcaccgtaataaatacaatgccttttgtttagccgatgatattatggagccgtaccgcatttatgtagatgctgtggtttatgaaattttggagaccggcgccaatatagaggaacttactacaactattaaaacacagctattgaccatcccggcgctcgatgtttatatagacggtaaatggagcccgttgatgaatgcggtaagccggactactaacagtttatacgactgttttaaaggagatagccgaaaaattctatatcctcattttatggtaagccggttataaatgatagaccagagcaatttttccagattaaaccaataccgaagtatgtgggtacttgtattttttgatttgccgacagaaacacgaagcgagcgcaaagtggccgcaaagttccgtaaaaatttattggatgatgggtttgccatgttccaattcagcatctatatgcgtttttgcgccagtagggaaaatagtagcgtccatattaaacgaacaaaaaataaccttccaaaaaaggggaaaatctgtattatgcagataaccgacaagcaatttggcatgatggaacttttccatggtcaaaaagaagtagaaccggacactccatctcagcaattggaactattttagaattcagaatgtcctgtcatgtgcaggcgagatctcaatattaacgcctaatttttaatcctagcacactacataaaaaacaggataccaggcttttagagctggtatcctgtgaatagtcaactaaaatacaattctgaaagcaattcacaaccgctgaacgaaaaaccccctcggtaggaaccctgtgaatagtcaactaaaatacaattctgaaagcaattcacaaccattaaacgttttctccacatagtttcttacctgtgaatagtcaactaaaatacaattctgaaagcaattcacaactacaagaggtaatagatttaatccaagaatcctgtgaatagtcaactaaaatacaattctgaaagcaattcacaactacttcaagaataccatacactaagaatagcctgtgaatagtcaactaaaatacaattctgaaagcaattcacaactgtttgcaatctgttgttcaattacttgtgcctgtgaatagtcaactaaaatacaattctgaaagcaattcacaaccggattcagcgattttctaagatacgaaaccctgtgaatagtcaactaaaatacaattctgaaagcaattcacaaccccgcggtacaacgccacttccatccgcacctgtgaatagtcaactaaaatacaattctgaaagcaattcacaacgggtgctaattctcatattggcatcccaagcctgtgaatagtcaactaaaatacaattctgaaagcaattcacaacttgagtgctgcaacattgtggggcgttctgcctgtgaatagtcaactaaaatacaattctgaaagcaattcacaaccggtagtaggcacggcgaatgcggagaatgcctgtgaatagtcaactaaaatacaattctgaaagcaattcacaaccgctttggccagcctggtttattactgatcctgtgaatagtcaactaaaatacaattctgaaagcaattcacaacccgaactacttatcaataacacagcattaacctgtgaatagtcaactaaaatacaattctgaaagcaattcacaacccttaactccttatctttcgtttccctaatcctgtgaatagtcaactaaaatacaattctgaaagcaattcacaacctaaaatcaaaaccttcatccccgtatagtgcctgtgaatagtcaactaaaatacaattctgaaagcaattcacaactagctattttgaagggtgaagatgaaaatgcctgtgaatagtcaactaaaatacaattctgaaagcaattcacaactattcccttaaaatgtagtcggcggctttccctgtgaatagtcaactaaaatacaattctgaaagcaattcacaactgggtcaacaggcggcgcactcctactcaacctgtgaatagtcaactaaaatacaattctgaaagcaattcacaactcaaagaagtttatgactttgtaaagaatacctgtgaatagtcaactaaaatacaattctgaaagcaattcacaacttttgttatttaccaaatctctattccgaacctgtgaatagtcaactaaaatacaattctgaaagcaattcacaactttataagttgtgtttcaatatccatatttcctgtgaatagtcaactaaaatacaattctgaaagcaattcacaactactaatcttttaacagtttaattatctcgcctgtgaatagtcaactaaaatacaattctgaaagcaattcacaactgaaaaatggtttggacaagaaataattgacctgtgaatagtcaactaaaatacaattctgaaagcaattcacaaccaaaattcattcaaggcacgtcctatatttcctgtgaatagtcaactaaaatacaattctgaaagcaattcacaacttggttagttttacactttcagcaatctctcctgtgaatagtcaactaaaatacaattctgaaagcaattcacaactgccgccttggcgatataaaagtaagcgaatatattggtgcgaaaagttttctctaactgcttctccgaaatctgttccagtctgtccttcggaaattgtaccgcggcattatttactaaaatgttgagcttcttgaattttttgatacagctggctatgcttttcttgcaaaaggctgcgttttttaaatctccttccaatattaaacaactgcccccttcctcttcaaccatccgcttggtttcctgggcatctgcattctcttctaaatatacaatagctaccgaggcaccttcacgggcaaagtgtacggcaacacttcttcctatgccactatcccctcccgtaataaaagctacttttccttttaatttattactgcctttataattggatcgaataatctccggctgtggcttcatcttatgttcctcccccggctgcgactgcgactgggaaggaaattttttcggtttggacttcttatctcccatagttttattttttaaaactaaaattaaaaatctcccaccaatttataatcacgtttagaattgttttaacggaatcaatacctacaaccgagaaacgccaatagaaaatgctcaacctttacatcaaagctactcctcaaaactgcggtagcgcgtaagcaaaacaaaaaatgctccataggaaataaacccaatagccgttaccgccatcaagatccttccaaaagtagattggtccaaaaaggaaaaagcatcctgaattcccttaatctcgtggttgcctgtataaattcccgcccggaaaaagaaataggcaataatggccaccacaaaggcacgggcgtaaaacccgaactgcccaaccgtcctaataacagccgaacccttgcgaccctcaagattaaactggtttaagaggccacctttaatcactccaaccgtaagcactatcccctgaatcgccagaataatgcctataccaataaaaacgtagctaagggtagttggtcccaaaaagtccagataacgagagttggcactatcatccatagggtaggtaaccaggtggtaaaaacacagaaacgcaattacaacatataccaaacccgttgtaaataggccgaagcgacgcatttttcccttgctgtccgaaccaatattttcgggatccttaaaagcttgaagaaacatccagaaagaataacaaagcaagcctacgccaagcagcagtaacaatacctgtccaaacggttgttttttaaggaataataatgcctgattggtgccagagctttccccgcccatattcaaggctgccataagagagagcacccctattaccaaatagataatgcccttggacacaaaaccaataacagcagcagttttatacgattttttcaaatgtgaaatgtgtttattggcaaatgcccgtaaagatacaactagcaaatgatattattgatgggaaaagttttggtgtctcttcaacctaagtagtacttttactttgaaagtcatagcctgacattactccaaatgatctatcaatttttcaaaaccaagaatatcatcccccatccctatttttctgcggagcatagtctttttggcctctacctgatctgtactgatgcccataagagcggcaatctccttgtctgaaaggtgcaactttagcatacaacaaaaggccacatcattttccgacaggttgggaaacatctctgatagctgatgcgcaaaggcagggtgtacctctataaacttgcctttaaaatatttccaataattattttgccccaaaagattctttaatttttttgccagaacggtggaactttccggattgtctctattttcaatcagttctattatctggttctgtaggttggacatttccatactcacctgtaccaattccttttccttgttttccaaaaccctctcacgttccagacgcagctctccctcaagggtatttttctcttccaataccttctttgaagtttccaagctcgctaccagttcctgttgcaatttcagtttgtttctattggttttatagagcaccaagccgatggttaggaggagtataaaactaagaatgcccaagagtaggatattatcctttttattattgttctcaattaaaagttcgttgtttttctttagcacgagatttcgttcgcgttgcagatcattttgataggcttcctgcagctccaaggatttggtatggtttaaggcagtattgagggaatcctttaaaaaatccaagcgttcaaaagcttgcaatgagttttccaccattccgttttggccataggtggatacggcctgttttaggaagtcgatttcattgtcggcgttcattttcagccttgtgctttttgccgaagcatttaccctatcgattacttttagagctttagaatactgtttttgactattcaaaaaatcaagataccgaacgctcgtttccaaaaagcgaggcgaacttatttgatacatgccatcataagcccgttggaatgcttcttgcgcctgctgtgattcgcccatagctacatatacctgggcaagattgctcacggctatccacatatactccttttgattcatttccctaaaggcattttccgcctcttttaaggcctcttccgcccctttataattttcttccaattgaagtaggcaatcggcgtaactcaataaagtaacataatagttggttcctttttcctttgcgaaaaccggcaaaacctcttcataaatatccctggcaaaagcaaagttactattgttgtaatataggttggcaagtttctgccttacgacactcaattcgcgttcgcttcccgatttctttagaatagcgatggcttttttgagatattccagcgccatttcgctgtttttcatataattataattggaggccatttcgccataggccttccccactccttcctgattaccggcttttttaaactgttcaatggcattttcactagcttgcaatgattcctgatattgcgaccctatacgatagtttatggctagattaagatacattttggcatgttgcaaaggataatattcagtatagtccagcgccttttccatgtagaattccgccgaatcgggaactgcaagtttattgtactgtatgcctatggtactgtaggattttccgattatggtatcatgcagttctgaagaaaattttaagagttgaaataaataaaacttggtagaatctggattgcgcacatggctttctatctttttgttgagcctttgtatttcgggattttgggcttggaggtcagtaaatatgcaaaggaagagaaataggaaggtaaaatttttcataagtaagtttggggggataaatataattgaaattactataatgtattttaaggaagtttgaaatgctagtaagaaaatgagcttttcgaaaattaaattttacaattgttgttttcatttttccaaatgatttattcacaaataattttttttaaaagaaataacgctgggaatatttaggtccattttttatttagtttacacaaattactgataaccatagcgtaacatcaaactcttttgtaataatggtaagacacccctaaactgaaccttttcgaatagaaaaaaatagacgagtttcataattttattttaagaaaactttaagagtttattatatttggagcatgaaaaagattataatattaacagtggcgcttttaagccttgccgcagtgggtcaagaaaaattggagattattgatcttgacattattagtgaaaatattgcattaaaagcaaaagcaaaagacttcaaaggtatcttggaggaattggaaaaggtgaacaaaaatgatacagcctatgccaattcccttatcaccaagtcttactacctattggctttggaacgatatgaagaagccgcagccacgatagacgaagggttaaaaatggaaattggagacctaaaaagttctttctatcaaaacaaaggaaatttattaataaggcaaaaaaagtacgacgaagctattgctacatttaataaagggttggaactgtaccctgcaaatcatttcttactttataacaaagctgtagccttagatgaaaagggacttcataaagaggccgtaaatgttctagaacaggtaatttctataaatcccgtttatgccaatgcctatttgaagttaggatttatatattatgcccaagagcgtccatcacaggcattgttagcttttaacatggcgcttatgatggagcctgatagcgaaacttcgtttgaaaggctcagggcaatcaacacaatgtttagcaccgcaaatgaaaacaagcgtacccctggcttgatactttccgaagacgataaggcttttgatgaaattgacctaattatcagtaaccaaatagcattaaataaaaattataaaatagataacgatctcgatttttcattgacaaagcaaaatcatgcgctgctggtaaaacttatggactttaagggaaaaggagatttttggagtaaaagaatagttcccttctttcagtggattcaaaaatccgaatattttgatgcttttagctataccattgcctattccatagaaaatgaaaaacttaaaaaaattgttgaaaaaaacactaaggaaataagcgaatttataggtgcagcgctaccccattgggctaaaattatccaaaaggacaataaatcattgctcagcgatgagatagtacaatatgtttattccggaaaccccttacacttaagtgctatgggcacttacaacggggatgagaaacaaagtggagcatgggtttattttaatcaacaaggaagaaaagcaaccgaagcaatatatcaggacggggaacgtaacggcccctggaaatggtttgacgaacagttaaacctaaaagaagtagctgtatataagaatggtgagttacacggtgaaaatattgtctattatccgaatgggcaaatctcaattaaggcatttttcaaagatggaaagctagatggcgaatatctctattacaatgagaaaggggcgcttgaacaaaaaaaatatttcaatgcaggacagttaacaaatacttacactgcatacttcagtgtaggtgaggaaattcctgaatatgttattgaatataaggatgataagataaaaggcaaagcacttgagtattatgccaatgggaaactatattcagaaattccctttgttgatgggacacgtgtaggagttgaaaaaacatactatataaatgattccctaaaaaatgaaattccctatgaagcaggtaaacttcaaggtccctataaatcctattatgcaaacggaaaatcatttgaaataggcacctatgaaaatgatcttttatatgggccgtttattgcctattatcccgatggcatccttcaaagcgaaggcaattatgaagaaggattgctggaaggaagctatacatactatgatcatgatggaaaaaaatattacaactacacatatcgtaaaggagatgttatcaattatcggtttttcaataaaaaaggtgagattataaaagaaggcaaaaaaagagggggcgagttttactataatggctttgcctctaatggaaacctcacttcggaaggactatacgacgtgtccggtggcaaaaagggaacgtggaaatattatgacaataatggaaatttaaaatcaacagggaattatgaaaatgaccgggcccaaggtaagtatatttcatattatcccgatggcaacaccgaatgggaagggaattataaatacgatacactcgtaggctattatgtaagttatcataaaaatggcagcatggaaaatcaaggaggctataaaaatggggaacaacaaggagaatggcgattttattatcctgatggaaatttggaaagcataaattatttgcatcaaggaacatttcatggaaagcaggaatattttggtgtggaaggagaactaactaaaatcgctttatacaaacgtgatgaccttatagctgaaaccttctacaaaaaagacgggacagaatttcaaataataaactacacaccctcaaaaaaagatacactcttagtattgaaacattttaacggtaaagcatcaactgagaccacctacatacatgacgtgatgcacggtccttatacagcttatttttttgacggcagtcttcaagggaaggggcagttcttaaacggtatgaaaaacggtacttggaactggtattttgaaaatggaaaaccaaatgtagcggccaagtatgttttggaccttttggacggaaaattcattcgctattatgaaaatggtcaaattgaagacgacgatttttacgaattgggaatgcgaagcggtgattggaaatcttattatgaagatggcgccctctattccaacacctcatatgttaacgataaagtacacggccgaaaggaattctacagtcctaccggcaagttacaattggttcgtttttatgatcatggcgttttgataggctatagctataacggtaaagacggtaaagaaatagatatgatcccaattgaaaatgaaactgcaaaaattaccgcttattacgataacggaaatgtttcaagagaattggaatttaaaaacgggcaatatgtgggttcttacaaaacctactattataatggacagctcaaagatg

SEQ ID NO: 4324 - DNA, 16265 bp, synthetic construct
  misc_feature 1..16265: note = Synthetic
  variation 15681..15707: note = note, n is a, c, g, or t
  source 1..16265: mol_type = other DNA
  variation 15933..15963: note = note, n is a, c, g, or t
gtggcggtggtcccgatcaaaatttaattattttggacgaagctccagtatacaatgctaatcatttatttggtttcttttctgtatttaatggcgatgcgttaaaaagtgtggagttaatcaaaggaggttttcctgcaagatacggaggtagactttcgtctgtaattgatcttcaaatgaaagatgggaataaagaaaagattcatggagaggctggtattggccttattgctgctcgtttaacgctagaaggtccaattatcaaaaacaaatgttcgtttcttatatcgggtagaagaacatacatagatgcgcttgttgctccttttcttcccaaagatggaaaattgggatattacttttatgacataaatgcaaaaataaattacgtatttaatgataaaaatcgattgtatttaagcggatattttggccaggataaattttatttgaaaagaaagacggcggattcagaaagcatgtctggaattaattggggcaatgcaacaagtactttgagatggaatcacttattcaatagccggttattttcaaacctctcatttattttcacgaactataaattaggaattgagaaccaggaaaaatatgacaatgattattataatttaaaatacacgtccaatattcgtgactttggagtaaagtacaattttgattttatgccccatccaaatcattatatcaggtttggcgccaatgctacctggcatcattttattccccaggctttggttatcaaagcttccgatccggttaatgagctcaatattaaatcgcgtgccattgatacctacgaaggggggatttttattgaagatgattggagaatgacttccaagcttaaaatgaatattggtttccggctttctgctttatcaagtaaaggaaatgatttctttaatcctgaaccaagagcagcggtaagatattttttaggaaacaatttctctttgaaaggctcttatgccatgatgaatcaatacttacatttattatccagcacaggtatcgggctaccaacagatttgtgggtgccggcaaccaacaaagtaaaaccacagcaatcgcaacaagtggcgctgggtttagcgaaggacttacctaacaaaaacataaccattactgttgaaggctattacaaatggatgaaaaatgtattgaattacaaagaaggcgcaaactttttgaatgtaggtgataatagcaatcccgaaacgcaaaacgattggcaaaccaaagttgtttcgggcaccggtttaagttatggtgctgagctgttgattcaaaaaaaagttggaaaatttaccggatggattggttacaccttatcgtggacctggttgcaatttgattcgttaaactttggagaaagatttcctgcacgttacgacagaagacatgatatttcggtagttggcatctataaaataaatgatcacattaccctttctgctacctgggtatatggaacaggaaacgccatcacattaccaatcgcttcttatggcatagagcaacatacgattccgggcacacaacagcaagcgcgacctggtgagctttggccttacaccataggtggtgattatggaaaaaagaattctttccgtatgtctccgtatcatcgcatggatattggcatccagttccataaaaaattaaagcgttgtgttcgcacctttgaagttagtttgtataatgtttacagtcgtcaaaatccgttcttctattatataagttacgataatgactcaaagaagaacaaattgatgcaggcatctttgtttccaattttaccaagtgtttcatggagttataaattttaaatgatgaggatattttttatattactaataagttgttttttgtttctgtcgtgtacaaaagaagcgatggtgaaattacccgaagcaaaaccgttgccggtggtgtattcgtatatatgccctactgactccgtcatccgtttaaaattactatcgtcttcgcctttatatagcagcaatcaaatagatgtcctggcaccggtttccgatggagatgtgaagattagcagtacgcagggaacaacacaactcatttttaatcaaaacacacagtattacgaattaaacacaaatacctaccctattgtacccggacaagtttataaaatgacggtaataacaatcaatggtgatgtagccacagcggaaacacaagtgccctccgtagccgttcctctaaacacggtaacagtagaaaccattactgaaaattaccaaacaagcgatagaataaaaaccttttttaccgatgatgctaatggcgtaaattattaccggatagctgcatcacatggttttgtttataatggtcaaactgacacaatagttaacgatacgcgaattaatgagctgtatagcgatttgaaccataatggagaaagcagctctttggatggtaggttttatcaaagagttgattctactcagtactattctactgagtattatgatgtttttctttataattgcagcgaatcgtattacaagttttataagtcgcttaaaaattactctggcaatggaatcagttttccccctcaagccgagtcaaccctcatttactccaatgtaaaaggtggttttggttgttttgcagcctatacaagtagtaagctcagatacaaaaagaaataacagatcaatttctttctctattcatgaaatcgatccttttcttaacgcttgttccttatgtctagttggtgaggtatcaattaaggggccgtggatcattgaattggcgcacgtaaggattaatcacgtggtgtttctttaacttttgttcaaatgaacaaaagtaatataaaagggtcagagttgcccaaaatgtttaagtaatacccaagggtcaaaggtatagtacactaaaaccattggtacgaccgacacaggagcgatgcgcccggtagcgctcgggacctctaaaaaaaccctctgaatcaattgatttcagagggttttttgttcgaaatcttatcgacggcccttagagatattaatctgttttaaatcaacgatctaccgttcgaactaagttaggcgttcaacgtgacacgcgcttctctatcttgcgaatctgattatgaccgtgttcatttttcgggttcatctcgacggactttttataattgaacaatgcaagcgaatactccttagccttcatgtaaccatcggccaggctgtcataacaattccaggatttcggaaaatattttacgttcagtttaaatacattaattgctgcagttaattttcctttttcaagtaacgcgtatccaacatcatttacatcaagttccataaccttgatcataggatatagtttttcagcttcaataaaatcatcaagcgccagggagtcgttagcgacgctgcttactgccaaagaccggacagcttctttagcattattccattttgaataatggaattggcctgcggtgttatcgggaaacatttcagggattatcaggattctatctttattgttgagttcatttttgagattgaatttgactgttactctgtaatcatgataaaaatataagtttactgttccttcattgagatcataaattgttgtgtaaagagtcccaccaaatccctttccaaaatcctgatgaagagtatcactcagttgagtaagataactcatgcttgtgtcaatacgctgctccatcaactttcttcctttctgatagtatggtatgttcagatcctgaacattagaggtttgcgaaggacaaaaattagataacaaataattatcctcatttcccatcatcatggtatcagcttctaccaccaggtacttaccgtttttttcaacgtataataacatgccgccgtttaagggactcaaatcatatttatctaacattgcagcaacttcagcagtattctggcatttctttatgacgtctttgaagagagtcgggtaaaatttcaatttcccggctttgtatttgatttgcctttcctgtacagaaaaaccatcaaatacgaggcccttttcgttcatgcctccctgtgcaacaaggttatcctgtcctacatacattgctccatattcaccggcttttcctttttcaaaccatattcgcgtatttgcatcccaatagtcctcattatttccaacaaaggttttcccatttttggttattttatatacggtgcatggaattgcatgtaaaaaaccaaaaaggaaagtgatagaaagtaattttattttcatagtttctgattagaagcttgctgttaatgtagattattaatttcagttatagtataacactttattttagaaaggatacactaaacctaattttattatcacctgttaagccccagtcaatttaaaatagtcatataaatcagccagtttccgtatgtcctctagcaattcgttcgaaattagtatgtttgggacttctttaaaaggcgcaaattttaaaatttgcgccttttgtatttttaatccttataaatatgaaataagttattttaaatgatggacttattttaaaatcaattcttaagaggctaatcgcatctttttcacaaaaaattatgaaaaaaaccaaaaaaaatttcataaaatttttttgagcaaaatcaatggctgcattcattctgatgtaagatttttcgattttttgtaaattctctgaaagtgtatgcgtttgtttttaaaaataaatgatttagttttggagttgtacttataatttgccctatattttttaacacattatgcaatgacaaataacttgataatcactacaagtgattatagaataaacaaattatgaaattttgatttaaaaaataatttatacttttaatgtgccctaaaaaatagtgcatattattttaacacttaaaattaatattataagagaaaaataaaataataaccagcgtctaaccaatcaactgtatccgaaaaggtcgaattttcaaattgaaacagaagtattgcaaaacgctcacggacatacgtgggcttgctttctttgtttcaaaggtattcgaccacctcggatatagagttagcatccccacgttaacaaagtgttcgtgcataaaacaagacaaactatgcctacactcaactggattggaaaagaaaaaatcatcaatcatcaccttgatgtcccttaccgtgtattaaaccaccaatatgggtttactgaaaaagcaaaacacaaaacagaaacccatagtggcaacaagatcattcatggcgataacctggaagctctaaaatccttactgccagaatacgaagggaagataaagtgcatttatattgacccgccttataacacaggcaatgaaggttgggtttataacgataacgttagtcatccgaaaattcaaaaatggttaggtgaaattgtaggcaaagaaagtgaagatttgaccagacatgataaatggctttgcatgatgtatccaagattacagctattacatcgcttgctcgcagatgatggcgctatttttatctcaatagatgataatgagcaagcgtatctcaaatcaataatggatgaaatttttggaccaaaaaatttcattggaagttttatcattaatactacaccaaatgcgcgtgactatggtcatataggaaaaatgcatgaatttgcacttttttatgcaaagaaagagtatacgctaacttcaaatatggttcctgataaagataaaaaattcaaatatcaggacgaaataagtggattcaatattcatcctttgtataatagtaatgttgcattcacacctgacaaccgaccgaatctatattatccattctatctttatcccaccaatattttagaaaaagacttttttgaaataggccttgagaaaaaaaataaatcaattgagatattccctccaaaatcagtaaaagacaacgttcaatttgtttggcggtggggaaaagacaaatctttttctgaattaaataaagaaataattggatacaaaaccgaatctggagaatatagagtagttcagaaaatgcgtcactccagtaaattgataagatcaattcaattagagaaagaacacactagtagaagagggactgcaattttagaagaaatattttctaaaaaaacattttcatttccaaaaccgactgatttaattcaattattcttacaagtagtttctgaagaaaatgcaattattctagactccttcgcgggaagtggcactactgcccacgcagttctcaatttaaataaacaggatggcggtaatcgcaaattcattttagtggaactggaagactacgccgaaaccattactgccgaacgtgtaaagcgtgttataaaaggatacggagatacagaaggaacaggcggaagctttgattattataccattggtgagcctttatttgatgagaaccaaaacctgaatgaattaattccggaagaaaaaatcaaagcatatatctggtattcggaaacaaggagccagtataaacctcaacaagacaatccgcattttcttggtatctataatgataccggctactattttatttataataaaaaggagccgacaaccctggattttgattctttagctgaacatattactgaaaaatcagaacgatatgtcgtatatgccgataactgcttactaccggaaagttttttaagatcaactaacatcgaattcaaaaaaataccacgaaacattacccgtttttaaacgtcgcttcgagcgtagtctagaagcaacattatatattatattatggaattaaaaccctaccaaaaacaggttattgatcacctgaatggttatttcaattatctacaggaagataaacatcctgccaaagcctttaaccgctattgggaagacaaagccggtatgtataatccgctcagcggcgatggcatgcgtccttataaagataatgttccggaggcagttcatttaagcattaaagtgccaacggccggtggcaaaacctttattgcctgcaatgccattaaaacaatctttgatgcgatgccacaccaaaaaacaaaagcggtggtatggctcgtgccatggagtaatttattggatcaaacggttaaaaatttatccgatcccgatcatccgtattgtcagaaattgaacagcttatttaataaccgtcttagcgtttacgaaaaaaaagacttgttacaaggtgcaagttttaatccttctattgttcaggagcaattaagcattatggtgttgaattttgcatcagtacgtgcaaaaaataaagatgaccgaaaaatatttgaacagaatggtgcacttgctgttttttcgcaaacgtataaaaacaaattacatgtgctggaaaacacagatgaaacggcgctgattaatgtaatacgaagtttgaacccaattttagtggttgatgaaagccataatgcagaaagtgacttaagcgttgaaatgctgcagaacctgaacccaagttttattctggatttaacggccacgccaaaagaaaatgctaatgtcatcagtttggtttctgctatggaattaaaaaaagaaaacatggtgaaacttcccgttattgtatataatcatgaaagcattgaaggcgttatagaaagtgccattcatttacagcacaaactggaaaccgaggcgttggaaatgcaagcaaacggaggcaaatatattcgtcctattgttttgttccaggcacaatcaaaggggaaagaagaaaatatgacgtttcataagctcaaacaacaactcattaagattggcataaacgaagaaaaaataaaaataaaaacagccgacatcaatgagttaaaacaagttgatttactcagtaaagactgtcctgtgcgttacatcattactgtaaatgctttaaaagaaggatgggattgcccctttgcgtacattcttgcttcattggccgacaggtcttcacaaacagatgtaacacaaatccttggtcgtgtactgcgccaaccttatgtcatgaaacataaaaaccccatgctgaacgtttcctatgtattaacttcttcttccaaatttcatgagacgcttaactcgattataaaaggcttacaggattgtggctttagtgaaaatgattaccgtggaaaagatgttatgcctgaaaacataaaagaagaaattacacaaacaatacctgaaaacaaatcacaaaaagaaaccaaacagccctttaatgagatcaccgaaatatttgacccaaaaaaaatttcagttgatatcaatactaaaaaaacagtttcaaaacctgttattgccgatatagaatcaattgcaattaaacagagccaggaaatggatcaacaaatatcaaatcaggatgatacagattatattattcaaaacctttcagaattgggaattaaagcaacatattataaaatgcgtgaaagcgttgaggcacaggcaaaacaaattacgcttccaaaatttatcatcaaagtaaaaaatcttgaaaaatttgacctcgaaaatgattcggtattacttgacagagcaaacttattaaaaggctttaagttatccgacaaagggcatgatattaaatttgaaagcattgtatctgaattatataaaattgatacggaagaaatacgaaacggagaataccggatgagctcctataagtttgaaaatccacaattacaggagcaagtggcagaatatattttagctaaacccaaagaaggccaggtaaaagatattatgcaccgtgttgtaaaacaaataggcgacatgtacccaattcctgatgccgatataaaaaaatatgttgggcgtattttggaagatatgtccacagaacaactgcgtgattttttacaacatcaattatcttataccgacctgattaaacaaaaaataaaattactggctgatggacatgcagaactgatttttaatgaatggatagatattggaaagattaacacacaaaccgcatggaaattgcccgccatgattattcccgtaaaaacctctgccaacattagcaattcattatatacgcatgaaggcgatatgaatgggttggaactgcaatttattatggaaatagccaactacccaaatattgctttttggcaccgcaatcttggaaaagggaaaggcttttcattgaatggctataaatctgaacattatcccgattttattttagtaactaaaaacaacaaggttattttggtagagacaaaaggcggtgaccgtgacaattcggatagtgaagccaaactgcgtctcggcaaaaagtgggcggagctttcaggtcccgattataaatacctgatggtatttgacaaaaatgctattgaaggcgcttataatttggacaaggctaaagaattgatcaaacaaatgtagattaaataatatcaaccaataaaaaaactatggcaacaaccgtttattctttaaagaaaaaagcaaacacagatgaaatgcacgtatttgagtgcgctcctactttttctggtttctgcgcttgcaaccaaaaatccatatgtggcaagatggataaatcagaacatcacctggatatattttcatgtgtaagtgaggatactgctagagaaggaagtgcacaaagaggaagaaaagtttgtggcacgtgcgttagtaaattgtacactacttattaagtatcaaaaatatgttttatatttattatacaaaaaaagcgagagttgcctcccgctttagatgttttcataatggagttgatttaaataaacgttagaaataaaaaatacattaaataaaaaaatcccacggagtacgcaggatttaagaattatcttcggcttatagccttattgtgataagctttcggtacaaagctaaataaaaaattgaaataaaaaaatatggaaaaaattttaggtgttgatttaggaacaaatagtattggatgggcaattagagatttaaacgaaaatgaaaaccaaataattgacaagggagtactaacctttgataaaggagttgctgaagataaatcaggcgaacatcctatggtacaaaaacgaacggatgcaagaggaattagaagaaactatcaggctgaaaaatacagaaaatgggaattattaaaaattcttatcgaaaacaaaatgtgtccactttcaattgatgaattgaatgaatggcgacattactcaaaaccatttggtagaaaatatcctaaatctgaaaaattcatacaatggctaagatttgactttgatggggatggaaagactgattttgaaagatttggatttagtaagcatgaaagctattacttatttcgtagcttaattgttgatgaaacaaaaaaagaaatttttaaaaaagaaccatatataattggaagaatactatatcttctagttcagagaagaggttataatgacggaagcgaaatagatgaaaatgaaaaaaatgaattaagtaaaactattatgaaaggtggcggggacgctggcgctttaggagcgaatgaaatagaaccttttatagaaaaatacaaaaccctaggagctgcgctatatcatatacaaaaagaacaaaaagtaagaattagaaaacgatataatctaagaagcagatatgaagctgaattgaaagaaatatgtagagttcaaaatattgaacacctttataaattattttggaaatcaattatttggcaacgaccgttaagaggacaaaaaggtctagttggcatttgcacctttgaacaaaataaacgcagatgtccaattagccatcctctgtatgaagaatatcgtacatgggtatttataaataatttgaaaataaaaccgatcgatgattgtgatactggtaataaaaaaattcaagagatattgagctctatagtatacccagagttttatagggcttctcccgattttaaattgtcagtaatcaagaagaaattagaaaaagtaggttatttcataactgctaaatttcctgacgataccaaagttaatactgtacaatttttgtatagaattcaagagatttttggcgatgaatggaaagataaattaggttggcaaaatttaatcgaaaacaaacctaaagatttagattgtaattataatatagaagacctttggcatttacattttgttaaaacaacaaacaaaaatactggggaaactgggaccgattttttaaaccgttttgccgtagaaaaactatcattaaatgaagatgaggctaaatctttttcaaaaatacgcttacaacagggttatgcaaccctaagtgtaaatgcaatcaagaaaattgtcccatacttacaaaaaggctttatatacagtgaagcaatttacatggcaaatttaccaaaagtacttggtagaaatgaaattacagaaacagacatacaacatttttctcaagaagtaagtgcaataatacaaaatgataaactacaaaataaatatattcagactgtaaatgaactcattagtgaccaattgaatgcagaagcagatactcgttttggaatggatgaatcatatcaattagatgaaagtgatttaacagacattgaaaataaattgcttttagtatttgggcatgtttcatggaacaaacttagtaatatagaaagacaagatgctctaaattttgtgagtaataaatatctagcctttctacaaaaaaagatttactctaaaaatgtatttgaaaagccgaagcgattacatgacaaaatattcaattggataagtgaaacatatggaattaaattagaaaataaaaaatatttatggcatccttctgagcaagaaacttataaaaaagcaattgaaaaaaatggcttaaaatatttaggcagcccagagccaattagtaaaggatttaagaatccaatggcattgaagactttacataaattgaaaaaattaattaattatttaattgaaacaaagaagattgatgaagagactagaattgttatagaaatagctagagaattaaatgacacgaataagcgcaaagcgattgagcgttggcaaagagaaagggaagctcaaaatgttacttacagaaagcaaattatagaaattaacaaagagtgtaaaacttcatttgatgaaaatgataaaaatttgatagataaaataagattatgggaagaacaaaatagaagatgtatttatacaggaaaatcaataggtttatgtgatatccttgatggaagtaaatatgattatgaacacagtatacctgcaagtatgagttttgacaatgaattaaaaaatttaacaattgcagacaaaacatataaccaacaaattaaaggcaaaaaactacctactgagtgtcctaattatgatattgaatatgtatataatggagtgaaatatgaaccaataataaacactttacagagtatctttggtaaattaataatagaagaaaaaactataaaaggaaaaaaagttactaaaagtaattttaaaaaaatcattgatttagagaaaatttatcaggaatggaaggacaaaacttcagaagataaagaaataagagacaatattattatcaaacgtcattatctgaaaatggagttagattattggcgctataaacttcaaacttttacaataactgaatataaagctggatggcgaaatagccagttaagggatactcaaactattactaaatatgctttaccttttttgaaaaccgtgtttaaaaaagtagaagttcaaaaagggaatatcacatcagactttcgaaaaatatttaaaatacaacctcgtttagaaaaaaaggaacgcaccaaacatagtcaccatgctattgacgcggcagttctaacactaataccacctgctactatacgtgataaaattttagctaaatataatgaagcaaatgaaataaatacaggttatcatgaaacgccaagacaatggactaattttaaaacctcacacatcataaatatagaaaatgaaattttaatcaattatttaccagaacatcgcacacttatagctaccaaaaagaatgttcgtaaacgaggagaagtgcaatttgtaaaagaaaagtcaaatgatggaaaatggcattataaaatagatgagaagggtaaaaaaataccattggtagctaaaggtgatagcattagagggcagttacacaaagacagttttttcggtgctataaaaagtgggaaagaaattatattagtagaacgctatcccatttcatctttcactaatataaacgattgtaaacacattgtagatgataaagtcagggagttagttcaaaatgaattacaaaaaagaatggactcaggcttaagttttgacaaggctaaattagaacccgtaccttttcataaaggcaatgaagtaattaagaaagttcgttgcaaagttgctgctggaagaggttatttaactacagaaagggctatagcaattcaccaacatgacttcaaatctaaaaaagaatataaacatcatatctatgctcaaaatgatacaaatactttttgtctgtactatgaaaatacaattgataaaaaaataaacagagcatttagaataatgggattatttgaactagcacaattgagtataaaaaacgaaaatgaactactaaatgaaccctattataataatattatcacgggcaaaggaaaaaacacaacagaaatccctttagttcacatacttaaagttggagtaaaatgtattttttatgacgaaactttagaagagttaaaggacctaaatcataaaatcatactagggcgtttatttcgtatctacaaatttaatgagataggagttacaagatacatttatttacaaaaccatctagaggcaagaaaaaatgatgagttaggtaatggagatacagagtttaaaaaggataaatatcattccagattaatgattggggcagataaatttaattgtgcaatagaaaatagagattttgaaataaaactcgatggtacaataaattggttattttaatttaaatcaaatgataaaacgcacactctattttggtaacccgtcgtatttgagtattaaacatgctcaattagctgtccgtttacccgaagtagagagttttgtcagttcgagcgtagtcgaaaacattactgaatttaaacgggatgctttagctactatccccgttgaggatattggtattgtggtcatagataatccgcaaattactttaacgagtggtttgttacaagcactacaagaaaataatgtagccgttattatttgtgattaccgtcatatgccacaaagcttgttattacctattgagggtaacagcatacagcaagaacgatatgaggctcaattaagcgcgagtgaaccattaaaaaaacaattgtggcagcaaaccatttctcaaaaaataaaaaatcaggcagctgccttagaaagcaaaacattacctgcggattatttaatacccttgcaccgcaacgtaaaaagtggggacacggataattgcgaggccactgccgccgtgtattattggcaaaccattttcaggcatgtcaacggctttgttcgtcaccgcgaaggtccgccacccaataattttttaaattatggttatgccattttacgagccactatggcacgtagtattgtagccgcgggcttgctccctacccttggtatttttcataaaaacaggtacaatgcctactgcctggcagatgacttaatggaaccttatcgcccttatgttgaccaaatagtccatcaaatggtagaagagatgggcataacagaagacatgaccaaagaacataaggctgttttattaaaaataccggctgttgatgtgacaatagatggcgaaaaaagccctttaatgatagccacacagcgcaccgcggtgagcattgtaaaatgttttaatggcgaacaacgtaaaatactgtaccctgaactttaacactttccccctttgaagggggtgtccgcaggacgggggatgtaaatattaatacaaacaccatgaacctaaacaccgaacgcttaaacgcttaccgagttatgtggacattagtcatgtatgatttaccaaccgaaaccaaaaaagaacggaaagcggcagcccgtttccgtaaagaattaatgcaggatggcttcagtatgtttcagtttagcatgtatgtgaggcatagtgccagcagcgaaaatgctgatgtacacaaaagaagggtaaaaacactattacccgaacatggtaaagtggggattttacaaattaccgataagcaatttgggcaaattgagctgttttatggtacaaaaaagcacgatttgcctgatgttccccaacaattggaacttttttaacattttggcagaccttgaaggtttttaaaaccttcaaggtctgccaaatagaaacaaaaaatccgcctttcgggcggacaattgttcgataaaacctcatttttattattgataaatttacctaaaaccattgattttgttgtggttttcgacttatatggtgtttatcaataagtcannnnnnnnnnnnnnnnnnnnnnnnnnnattttgaaagcaaatcacaaccattcatcgatgataattaaatcgggttttggtgtttatcaataagtcaaagatacattttgaaagcaaatcacaaccagtaaacaattgcgaaatctttaaattaggtgtttatcaataagtcaaagatacattttgaaagcaaatcacaactagcaaagggttttgatgaatgtatgagagggtgtttatcaataagtcaaannnnnnnnnnnnnnnnnnnnnnnnnnnnnnnttttgaaagcaaatcacaactaaacgtaattgactgtaaccatttgcaccggtgtttatcaataagtcaaagatacattttgaaagcaaatcacaacgctattaaatcattctatcaaattacagttggtgtttatcaataagtcaaagatacattttgaaagcaaatcacaacattcgattgatggtgaaataaaacgaactgggtgtttatcaataagtcaaagatacattttgaaagcaaatcacaacaaaaactaccaattgaagaatccgcaccttggtgtttatcaataagtcaaa

SEQ ID NO: 4325 - DNA, 16246 bp, synthetic construct
  source 1..16246: mol_type = other DNA
  misc_feature 1..16246: note = Synthetic
caggaattattggagcttcaaaataattctgcaattggtaaaaatttagatttagttagcacagaaaatccagacaaacttgaagccagatacggaaatcttttgcctgtattggtaaaagcaatacaagagcaacaagaacaaatgcaaaaacaacaagaattaatttcagatttaaaaaaagaagtaaacaaactaaaatcaaaatctgaaaaagattattcatcaaaggagtaacaaatgaaaaacacaatattaattaataatttaatccaaggaggatttatgtatagatttatatttgtatttttatttttaataaatatttcttttgatatttggtaagtctccttaattattttaaacaaaaaaagcatttctaaatagaaacactttttttgtaatatgtgatccggattggattcgaaccaatggcctactgcttagaaggcagtcttatgtttcttttcaatatttattgttatttattaatatattataaatcaacattttatatttttttatttttaatttcttttctttatttatcggtttttattaactttgtttaaactatgtttaaaccggggaaaatatgaatacatcagtaagagttgtattatacacttcaaaagtgttagcaaatggagagcatcctgtaatgttgagagtaacaaaagatagaaaatcaaaatatatatcgactggctttaaatgcagtaaagatttatgggatcaaaagaaaaatctacctagaaagagacaccctttatacattgatgcgaaaattttaatttctaaaaaaactgttgaagctgaaaagctgatcattgaattagaaaatgaaagtaaaaatttatccgctcatgaaataaaaggtaagcttaaaaaggccaaagtgaacaatccttttgtttttcaatattttgattcagtaattaatcgcttaaaaaatagtggacaaataaaaaattctttgatctataaagatgcaaaaaggaacttgagtcattttacaaattcaaaagacctccacttctcagatattgatattgagtttttaaacaaatatgaagaatatttaaaatctaataaaaatggtgggaatacaatttatatatacctgagaacattaagagcattgttaaataaagcaattaaagaagaaatttgtagtgacaagtactaccctttcaaaaaatttagtttggctaaatatgcaaagattaaaaccgaaaaaagagctatttcaaaaaaagaaatattaaaaataaataatctaaacttattaaaacatcctcacttaacagatgcaaaatatatattcatgtttagttatttatgcagaggaataaattttattgatatagcattattgaaatggaaggatataaaaaatggtcgcttgatttatacacgaaaaaaaacaaatgagttatttaatattgaaatacggccggaggtttatgaaattttaaaattttataaaaaacaaactttttcaaattctgaaagttatgttttcccaattctaaatgaaacacacaacacaccgcaatcaatttttaaccgtaaagagaaattaattagaaaaattaataccgatttaaaggaaattgctttattaacaggaatagaaagcgaattaacgacttatgttgcaagacatagttatgctactattttaaagaaaagcggaattacaactgcaattatcagtgaagctatggggcatgatagcgaaaaaactactaaaatatatttagagagttttgaaaataatattttagatgcagcaagtaatgctttgctataaagtaacagttaataacaaaatgagttaatcttcagtaataaatttgacaaacaccgaaaatttctttctctaaaaaaagtagaaataattaagagcattgattttttacccaattagtgcatttccctcttttagcctaattatacccccccccccgataagttgtattgttttatatatattaatctcctaccttacaagatatttttctcgaataatataattttttgctaataaaatattttaaaaaagccccacggaatacgcagggcttaagaataatcttcggcttatagccttattgtgataagctttcaaaccaaaactaaatactaaaaaccaataaaacaaaagaaatggaaaaaattttaggcctcgatttaggaaccaactcgattggatgggcaattagggaaataaatagtgaactcgaaaatcagattattgataagggagttttaacatttgataaaggagtagctgaagataaatctggtgaacatccaatggttcagaaaagaactgaaagcagaggaaaaagaagaaactaccaagctgaaaaatatagaaagtgggaattacttaagtgtcttattgaaaacaaaatgtgtccattgtcaattaaagaattgaatgcatggaggcagtataaaaaaggaattggaagaaaataccctcaaaacgaaagatttatcaattggcttcgttttgattttgatgcagatggaaaacccgactttgaaagatttggttttagtaaacatgaaagttattacctattcagagcactgatcgtagatgaaaacaaagtagaaatttttaaaaatgaaccacacattattggaagagttttatatcaattagttcaaagaagaggttataatgacggacagaatattgatgaaaatgaaaaaaatgaattaagtaaaaccattatgaagggaggcggtgatagtggtgctgttggagcaaatgaaattcagccatacatcataaaatacaaaacactgggcgcagctttgtatcaaatacagaaagagcaaaatgtaagaataagaaagcgctacaatttaagaagtgattatgaaaaagaaattaaagaaatatgtcatgttcaaggattggaaaatttatacaaagatttttggagagctattatttggcaacgaccactaagaagccaaaaggggttagtgggtgtttgcacatttgagcaaaataaaaggcgctgtcctataagtcatccattgtatgaagaatatagaacatgggtttttataaataatctgaaaataaaaccaattgctgaagatgaaactaaaactaatgaagaacaaaacagacaattgttatctctattaaatgataatgtttatccgcaattttttaaagcagcagattttaaattatcaagtattgttaaagaactgaagaaaaaaggttttgaaataacagcaaggtttcctgatgacacaaaagtcatcaacctttcttttttatataaaatgaaagaaatttttggagaaagatggaaggaagtgacagaatgggacaatctcttaaatgaaaaaaaagaaaaacaaaaatacaatatcgaagacctctggcatttacattttgtaaagaaagacaataaagaaacaggcgaaactgcttttgattttctaaaacgttttggaattgaaagactgaaactcgaagatgtaaaagctgaaatatttgccaaaacaaggcttcagcaaggctacgccacactaagcctcagtgcaattaaaaaaatattgccttacctgaggcaaggatttatttacagcgaagccatctatttggccaatctacataaagtgatgggagttgcacatgtttctgacgatattgtaaaacatttttcagaagaagtaaaaagaattataaaggaaaatagttttgaaaaaaaactcaataaagccgccaatgaattaataagtgatcaactcaatggtgaaaataggtttggaatgaattccaattatcaattagatgaagacgaccgtaaagatattgaacaaaaattggttgaaacctttggtaaatattcatggaacaatcttgataataaagaaaaaatcattgccacaactacaattagtaataaatacctgacctttcttcaaaaaaggattcatgcaaaaaatgtattcgaaaaaccagaaagattacacgacaaaattttcaactggataaaagatacttaccatgtacctgaatctaatattcagtatttgtggcacccctccgaacaggaaacctatagccgagccattgagaaagacggcaaacattatttaggaacaccagagccaatcagcaaaggtttcaaaaatccgatggctttaaaaacattatataagcttaaaaaattaatcaactacttgatttctgttggcaaaatagatgaagatacgagagtagttattgaaatagcacgtgaattaaatgatacaaataaacgtaaagcaattgaacgttggcaaagagctaaagaaaaagaaaatgacacttacaaaaaaactattgacgaaattaacaaggaaagtaaaacagattttaatagagaagataaaaacattatagataaaataagactatgggaagaacagatgagaacttgtatttacacaggaaaaaccatcgggctttgcgatgttttaaatggggtaaaatacgattacgaacacagtattccggcaagcatgagctttgacaatgagcttaaaaatctaacaattgccgacagttattataacagagaaatcaaaaaaaagaaattaccatttgaatgcccgaattatgaaaatgatgctttagggttttcagcaattttaccaagacttgatttcattagaaataaaattgagcattacgaaccattgtatgatagatataaatatttcgcaaaaaatgcacaaacaaaagattcaaaagacagaaacatagttgataaacatattgcaaaaatgcatctggactactggagttacaagttgattacttttacaacaactgagtataaagaaggctggcgaaatagccagttaagggatactcaaaccattaccaaatatgcacttccctttttaaaaaccgtattcaataaagtagatgtacagaaaggaagtattacggcagattttagaaaaatatttaaaatacaaaatcgattagagaaaaaagaacgaaccaaacacagccaccatgctatcgatgcagccgtattaacactcatacctcctgcagcaataagagataaaatattgctcagatacaatgaagccaatgaaaacaagcagggctatcatgaaaagccgaagcaatggaataatttccatcaacaacatatcataggaatagaagatgaagtattgattaattatcaggcagatcatcgaacactaactcccacctttaaaacagtaagaaaacgaggaaaagtacaatttgtaaaagtaaaatgggcagatggaaaatggcagtacaaattggataaagatggagataaaattcctttgcaagctaagggagatagtataagaggtcagttgcacaaggaaagctattttggagcaataaaaaataaaggtgagttgaatttagtggaacgatatccaattgatgcctttgccaaaatagatgattgtaaaaacattgtagatgatgctgtaagaaaaatcgtaaaagaagtattagaagcacgaatgagtgaggggctttcttttgaaaaagctaagcttaatccaattccatttccaaccggtaaagccataataaaaaaagtacgctgtaaagtggctgcaggaagaggataccttacaccagaaaaagcaatagaaattcaaaaacataatttccagtctaaacataattataaacaacatatttatgcccaaaacaatcaaaatacatattgcttattctacgaaagtgattttgaaaataaggtggaaagagcgttccgaattatcggcttgtttgacctatcaaaacttggaataaaaaatgagaaagaactatttcaggataactattataacaagatagaaaccagaaaagggaataagaaaaaggaaatccctttgattcatatactaaaagtgggaacgaagattatcttctataaagaacatattgaagaattaaaagaactttccaataaagaattattaaaaaggttgtttaggatttataagtttaatgaaaccggagcgcctttaatatttcttcgaaaccaaattgaagcaagatccgatgataaacttgcaaatgaagaaacgctttttaaaagtgaaatatatcaagcaagattaagactagttgctaataactttacctgtgctgttgaaaacaaacattttgaaataactatcgatggtgaaataaactggaaagtttgattgaataccaatttctcttctcttccgttttaacaaagcaaatcaaaaacctatgataaaacgaactatctgcattgagaaccccgcacacctcaaatgccgaaacgatcagttcattatttcgtataacggaattaagggcatggaggaaataccagaaaaatcagtcccaatagaggatattggaattgtcattctcgaacaccatcaaataaatatttctcattttttgctcgacagattactactgaacaatgcagcagttgttacctgcaatgcatcccaccatcctactggactatttatgaatctcgatggaaataccattcagtccgaacgatttcaagcacaagtaaatgctgccgagccgttgaagaaacagatttggcagcaaactgtaaaagccaaaattatgaaccaggcaaacttgcttgtaaaatataatgtaccggctgaaactttaaaacgatacagcgaaaatgtaaaaagtggcgatgccgataataatgaagcaaaagctgccgcctactattggaaaaatttattaccgcttgcatggatgttttaccgaaaaagggatggcgcaccaccaaataatatattgaattacggctatgctatattacgggcaagtattgcaagagcattggtaggttcgggcttattgcccaccctcggtgtgtttcaccgcaaccgctacaattcctattgccttgccgatgatattatggaaccttatcgcccatttgtggatgaagtagtaagagcaatggttgacaaaacatcacatcttgaaaacctaacacccgagctgaaagtgcaattattgaaaataccaacaatagatgtggaaatagaaaacgaaagcagcccactttttgtagctgtgcaaaaaaccactgcttcacttgcaaaattttattccggagaaactaaaaaattagcctatcctgttttgacatgaaatcagatagactgaaagcataccgcattatgtgggtacttgtattttttgacttgccgactgaaaccaagaaagacagacagatttatgcccgtttcagaaagaatattatgcaagatgggtttcagatgtttcagttttctatttacatgcgtcattgcgccagttcagaaaatgcagcagtgcatattaaaagggtaaaaagtattttgcccgagaaaggtcatatcggtattatgactataaccgacaaacaatttggcatgatggaaatttaccgaggtaaaaaacttgccgaacgaatggatgtgccgcaacaacttgaacttttctaaaattgggcaaaaaaaatgtcccagaatttatttccgggacacaaaatctttgattttttcattcttcaaatccttataacaacttgtatttaaggactttctccataaactgttgttatcaaagatagaaagaacataatttgaaagcaaatcacaactgatattttttggggggcaacccatacaggttgttatcaaagatagaaagaacataatttgaaagcaaatcacaactggtgcagttggttttgatgatacagccgagttgttatcaaagatagaaagaacataatttgaaagcaaatcacaactttttgaacaaatgcaataaagctggcaatgttgttatcaaagatagaaagaacataatttgaaagcaaatcacaaccaaaaggcttattggtcgttgacgttagctgttgttatcaaagatagaaagaacataatttgaaagcaaatcacaacttccgcttccttgtacattgccgcttcctgttgttatcaaagatagaaagaacataatttgaaagcaaatcacaactcaaaaaacagacttcaacacgaagttgcagttgttatcaaagatagaaagaacataatttgaaagcaaatcacaactgttataagtgggtgggttaatcctgatctgttgttatcaaagatagaaagaacataatttgaaagcaaatcacaactgtggagtaatggcacacaaacgatttgcagttgttatcaaagatagaaagaacataatttgaaagcaaatcacaacgattatcggaacttcgcaaacagaatcaatggttgttatcaaagatagaaagaacataatttgaaagcaaatcacaactgggagaccccgtccactgagcggtactcgttgttatcaaagatagaaagaacataatttgaaagtgtcctagcccctaaatagctgtaataatttttaaaaatagttaacataaaaaaagtcactaaatttaaaaaatacgagcattattaatactgatccggaatgaataataaaagttcagctaaatcttaaaaaaaattattttatgaaaaaaaatgaaaaacatttattaatatttgaaaagaagtggaaatcaatttttgacaacttattaatcgattataaaaagcaaattaaaaatacaaaaaaaaaatttaaattagaattacacaatacattttttaggaaccttactacaaagtatctagcagtacaaaatgatttaggaaatcatagtcgtttttttattgaaataattgatgaattaaacacggataaaaataaaatttttgagaccgagtttaataaaaaaataatttcaacaaaagggggaaataaacaaggctttttagaaaatttagctaagtgcaacgcttttatggaaatgtttaaatttcttgaattagaaaagaacaaatacaattcaattgataacaaaaaacttgaaaaagtaacaacaaacctaatatggaagaaggataatatcactgaattcacacaattagtctatggcctgttccatggtgaatatttaactaatagtaaaggtgaaataactaaattagttaaagatgttgcaaaggttttcaatattactttaactaaagactggcagggcaatttatctggttcaattcataattcaaatatcgattacaaacctaaaatatttaaaaaacttgaagaaggttttgataaatataaaaatgaaaaactaaaaaaggaaaaataaatctaatcccagtagcatcctagtaggactttagtgtaaatattgataagttgttttgtgccataattaaaatttttaaaatggcacacaacatcattgttcaattcaccgaaagtgaatttaaagagattctaaaaacttcaataagtgaagggattaaagaaagtggtcttaaagctaataatgaaattagcaataagatcttaagtatttcagaggcagcaagttttttaaacttagctattcaaacactgtacagttttacttccaaccgtacaattccattcttcaaaaaaggcaaaaaactttatttcagaaaatctgaattagaagcatggttaactgacggaaaaaaatcaagtataaaagagattttaaaggacaatagttccaaaataaaaggaggcaaacatggaaaagcttaacaactttgaaaatgtaagcagacaaaactctttttttatttcatattataagtctttaactgataagacaaatacatcgtatgaattgtccgaaatttttcaaatgataagaggtgatattaatattaaacaaattattgagcaattgagaaacgaaacaaacaaagacaatgctgattttttaaaaaagaaactcccagccataacaccttccgggctttttgatggacaaaggaagtcagaacaattaattaagtatagtggttttatttgtctcgattttgacaatattaaaaatacctatgaagtaaagaatttcttatcaactgatctctatacatattgcgtttttattagtccttctgggaatggcataaaattatttgttagagttaaaacagatgcaaaaaaacacgctgaaaactttcatttgcttcaatcatactattcaaaaaagtataaactaatccttgataaaagctgtaaggatataactagactaatgtttttaagttacgataaggatttatatgtaaatgagaattcaaaagaatggaatttaacagagtacaataagtatcaaattgaatcattattagaaatattcaaaaagaaagaaactttttcacccggtaatagaaacaattttattttcaaatttgcaagtatttgtttaaaagaaggatttgataaaactttttgtcaaacctttttattagaaaaatacgctgataatgattttaaaaatgaagaaatctttaatcctgtaaatagtgcctactcatatactaagaatgaatctaaaactgaagatataaattcaaacaatattagcttttcggctttggcaagagttgaaaattatattaacgaaaaatatgaaatcagatttaatgaggttaacactaaaattgaaattcgagaaaaatctgtacaaggtattttcaaggaattaaatgataattccctacgtagggaattagaacataataatattaagataacgttaggtaatcttggttccttattgcaatctgatttcgttattccatacaatccatttcaagaatattttaacaatttgaaagaatggaagctaggtgatgaagattatatattaaaacttgcaagctatattcctgcaaaagacagagaaagatttgagctacatttaaaaaaaatgctagttcggtctgttgcctgctcaattgatgacaaaatttttaataaacaagttttcattttagttcatgatctacaaaacagtggtaaatctactttttgcagatggctttgcccaccagttttgaaagattacatcgcagaaaatattaatacagacaaagacagtttaattgcattagctacaaactttataatcaatatggatgaattggcaacacttaataaagttgaattaaattctttaaaaagttttacaagtaaggataaaataagtgttcgattgccgtatagtaaaagggctcaaacaatgccaagaagggcaaattttataggatcaacaaacaaagatgaattcctaactgatgaaaccggttctgtacgttggttatgttttgaacttaccgatatgattaattttaaatataaaagcgaagttgacattgatgatgtttggcggcaagcatattcgttatataataatggatttgattttcaacttacaccaaaagaaattgcagagaatgaattagcaaataaagcattccaagttaatagtattgaatttcaaataatacaaaatacttattacaaaggttctaaggaaagtggaggtacatttattactgctgctaacatattaaaaaaaattagttttgataaccctgaaatgagatttaatatctcctccgttggcaaggcaatgaagcaattaggttttaaaagattgcaagattattgtaaaaactcaaagtattctatttacggatatttcgtgattgaaatttcttgacatagtttaataatgtatactaattaattaattaattacttgcttactcgaaatctttgaaccagtgataacaacaagttatttttcgagtaagctattattttcaaccttacttcatcttactattaattatgattttcgtgtaagcaagtaattagagtagtcttgttttttaattttttatattcaaatttgaaattatgaaaaaaaaaccttaacttcatatttgctatgcaaatatgaagttaaagcatgttttttgcttcataattcaaatctaagtcccttaattttactaaagataaaaaacagcgtatactaataatatgcattaaagtttaaactatgtttaaaccagcgcaattgataatggtttcatttttcaatgaaaccattatcaatactatgtgatccggattggattcgaaccaatggcctacttcttagaaggcagtttctctatccaactgagctaccggaccataaaaaaatgagttgcaaagatattttttttttagcttgcatcaaagtaaataatggaagtaaaaattgaaagtagttggaaagaagttttgaaaaatgaattcaagcaatcatattttcaaaatataccgcaacacattaaaattgaaaaagaacaaaaaaaagaaatctaccctcccggatctcaaatatttaatgcatttaatacaactcctttttctaaattgaaagtggtaattcttgggcaagacccttaccacggccaaggtcaagcaaatggactttgtttttctgtgaacaatggaatttcacttccaccatcgcttgtaaatatttttaaagaactaaacgatgatatcggcatgcaaattcccaaacagggcaatctttcagcctgggcaaagcagggtgtttttttattaaatgcatcgcttacggttcgtgccggcgaacctatgagtcattcaaaaattggatgggcaacatttactgattctgtaattcaaaaaatttctacaaataaaaaaaatgttgtttttattctttggggaaagtttgcacaagaaaaaattgttttaattgacgaaaaaaaacattgcattttaaaagggcctcacccttctcccctttcagcacacacgggattttttggttgtaaacatttttcaaaaacaaatgaatatttaatttcctgcggaatagatcccatcaattggcatttgtgattctatatttgtaaaaatcagcttgccaattgctatgcattttttaaagaatatttttgctcgtttttttgcattgtgggcctttcttgtttttattactcccatgttaataatattgccatttgtttggctgataggattaatagatgagccaaaacgaacttttatttttattaatctatcccgtgtttggatcaaattatttttttgtttttcattcgtgcgtagaaaatatatcggcaaagatttttttactcccggagaaaattacattgtggtttgtaaccacaattcgtttatggatgtacctatttgttcggtaggaattcctggagcaaaccgaacgattgctaaaatttcaatgtcaaaaattcccttatttggattgatttataaaagaggttcagttttagtggatcgaaaaaataatgaaagcagaaaagcaagtttttcaaaaatgaaagcggttttagatttgggaatgcacatgtgtatttaccccgaaggcacacggaataaaacaacaaatacattgcaaccttttcacgatggcgcttttaaactttcagttgaatcgggaaaatctattattcctgcactgatatttaattctaaaaaaataattccaccgaatcattttttttatttttggccaggaaaattggagatgcattttctaaaaccagtttccctttcgcccaatgaaacttttttagaattaaaagaaagagtttttaaaataatgaacgactattatcttttacataacaatcaatagttgctaaaatatctcgttctgttgatacgtagatcttgtagtaatccagattttggattgatactaatattaaaataacggtaaggaccaatgggcgtaacatttatagacatttgccaacagtgcatctcgcgagaaatactcatttgaaaagtttgtaaattctttgtgtcaaaatcatagtaaccattcaaagaaaaattccattttggtgtaagactaaaacttccattgaaatttaaattactactaaaatcttttataaatccgctataatctgatttcattctttcattgaacattactgaaagtccaacccctacagtccacggaatattgaaatcaacaaaatcggcagggtttctgcgcatataatccaactgactctgcatgtcatttcccaaaataggatcattcaataaattttgctcctgtttctttcgttcgttttctttattttgatcttttggtttgcttttaaaatcggatgtgatggaaacactaccatttgtaaatcttcccaatttgaatttacctccttcccaagcatacttatcaatactaaatcctttactatctacttgataaggatcgagtgtagattgaaaattgatactaattttttcgaacaaagttgtaaataaataaaaactaaaaggtgataattttttatacgtactcataaaattatatccagtattaaaaccaaacccatcaatcaacttaacttttttaacagatccttgagtggtatcttttttggaacgaactttcatttctaaattattatcgaatgaaaaacccatgcctccaaaatcttgttgaccgtaataataaaacatacttccttcaaattcagaaaaatcaagaattcttccactagtatctacttgtgttttataataatgctgcttagaaaaagatggagaatagttgaaacttaaagaaggtcgcattacatgccgcaatgctacaatatttgattttttaaactgaaatgttccgtacaaagctgtactaatgcccatactagtcgtaactttatggtctgtaaaaaaaccttttgaatagcttgtatccaatttttgcttggcattattccatgtttttctaaatttttgtgcaatccatttttgttcgtaagaaaaaccaggtgataaaattatcttaccccctaaaattggaggcagagaaagtgtaataggaaaattatgttgccctccccattgcaatgtatctatcaactgttgaaaacgaaatgctgtatcgtaaaaagaaacctgatttcttgtatttccattgtatgcgactcccaatttttcgtaccacttttgagaaccagatttattttttgactggaaaggatataacgtactcacagtaaatgcaacatctggtaaatttaaactaaccaagtgaagtgcattatcttgattatgattggcagcaatcgtaagattaaaaggtttacctgcccatgtttttgaatagacaatagatgaacctaatttattttgaaaatttcgattgggattattgggaatatagcgattaaattttgtagatcctgcatttacattcgcagaaaaattagtcccaggtcttgcacgcgaatcaatggaatgattccagataaacataaatcctaaatttttcatataatcaggatctcctttaaaattatattttgtgttttgtatatttaaatttagttgcccattgtatcgatacctttttctataagaaggagtaatattggcagaccatcccccataggagtaaatattagtacgaatagtaatatcaaaatattcattcaacactttataaaaacctaacccttccaatccaagtcctctatcttcatttgttgtaaactgtggtcctaacaatccggaatgtctcccttttttcgttggaaaaaatccaaaagggagataaactggaatcggaactttctcaaattcggggtgaataggccccgtaactgcaactttattatttacaacttttattttttggtaacgaaatccaaaatgcggttcatccaaattacatgtagtaagcaccccatttcctgcaaaagtaatttcgtttgaaatttttttaaaatattctgcctgaataaaaatttcattttgttttgtaaatgtattttttgtaactcctttttgcgtttcaaaattatagcgtatagtatctgtttgaaaagcatcctcaccttgtttgaagtgaacgcgttcaacaactacaccgttactatcttttctatttacagcagttaatatttgtgatttttggtcgaataccatttcgggtgctttcaaatcaacatcggtgtattgcatttttgttttaccatataataaaactttgttggcgctaattaaaactacagcagaatcttgcgcttcataaataactggcgctaccatcgaatctttagaaattcgataagaaatcgtatctactttattttgcaaaagagaagtatcaacagtattttttttaattgattttacatctccttctttttgagatgacggaattgtatcattcaaatttgaaaa

SEQ ID NO: 4326 - DNA, 13412 bp, synthetic construct
  source 1..13412: mol_type = other DNA
  misc_feature 1..13412: note = Synthetic
cttactactacaagttttccgccaataaatttttggaaatgggattttggtgttacaacattaacaaacgatacaagtaggttacaaaaccctacatacacttacaatgctgctggcacctataatgcaacttttatagtagaaagcataaaaggatgtagagatacgctgcacccaattgttacaattgtagataagcctgatttttttatatcgaaagatacacttatttgcactgtagatactttacaacttcactctaatgttacaacaggaaacataatttggtcgcccaattttatgataaataatgtaacaagttttaacccatttgttagtcccgatgttactactacatacagtgcaacttataccgaccaatttggctgtgtagcctcagcgccagtagtagtaagtgttgtaaatgaagtaacattacttgctataaacgatactaccatttgcagaaccgatactgcaaccttaaatttgaataccgatgcactttattttaattggacagtatcagcgagtacaacaataatttcaaccataaaaaaccctgttgtactacctactgcttcgcttacaacttaccatgtaaaagcttccatatctaacaaatgttttaaagaaaaagacattacagtaaaaactgtaccttatccacttgctattgtaagtggcgataaccaaatttgttttggtaaatcggcacaacttaatgctagtggtggtagtagctacatttggtcgccaagcaattatttatctaatgctaatattgcaaatccagtatccatttttccgaaacaaactattacttacaccttaacggtaaaagatacttttggatgcccaaaaccagttacaaaaacttttactgtaaatgtaataaaactggtagctgatgctggccctgcagatacttctattgtattgggacagcctttacaattaacggctactggtagtacaaactatttatggactccaaatacttggctcaatacagataatgtttttaaccctttagctaacccacaaaacaatattaaatacaccgtagaagtaagcaataatattggctgcaaggctattgatacaattaatgtaaaagtattttttttaccgccagatttatatgtaccatcggctttttcgccagataaaaatggcaataatgataattttaaaccaatacctttgggcataaaatcgttagaaaaatttagtgtatataatcgttttgggcagttggtttttactactagcaaaattggtgcaggttgggatggtactgtaaaaggtgttcctcaaaatactggtacgtttgtatggcaggcttcggcaactgattataaaaacaaaaaaatatttaaaaagggtacagttattttgattagataagagattgtagttttgagataaaagagccaagttagaagttaaatccatgtaaaaaaaacagaaactaatgacaaggcttatatttacatttttaatctttttatttttttgtactaattgccttgctcaaaaaaatactttttttaaaatagagaaagtttattttgacaatacagacacaacaaaaaattgttacacaataatatatcctccaaaactgccatgggcaggatatatatttttattgccaggttttggcgaaacagccgaaagagttatacaacaaacagaactgccaaaaaaattagctttaagtggtattttaacaattattcctacatttcaatacggagttttatcttttggtgtagatagtttaagtcagcaaagtttcgacagaatattaaaagatgtaacttcaaaacacaaacttattgaccaaagattttatgtaggtggatattccataggtggaagttgtacaataaaatatgcagaaaactcaacgataaaaccaactgcaatttttgccatagacccaccacttgattttgaaagattatattattctgcacaaagagacattcgactttcaacagacgataagcctaatcaagaaaatatataccttattgaaaggctagaaaaagaaacaggcggaagtccaaaaaaaaatatattaagctattataaattttcgccttattcattttctgatacaactcaaactgctataaaaaagttgacaaaaatacctttgcgaatttatacagaacctgatattaattggtggatgaaagaacggagagcagattttacaagtatgaattctacagaatgctctgcaataattaatgaactaaacaggctaggaaatactaatgcaacattaattacttcacaaaataaaggttttagaaaacctgagaatagcagacacccacactcgtggagtattgtaaataatgacgacctaattaaatggttattaaaacagaaataacttgatatactaacatctgttttgctaaatgttggtatcctttaaaattccaattgcagaataaaagttgaataacgatatactgttgaaaggctgagggatagcagcggcactgtagcgtagcggaagtacagcggatagccctaacaaaagttgagaaaagatttttgctgacagccccaaaaaatattagtattttagccaaagtatttttttaaaataagtgatacgaatataaattgtattatgccacaattttaatatttacctttagaaactaatatatttatgaacaaaactgtttttattactggggctactgcaggtattggtaaggcttgcgccgaaaaatttgcaaaaaacaattacaatattataattacaggcaggcgaaaagaattgcttgaaaaagtaaaaattgaattggaagaaaaatataaaatagaggttacaactttatgttttgatgttcaaaaaaaagatgaagtttttgcagctataaatactttgccaatgggtaaaaatattgatattttaataaacaatgcaggcttggcattgggtagagatgcttttgatgaagccaatattgaagattgggaaacaatgatgaacaccaatgtaaatggcttattgtatgtaagtaaagctttacttgagcatttaaaaaataccaatggacatattgtaaacttaggttctgtagcaggtaaagaagtgtatgaaaatggtaatggctattgtgcaagtaaatttgcggtagatgctatatcgaaaagcatgcgtattgatttacttaaatacaatattaaagttacagctataaaccctggtgcggtagaaaccgatttttcgctggtgcgttttaaaggcaataccgataaggctaatgcagcctacaatggttttaagccacttactgcaaatgatatagctgatactattttttattgttgcacattgcctgcacatgtgtgtataaacgatattgttattacttgtacccaacaggctaatgcatctattatattaaaaaaatagaatttgcatgagtagaatatttactacaaaagaaaaagaagtaaaccgacaaaactgcaaacaagaagattgtacatttacaatacaaaatccagctaaattaaaaacttggcacaataattgaaccagtattattttaaaaataatatccaaaaaaccaaagaccattaaaaccacaaaatacatacttatttgtatgcttgcaatagcatgtagctttggtgcttactcccaacccatggtacaaaaagttgcatttgataaccctgcaattgtagctcaggcagatagtttgaaagcattatttgcaaagcaagattttgtagcagtaaaagaagctggtatggctatggaaagtgagtacgaaattccaattatagtaccactaaaagaaggcacttggtacagagtggtttttattggcgatattacatctagattatacgaagtacgtatgtttgactggaatgaaaaacaagttgtttatcaaaagaaaatgtggggagatgtagatggaaatattattaattacgattatattcctaggttttcggaatatcacatgataaagccagtacaagtaaacaaaaagaaaaaacaagtaggtggttattttattatttttaagaaaataataaaaccttaataaacgattttaaagaaaaacgccccaacaaattaatactgtttgggcgttttttattttattggtattatgcaaatttcttagcatcttctaaaaacttagcaagcccactatctgttaatgggtgttttagtaatcccaaaatagaatctaaagggcaagtacatacatcggcacctgcctcggcacatttaattatatgcaatgcattgcgtatagatgctgctagtatttcggttttatagccttgtatatcgaaaatacggcgtatttgataaataagttctacaccatcggcacccatatcatctaccctgcctataaatggcgaaacgtaagtagcaccagctttggctgccagtaatgcttgcccagccgaaaaaattaatgtacagtttgtttttataccattatcggtaaaatattttatggcttttatgccatcttttatcattggtatttttaccacaatatttttatgcaaagctgcaagcgcattaccttcggctaccataccatcaaaatcggtggctattacttcggcacttatatcgccatctactacattacatatatctacataatgttttaaaaccgcagctgtaccttgtatgccttctttagccatcaatgatggattggtagtaacaccatctaaaataccaaggtcgtaagcttcttttatttgtgctaggttagcagtatcaataaaaaatttcatgaaaaatagatttaagtagcaaaactaaagataaaacaatatctaaaattgagctttgtgttaaaatacaaatataagaaaataggttttagcagctaagaaaatgagtaaaataaaactagaagatagaagtacttagcataaataaaaaatggcaagttacttacatcgcaccgctcaaccatctacccttgctaccttccggtcctggaggaattcaacaggagctggtcgtataagacttgccactgcaaatatacgatgtatgatttacatggcgaaatgaagttgtataatatatttttttaaaagattaaactagtgagtataaatgttgtctgagttattataaacgaaccaacataaatattaaaaatggtgcctttgaaatttataaaaacattcttattatcattactatttatgacaacatttatagtattgtatattttttcgcaagatactgaggcaaatttttgatttagtttttgttccattgcattaattcagttgtacgaaaaatatattctggtgtttgcaaaaaatcaaattcagttgcctcataccaaggcgaaaggttttcatttttagggttattaagcacatgtatattttgtgcaggcataaaactttgtgccaataaaaatattttattcccatttatatttattgcaatatctacaactattactgcatgccctggaaaacctcctcttataaaaacatcacctgcaattacatctttcaatttgttttttttatataattgcttagccaaagaagcagtgccacacataccaaaaactttttgaagatactgcataaaatgcaccttactatatggttcaaaaaaattgtaatgggtattttcattgtcagtaaaactaatttcgttaaacctcttttgcgaaaataaatactcggctcgcaagcgcataactgcatcggcacattgttgtaagttttttgtgcctaccgaaatatctaaaactgcaaactgtgctttttgattaagttttggagtgctatcatacaaataaactgttttatctttttttaaaggcaaattagccaaccaaaaggcgaagctagttgtatcattatctgctcttacatacccaaatggtaatggtatattatttattaatgcaaattcgttttcgttgtttaaactattatttttagaaagtattacagtggattttttttgaggtgcggtagcattattattgcaagacaatattgaaaatggcaataaaatactaagtgattttgttagcaaaataaaatgtttatcataagatactaagtgctgcaaattgcataaaataacttgttaattatatgcaaaagaaatatacatatataaataaatatataaaataagaaggttacattgaggaataaaaaaaagcccccgataaacgacgagggcaagaacgtaaatgtttacacaacggaataaaatcggtagttttaataaaaaatcccacagagcgtaaacgatgcaggatttaagaataatcttcggcttatagccttattgtgataagctttcaaacttaaagctaaaggtatagtaaaaaattaaataaacaaaaaatggaaaaaattttaggaattgatttgggtacgaactcaattggatgggcaataagagatacatccgaaacaggtaatcaaattatagataagggggttttaacttttgataaaggagtagcagaggtaaaaggaattgaagctccgaaagtccaaaaaagaactgatgcaagaagaattaggcgtaattatcaatcagaaaaatatagaaaatggtcgttattggaatgcctcatagaaaataagatgtgcccacttacaatagatgaactaaacaactggcgacattataaaaaaggtgttggaaggaaatatcctatgtctgaaaaatttattcagtggcttaggtttgattttgatggcgatggcaaacctgattttgaaagattaggttatagtaaacacgaaagttattacttatttagaagtttaattgttgatgaaactaagaaagagatttttaagactgagccacaaatcattggtagagttttatcccaaatggtacaaagaagaggttataatgatggaagcgaaattgatgataatgaaaaaagtgaattaagtaaaacaattatgaagggtggaggcgatgcaggagcccttggagcaaatgaaatagaaccttacatcgaaaaatacaaaactttaggcgccgcattgtatcaaattcaaaaagaaacaaaagcaagaattagaaaacgttacaatttacgtagcaggtttgaagctgaaattaaagaaatatgcagagtacaagaattagggcatttatataagaaaatatggacctcaattatttggcaaagaccattaagaagtcaaaaagggcttgttggattatgtacttttgaaaacaataaaagcagatgcccaataagccatccattttatgaagaatatagaacttgggtttttataaataatttaaaaataaaaccgattaataactcctcaaatattattgacttgaatgtggttttacattcaattgtatatcctgaattttttaaagctgctcctgattttaaactttcaacaattatagataaattaaaaaaagtagggtatgaaattggagcaaaatttcctgaggatacaaaagcactaagtatgtcttttaattacaaaatgaaagaaatatttggtgataattggaaagagaaattaggttggaatgacattataaacaatgtaaaaaagaatataaattataagtataatattgaagatttatggcatttgcattttgtaaaaactacaaataaaaatacaggagaaactccttttgattttttaaaaagatttagtattgaaaaattgaacttaaaagaaagcgcagaaagctttgcaaaaattagactgcaacaaggttacgcaactttaagtattaatgcaataaaaaaaatattgccgtatttacaaaaaggatttatttacagtgaagctgtgtacttagctaatttaccagaggtattaggtataaaaaatgtaacagaagatactgtaatacattttgcagaggaagtaagaaaaattttaaaagaaaattacaaagaaaaaaaatacttacaagttgtaaatgagttaataaacgaccaattaaatgccgatcaacgttttggcatggatgcaaattatcaattagatcaagatgattataacgacataaataaaaaactagaagatgtttttggcaaaacgagttggcaaagtcttatagaagaagaacagcatactgccttagattttgtaagtaataaatatttagtctttttacagaaaaagattttttcaaaaaatgtatttgaaaaaagtgagcggcttcacgataaaatatttaattggataagtgaaacctacaatgtgcctgccgaaagaattaaatatttatggcatccatcagaacaagaaacttatgcgcaagctaaattttataacgaaataatattaggaaataaaacgctatacatagaagaaaaaaatacagtttcgtttttatcaaaaaatacaaatgcaataagaggagattttaatggaaaattattaggctcacccgaacctataagtaagggctttaaaaacccaatggcattaaaaacattacataaattaaaaaaactcataaattatttattagagacaaaaaaaatagatgaagacactagaattataatagaaatagcaagagaattaaacgatgcaaataaaagagaagcaattaaacgatggcagagagaaagagaagcagaaaatgataaatacaaaaagcaaataattgaaataaatacagaatgtaatacacaattagatgtcgaagataaaaatttaatagataaaataagattatgggaagagcaaaataggttatgcatttataccggtaaaacaatagggctttgcgatgtacttaatggtagcaaatatgactacgagcataccatacctgcaagtatgagttttgataatgaaatgaaaaacttaacaatagcagataaaacatataaccaacaaataaaaggtaaaaaattaccgacggaatgcccaaattatgatactgaatacactcataatggaattacttataagtcaattttagatactatgcaaagtatatttggcagattggtagaagaagaaattaaaacaaaatatggcaaaaaaataaaattaaagtttaataaaataattgaacttgaaactaaagtagaccgatttatatatttttcaaaaacaattacaacaaaagagcaaaaagataaaaatatagtagataagcatattgcaaagatggagctagattattggaggtataaactccaaacctttacttcaactgagtataaggcaggatggagaaacagccaactgagagatacacaaaccataacaaaatatgcattgccatatcttaaaacaatttttaaaaaagtagaagtacagaaaggaaatataactgccgattttagaaaaatatataaagtacaaccaagattagagaaaaaagatagaacaaagcacagtcaccatgcaatagatgctgttgtacttactttaataccaccgccagcagttagagataaaatattattgagatacaatgaagcaaaagaaaataatatcgggtatcatgaaacaccaaggcagtggagtaattttagtacgaatcatattttaagtattgaagatgaaataataataaactacttacctgaacatcggacacttatacctaccgaaaaaattgtacgcaaaagaggtaaaatacaatttgtaaaagagaaactagatactaacaaatggcaatataagttaaacgaacaaggcaagaaaattcctattgttgctaaaggagattcaattagaggacaattacataagctaagtaattttggagcaataaataatggagaagctatcatcttagttgagcgttacccaatttcatctttcaccagcattacagattgcaaacatattgtagatgcaaaagttaaagaattagttcaaactgaattacaaagacgaatggataatggattaagttttgataaagcaaaattagaaccaataccttttcataaaggcaatgaagttataaaaaaagttaggtgtaaagtagctgcaggaagaggatatttaacaaccgaaaaagctattaaaattggaagcctcaattacaaatcgaaacatgaatataaacaaagtatatatgtacaaaatgaagaaaatacatattgcttatactatgaaaacaaagttgaggataaaacaaatagagcttttagaattattggattatttgaattatctcaacttaatttaaaaaatgaaaatgatattaaattagaaaactattataacaaaataattaatggcaaaggcaaaaacgctgcagaattacctttggtacaaatactaaaagttggaactaaatgtatcttctacaatgaaagtattgaagaacttaaagaacttgataatccagatttattaaaaagattatttagagtctataagtttaacgaaatgggaacacctaacttatttttacaaaaccatttagaagccagaaagaatgaattattagatgatggagaaacttttttcgaacctaataaaaagcactatcgactaaaaataaaagcggataaattcacttgtgcaatagaaggcaagcattttgaaataaaactagacggagaaataaaatggttatgttaatatgattaaacgaactctttatttcggcaaccccccctacctaaaaaccaaaaacaaacaactcgtttttgaagctgttagatatggaaacaaaagattttgttgtggaagttttaaggttgttaataacccatatgcaaatttttattataaaattattgacggtagtgcattttataattaaattgatagcacataactattacgaatgaaacaactaaaaaaaacatcaaaaaaaatagtactgcaagaaagtaaaaaattgtatttacaaatcgttgcattaataaacagccgcaaagaaaacctaaacagaagttttaataaagaacttaccatgctcaatttgcaaataggaaaccacattgatgaaacccttgccaatactgaagaaaactatggtttagagattgtggcgacactgtcgccacttttaataaatcaatttagaaaaggatatactacctcatcgttgcatagagtacgaagattttggtagcattttataaaataaagatagttgcgacactgtcgcaactattgagttggagccattttatagagcttgccaatgtaaaagataaccttaccagtacatattataccgagctttgcaagatagaacattggacggtaagagagcttagagaccgcataaacagtatgctgtacgaaagaacagcgctgagtaaaagccccgaaaaattaattaagcaagagctaaaacaactgcaaacacaaaaagtatttacagaaaatattgtatttagagataattatttgttagattttttagaccttaaagatgtatatagagaaaaagatttagaaacagcaataatagttgagctacaaaaatttataatagaaataggaactgattttgcttttttgagcaggcaaaaaagaatgataatagatggcgaagattatacactggatttacttttttatcatagaggattaaacagactagtggctatagaattaaagctaggtaaatttaagcagagctacaaatcgcaaatggaattatacctaagctggctcgaaaaatacgaaatgcggtagcatgaagaattacatattggactaatattgtgtgccgataataaaaaagaaataatggagcttttaatgatagatgaaaaaagaatacgtatagctaattatgcaaccgaaatgcccgaagcaaaaataataaaacaaaaattgcataaagccttagcattgctaaagccaaaattagaaaataatgtataattataccttcaacatacttattaacttataatgataaaacgcaccctttattttggcaaccctgcatatttaaaaaccaaaaacgaacaacttgtatttgataatgctgcagatggcgaacaaaaaacaataccaatagaagatataggagttgtaatattagaccaccagcaaataaccataacccaagctctaatagcaaagctattagaaaacaatacagcactaataacttgcgatagtaagcaccaccctactggcttgctgctaaaccttgatgggcataccttgcaaagcaaaaaatttgcagcacaaatagatgctactataccactaaaaaaacaactatggcagcaaaccataagctgcaaaataaataaccaagctgccatgttggaaagtgtgcaagtgcctgcaaaattgttacgcagttttgctgccgaagtaaaaagtggcgatgccaacaaccacgaagcaatggcagctgtgtattattggaaaaatatttttgaaatttttcctgattttaaaagagatagagaaggcgatgccccaaataatttattaaattatggctatgccatactaagggcagtagtagcccgaaatttggtagcaagtggcatactgcccacactaggtatttttcataaaaaccaatataatgcctactgccttgccgacgatataatggaaccctaccgcccatttgtagataaagtagtatggaatatagtacgaatgaatggaaactatttggaaataacccccgatatgaaacgacaacttttgggcataccagcaatggatgtaataataaatgaagaaaaaagcccattgatggtagcagtgcaaaaaaccactgcatcgttggctaaatgttacgaaggcaaggcaagaaagataatgtaccctgagtttgtttgaacaattagcagtaaagagttggtaaattactaactacttgttatcaactatcttttgccaactgtaaaatgataaaatgcaaaaccgattaaacgcttaccgtattatgtgggtatttgtactatttgatttgccaaccgaaactgccaaagagcgtaaaactgccgccacatttagaaaaaaaatattggccgatggctttgctatgtttcagtttagtatatacctacgccactgtgcaagcagagaaaacgccgatgtacacatagcaagagtaaaaaaattattgcccgaaaaaggaaatgtaggaattatgtgtgtaaccgataaacaatttggcatgatggaaatttttcatgggcaaaaacctacaagcaataacccaccatcgcaacaattagaaatgttttgaaaatagaaatacctttttacaaaaaaataggaataagaaaatgaacagaagttctattttttattcctattttttaactcagatgctttactagcaaagctttcgtgcaatcgtattgtgaaagaactaagttagtaaaaagtttgaaagcaaatcacaacac

SEQ ID NO: 4327 - DNA, 11156 bp, synthetic construct
  source 1..11156: mol_type = other DNA
  misc_feature 1..11156: note = Synthetic
aaaccaaatgccccgcgttcgacgcgaggcattttttcattttctccttgtataggtattcattcatattaagaatgagtcattctctccttatagaatattattgttgagtagcagtataaactacatcagtagcataagtaccagcagcataagcgaaaccaggagttgccttatactttacagagaaagtttgattaccaccacggctagcattgtcaataaggttagcagcagaagcagacaaatcattgtaagcagaagcagagaaaccagaagcgatagagccaccagttccgttagcacttacttcaacaccaagaacagaagtaggcatagtagaagtagtagtaacaccactattagtaacgctgaaatatgcagcagaagtatttacagttacaccgaaatttttgttagaacggattttgatttgttgagcagagctttcaacaccgttagcgtaatcgtcaacagaagtaaaagggatagaaactgtagcaccagttgcagaaccattactagtgaaagtaatttcgagggcattagaaagagccaattgaacagtttgttgcgcattaccagaagcattgctttgagcgttagcaacagttgtgaatccgattgcagccattgctgcgatgataatttttttcattctctaaatgtttttgtttgttaaaaaaatggtttttaataaccgccgtggcatttcgcgtaaacgggtttaagtttttagagtctcaccttttatgttttttcggtttgacagggcaaagattaggcgggagatgagatagtgcaagcaaatagcttggcttaacaggaaatttgtaagtggataacgaatagttaagaaactaaaaagattatagactaagtattaagccgtcataagcaaggtatagcagttctgaaagattaacttgaaccaagaataaaaaccgttctccgaccgggagatgagcccccttacacgcacactgcttctgtagaagcgaatcatgcaagtaaaattgtcagaatcaggatgcttcgactatgctcagcacaagttatcaggattaaaagatgaacatgtttctttctcgctattatcattcctctcctttggaggggtaggggtggttttggcaaatgattttcctgtttccattctaaattatgcatcaaaatgtcctttgttgcaagagctttatcaagctttccttgttctttacgctgcccaatttttttctaatacctcggtagcgcttctccatattcgattctgaagttgatgctaaacctgcaagttccttcatggtcattttaggatgttccaacaaaatcttacaccactttttctcgcaacctgaaagttcatcccataaatcttcattgataaactcctgtgtaaaaatactactagcactaattgttttatagaatgaatcattggtaaaatgatctttacataacgtatgatttaatgcattaggaatgtcaataagagaacaagaagtgataaatgcatatgctccattttgatgaaagtaaagctcatccattttgttttctccaaataccatcattggtagttcggggaaaagttggtgtgttttttgacattgctgctttaatagttctgcatcattacatattaggataatggctgaataggttttgttctgcttgagaattagcgctaactcatccacatcatctacattcttggtaattgacaaatcattcatcttaatcacatgattcataagaagtcctaatttctgagggtcatttcccatgactatgagttctttgtttacagcttgatccttattttgatgatgctccattggttttatttgttttatttatttaatggtttaatttcaataattgtatagtaattaattttgtaaactactgtttatctatacaactatctccctattccaatgcaaaattaaggaagaaattttgtagaaaccaaatatattttccaagtttctacgctctaaatgagctattagaactgtaattttaaaagaataaagaagtatatgtgttttgaaaggtattattaatgttttatgatttacggattattttaataaataaaattgatacgtgaatgacatattgaggcaccctcaataaatatttttgaggaaacctcacatgcaatgttatatatgtagtaatatctttgcaacgaaaataatgtttaacacatgacatccgtctacaattcaattacatctgccttcaattacctgcttctccaaataagtaaagctacaatgactctactacaggctacaggcaataaccaacatgctacctttttcctaaataatgctacatgtcttaaatggaatgctacatcaacttcattcaatgctgtattgatgcactgtagcattaattatttactaaacaacacaacaagaaaccgattacacactataacaaatacaggtagcactacaacaaactcaaataatgctacatcaattcaatgtagtgtgtttttaaattcatgtagtgtgtttttaagtttatgtagtgtgtttttaggcgcatgtagcctttttcatcaaacaaagcacataagtactgttccgtgtagcattcatgaagtaataagtggtctacaaaaatctttcttaaacattcatagcactcgaggtagccctgctcaccaatacaccccttttaccaccgtctttacctacgcagcacctcattggtcatggtttgataaaaggaatagcaacaaccaaagaggagtgcaaacaatcaattattaatttttaaaaacaattttttatggctgagatagctttgaaattatctagaagaaatacgcccgaagtagcacttatcggacgcaacatcagtaaaaaagtgaaggcaaacgtcgcactatttcctaaccttcctgtggacctcaaaacactcgaccttcacatcagcgatctagaagatgcgcatgtggaagcgatgaacggtggtagtcttgaaaaagaaattcgagaggagaaaagagccaccctcgaagatacgcttaagcaatatggtctttatgttacacaggtaagccaaggcaattctgtcattatgcgcaaagcgggcatgccactcaaggggttaagaggtgcatctaaaaaagatcttgctgcgccaaatttcctaaaggtggaagccaaggtgagcggacaagccaatcttgtgtgggataaagttgcaaatagtcgcaattatattgtagaacataccgacaacctaactaccaatgtatggacaatggtattagtgaacacccgcaacaaggcaatcataaaagggttgactaagagtaaagaatacttcttccgggtatgtgccacaggagcaaatggggttcaaagcccatggactgctgctatgagcatcatcattcagtaagtggtgtattatttcacagatttcttggggggtggtgttgatcaccccctatttttttcttaaaaaatatcttgatgattgttacctacgaattaaaaaggatttgtagatttggtggaaagaaaaagccccacggagtacgcagggcttaagaaaaatcttcggcttatagccttattgtgataagctttcagaacaacaaaagtaaacaatattatcattatggaaaaaattttaggtatcgatttaggaaccaattctattggttgggcaataagagaggttaatcctgatattaataatcagattattgataaaggcgtattgacttttgataaaggagttgctgaggataaatcaggagaacatccaatggttcagaaaagaactgaggcaagaggtaaaagaagaaattatcaagcagaaaaatatagaaaatgggcgttgttagaatgtttgattaatgaaggaatgtgtccattaacaatagatgaactcaacgaatggagacattacacaaaaggtgttggtagaaaatatccacaaattgaaaagttcattcaatggcttcgctttgattttgatggtgacggaaagccggattttgaaagattaggatttagtaagcatgaaagctactatctgtttagaacgctcattgttgatgaaaacaaaactgacatctttaagaaagaaccacaaatcattggaagggttttatatcaattagttcagagaagaggttataatgatggtgatagcttagatgaaacagaaagggaagaacttagtaaaactattatgaaaggcggtggtgatagtggcgctgttggtgcaaatgaaatacaaccctatattttaaaacacaaaacgctaggtgcagcattatataatatacaaaaagaacaaggcgttaggattcgaaagcgttacaatttaagaagccaattcaaaaaagaaattgaagaaatctgtagaatacaagggttagaccatttattaaaaacactttgtagtgctatcatttggcagcgtccattaagaagtcaaaaaggattggttggtgtatgtacgtttgagaaaaataaaagaaggtgtccaattagcaatcctctttatgaagaatacagaacttgggtatttataaataatctaaagattaaacccatagtatttgatgaacataaaacagaagaacaaaaaacaaaagagttaagagccgttttgaatgatgttgtttatcctcaattttataaagtctccccagattttaagttgactagtatagcaaaggaattgaagaaagtaggttatgagattactgcaaaatttccttctgacactaaagtaattagtgtttctttcttgaataagatgaaagatatttttgatgatacatgggctgagaaaattggatggaaagatttattaaatggaaaagaaaaagcggttgaattttcaatagaagatttatggcatttacattttgtgaaagctaccaataaaaaaacaggagaagagccatttgatttcttaaagagatatgctgttaataatctaaaagtagaagaaaagaaggctgaaacatttgcgaagataagattacaacaaggctatgcgacattgagtatgaatgctatcaaaaaaatattgccttatttacaaaaaggcattctttatagcgaagctgtttacttagccaatttgcctaaggttttaggaaacaaaaaattaaatgaaggcgatgttgagaatttttcgcagctaataaaagatgtaatcaagaaagaaaggcaagaacaaagacagactggcattttcaattcattagtgacacaatactttgaggatagacaaaattttgatgctaataaaacacaacttatcgaaaagcaactcattgaaagttatggacaaattacctgggatagattttcagcagaaacacaaagtaatattgaaaatgaaatagtttatgcaatcaatactttcttaaatgagcctaaacaaaaacctgaaaatcattttaagaaagttggacgattacacgataagattttcaatgccttgttagatgattatggaatcgcacctgaaaacataaaacacctttggcatccatccgaacaagaaacatacgataaggtgcattattaccaagaaatcaatgatggtaacaaaacacacttcattaaagaaacagaggtagataagtttttaaaagaaaatccaaatgctagaaaaggaggtttttatggtgaattacttggttcacctgaaccaattagcaaaggatttaaaaacccaatggctttaaaaaccttgcataaaatgaaaagacttattaactacttgattgaagttgataagattgataaagacacaagagttgtaattgaaatagcacgagaactgaatgatgccaataagagaaaagaaatagaaagattgcaaagagaaagagaaaaggaaaatgacaactataagaaaagaattgatgaaataaatacagaatgtaaaaccaattttgatagagaggataagaacttaattaataaaattaggctttgggaagaacaaaatagaatatgtctatacacgggaaatactatagggttatgtgatattcttaacggcgctaagtacgactttgaacatagtattcctgcaagtatgagttttgataatgaacttaaaaacttgacaattgcagataaaacatataaccaacgaataaaaggtaaaagacttccttctgaatgtcctaattatgaagattctgcaattattgacggcgtagaatatcctgcgattatatcaaccatgcaaactgtgtttggtaaaatgactgaagttgaaaagaaagtaaaagggaaaactattacaataagaagttttgaaaaaattgaaaaattagaagctgattatgctgaatggaaaagcaagacttctgacgataaacaaataaaagacaacatcattattcgtcgacatgtaataaagatggagttagattattggcgttacaaacttcaaacgttcactacaacagaatataaagcagggtggagaaatagtcagctaagagacacacaaacgattacaaagtatgcacttccgtttttgaagaccattttcaataaggtagaagttcaaaagggaaatataactgctgatttcagaaagatatacaaaatacaaccaagacttgaaaagaaagaaagaacaaaacatagtcatcatgctattgatgcagcagttttgacgcttataccgcctgcatcaattcgagataagattttgcttcgctataatgaagccaatgaaaaacaacaaggctatcatgaaaagccaagacaatgggatggctttcatcatcagcatattatcggtattgaagacgatgtattaatcaattatctagcagaccataggacgttaacacctacttataagaatgtgcgtaaacgtggagagattcaatatgtaagagagaaaatacaagatggtaaatggaagtataaattaaatgaagaaggcaataaaattcctttggttgctaaaggagatagtattagagggcagttacataaacaaagtgtatttggtgcaataaaaaataaaggtgaattgaatttagttgaaagatacccgattgcttccttttcaagtattaacgactgcaaacatattgttgatgatggaatcagagaaatagttagaaatgaattacaaagaagaattgacgaagatggaatgagttttgaaaaggctaaacttcaaccaattccatttccaaatggtaaagcagttattaagaaagtaagatgtaaagtagcagctggtagaggatatctcacacctgagaaagcacttgaaataagcaaacataatttcattaataagaagcatgactacaagcaatatgcttatgcacaaaatgaagaaaatactttgtgtttatattatgaaggtctgattgacaataagattcaacgtgcatttaggattgtagggctatttgaactttcgaagctaacccttggtaatttcaatgaaatcaagaaagaaccttactatagttgtcttgaaataggcaagggaaaaaacaagcaaacactttacttaaatcatattctgaatgttggtacaaaagtgattttttacaaagagcatttagaagaactcaaagaaattaactcgaataacgaaatattaaaaagagtgttcaggatttataaatttaatgaaatgggcacaccaaatttatttcttcaaaatcatatagaatcaagaccaaatgaattattagatgatggtgataccatttttgaagctataaaataccaataccgtttaaaaattaaagctgataaatttaattgtgctattgaagataaacacttcgaaataaaaccggatggagcaataaaatggctgttttagatgttgaatccttcagcatactatcacattttcaaccacgccaatggtgatgaaaatttatttagggaaccggagaactatcggtatttcttacagcagtatgaaaaacacatagtacccatagcccataccttggcttattgcctgatgcccaatcattttcatttagttgttcaaataaaaaacgaaaccgaattactaacgaaaacagaccttccaggttttaaaaacctggaaggtctcgtttcttctaaaataatcagtcaacaattctccaacctattcaacggttataccaaagcctttaataaaaaatacaatcgccgaggttctcttttcatcaaaaattttaaacgaaaacccatccttaatgatgcgcagctaatcaccgcaattctctacgttcacaacaacccggtgcatcatggttttacccaactgatgaaagattggacttggtcgtctgttcatgcactctaccacaaagaggctacaatagtggatagggaagcattattgagcgtatttggcacaaagattgcatttgaacaactacatctatctgctgaaaaggaaaaactgaaaaggctttcggaagcatacgaaacctaacttttgaacatcaaaccttccaggttttagaaacctggaaggtttagttaaaaaccatacgaaacctaacttttgaacatcaaaccttctaggttttagaaacctggaaggtttagttaaaaaacatacgaaacctaacttttgaacatcaaaccttctaggttttagaaacctagaaggtttagttaaaaaccatacgaaatctaacttttgaacatcaaaccttctaggttttagaaacctagaaggtttaataaaaacgtaggctatgataaaacgaacactttactttggcaatccggcttacctaaaaaccctcaacgaacaattaatagtagaactgcccgacacgggcgaaaaaaaacaagtgcctattgaagacataggcattgtcatcttagaccaccaacaaattactatcacacaggcattgattgccaaactgttggcaaacaacaccgcccttattacttgcaacgatacccatcatcctacgggcttgatgctgaaccttgatggcaacaccctgcaaagccaaaaatttaaagcacaaatagaggcaagccaacccttgaaaaaacaactttggcaacaaacagtgtcggctaaaattgccaaccaagcagccttgttgggcatagaaaaagcagctaatggcatcttgctgcgttatgccaaagacgtaaaaagcggcgatagcggcaaccacgaagccaaggcagccgcctattattggaaacatttgtttccagattttctacaatttaaacgcgaccgatatggcgaacctcccaacaacttactcaattatggctatgccatcctgcgggcagtagtagcacgcaatcttgtagggtcgggcttgctgcccaccttaggcatttttcatcgaaatcaatacaatgcctattgtcttgccgacgacattatggaaccctatcgcccttttgtggaccaagtggtgtgcaagattataagcatgaacggacagtaccttgacatgacccctgccatgaaaaaagaattgctcaccattcccgtaatagatgtaatgatagacggacaaaaaagccccttgatgttggcggtgcaacgcaccacagcaagcctcagcaaatgctatgaaggggaaagtagaaaactattatatcctgagttgatgtaaaacgaaagaatacaaccatcatgttcacgcgattaaatgcttatcgaattatgtgggtgcttgtcatgttcgaccttcctaccgaaaccaaaaaagataggaagagttattcaacctttcggaagctgatgatgaaagacgggtttcaaatgtttcagttcagcatgtacataaggcattgtagtagcaaagaaaatgccgacctacaccaaaaacgggtgcgcatgatattgccatccaaagggcatgtaggcatgatgtgtattacagataaacaatttgggatgatggaagtattttatgggcaagaaacaagaaaagcgcccgacaccattcaacagttagaactattctaaccaaataaaaaggaataaaaaaacgagtgaaacacctgttttattattcctgaaagaaggctaaaagccttgatggtagcttatttacagcaactcagttgttgaagaactaagttaccataaaatctgaaagcaaatcacaacgggtcacgggtaacccctttacctcttcccgttgttgaagaactaagttaccataaaatctgaaagcaaatcacaactgtacattcctaacttataaactgaacgaagttgttgaagaactaagttaccataaaatctgaaagcaaatcacaactctacgaggattgcgttaaagccctcaaagttgttgaagaactaagttaccataaaatctgaaagcaaatcacaacaattttctaaaatttctcttgcttcttcttgttgttgaagaactaagttaccataaaatctgaaagcaaatcacaacctgttaaaactgttccacttgatacgctggttgttgaagaactaagttaccataaaatctgaaagcaaatcacaacaacattgaagatcgtgataggatcaatcacgttgttgaagaactaagttaccataaaatctgaaagcaaatcacaacttaccataaccgatagttggtatcttagcagttgttgaagaactaagttaccataaaatctgaaagcaaatcacaacgtttgtgatgttgcattgaagaactgtgaagttgttgaagaactaagttaccataaaatctgaaagcaaatcacaacttatctgatgtgtgcaattcaagtgttcgtgttgttgaagaactaagttaccataaaatctgaaagcaaatcacaacagtgtacccgaagaaggatttatgtaggtagttgttgaagaactaagttaccataaaatctgaaagcaaatcacaacaaggttgtgaagatgcagcctaaccataaggttgttgaagaactaagttaccataaaatctgaaagcaaatcacaacttatctcaacattagtaggaaacggctcaagttgttgaagaactaagttaccataaaatctgaaagcaaatcacaacctatatttacgtcttcaaatttcagtcaaggttgttgaagaactaagttaccataaaatctgaaagcaaatcacaacct

SEQ ID NO: 4328 - DNA, 10214 bp, synthetic construct
  source 1..10214: mol_type = other DNA
  misc_feature 1..10214: note = Synthetic
caaatatacaggctattttaaaaattccgaaacagttgacatgggaacgttgacatttaactcgtcaactaaaactcttgcattaaaatttatggacgctgacgaattgcatttcaaattttccaaaatggaaaattctactaatagtgatgaactttatggaaaattctacaatattatttattttggaaaggctattgagagtaatgaagattgtgaattattgattcaaaaaacaaaaaatcttggttgtataactactttaaagtttgccaaagtaattgataaagattacgatttaacaacatggaaaaccgtgatagtttttggcactcaaggaaaatgctttgatgacaataatattgttgctaatgtaaaagaaagcgaaacatcagataataatttgccggctttcaaaatcccaataaagtatgaagatggatatgtttttaaagataaagatttgacaagaatagatttttcaacttttacggtactatttaataccaaagatcaaggtattaaattaagcgaaggtaaggagtggaaaatatcaattgcatcggacttgataaaaattcaatatccttatttaaatggtttcatggttgaaaaatacaaagtaatcaattgcgagtatgattctactaaaaaagttcaagaattcttgttagaatctgatttagaaacatctgacggcaatacgcctccgcacaccactcacaaattgaagctttattgggataagcaaataggatactttgcagaaatatcagtaatagattttcactttcaaaatgttatacaaacaggcttggaaatttcctcactgtatggagctacttttaataatagtctaacagtaacaaacaaaatcgttaaacgctaaattttatatcaaattggatgaagctgacaagaactatcatcagaggacaattttgaacctctcaaaatcattttcagaaaaagaaacgttcgactggtttagggataaggttcggcaccattattcatcggcaaggaaattgcataagttccgggattacgaaaaagttcctgatttgctgctagatgtgattgatacagaaattgaaattctggaaagatttggtttgccggatgcttctgaatttatgaccattatagaccttttcagttggaatgaacaaataaatgaccgtgacattgaggagctatttaagacattaaaagaaacagccgaaaattatttgctggaaccaacaaagactgacaaacaaagtttgattgatgggaaagagactcacttaacagcacacgatttattaccaatgattgaaattgaccggaacatttataataactttttgtacgaaacattattttattcaaaagactatgatgctgatgtcattcttgaagaaatgaaaaagggaaatacaatcccattggaattatcagacaatatgcacacaaccatgcttctgaaaggagatttgaataagcaagctgaacaattaggcttaaaattttggccggattttgtcgagtatgaaaagaatgtaaaacagaatccaagcaagaaaacaatcaaacaaattgacagggttcgtgaaagtttcgatggaatatttccaaggacgttttcatttgatgaaggctacatttgttcaatcaggtatttaaactcagagaatccctatgtaattgttgaactggtgacttcgcttgatttgaacatgataaacatttacgtttatatgccttttgaagttgcaattaagatgcttaaaaagacaaacaatcataccgtggcaagtccactcagaagtatgctttatgacaacttcaatcaaaatcccgaaattactgatgaccttcaaatcagagaatggaataaaacatacctgcacttcaaaggcattgagttagtagtaacaaattgtaactctgatgaaaaaggtagtgcagcaaacaacagcaattattatgcgttgaacaatttttaggagatttaataaaaatgaattccgatgaaaaaaacattgagcaaacaaaggctggagttgacagaagaaacaataaaaacaattgacgaaaaacgtttgggttgggtaagccagttcccttcaacaattcaaattaatgaggcttacatttcatcaatcaagtattattgctacgaattaaacaagccttattactgtgttgaattagcttttgaacttgactcaaaatggataaacattgatgtttatatgcacttcaatgagctaaaaaacattctgataaagtcaacgaattttccaccggaaagcctgattgaaggaaatcaattgaagcagcatttgttcattgaaggcgcactatctatccgggaattgtttgacacctactttcattgcgaggacattgatttaacagcgcttcaaactgttttgaaagatgatgatggaaaggaaatagacgaccacaatgtctattcagtgggcagctttcttcattatctcagcaaataacagataattggacaggccgggacaaataaatttgcttttgaactcttcaagtaacttcaatctgagtgatttgaaagaacgcaggaaaaccaaatagaaaatgttgaaactgcaatcagaaaaacagtaatgaacatttgaagcacttaagaatcgcacccttgatttcgtttccgtttccggaaagaaacgccaaataatttcgtcaattctatttttgcttaacatttgattgctatctttatctcatggcagaactcctcagatttcatacaattagacctcccgagcgtttgaattcctcggtgaattacaaggtagatactcaaaaggtaactcctgacgacactttgattgtcaacattactgatgaaaaatcagactatgcaaggacattttattttaatgggaaggatgttgcctcgaaggatagtattcattttaaggtaacaaaaattattgaagggattgaccttgaatggagcggagcaaaaccaacgcttatcccggaacctgttatcattgacctaaagcctgaatggttcaaaatgggatactatgtttatgttgtagcaatgaagtttaaaaaggaaaattacttttacataggaatgaccggagatagaaagcataagactgcccggtctcctttttaccgtatgagtgggcatttcagtttgcttgaatcatcaacgcaaaaccaagtgataaagggaattcgcagaaactttgaggttggaaccgatattgaaaaaatacttggcgaaatgaaattcacttactatgcatacatgattacgccatttgataaagcagacacctcaaaccatgatgcgaatagaaaacatgctgaatcaattgaaagcagcttaatccacaaaatgaaagatggatttggaagtcagtttgttttcaataagaatcaaagcacaaaaaatttcaacaaggttgatgcaattgctcaggaattgatgattgatgttaaacaaagaatcaaatcaaaagtttccaattagtttcgtttcctttcggaaaccaattaataatgtctccaatttgctactatgttcagattaaaattgatatttttactaaaattcaattatatgaacgcacctgaacatttggctcacaagcctataatagttgtaaatgattatgatattaaagacggtatttacgctggtcatagtgatgccaaagctttatctattggtcaagctcaatatgatgcagatgagattgcagcgaaaattttccggcataccggcacaagatggagcagacaaagtgaagaaatgccgattcatcgcacactggatttaacaattttgatacttggctctatgctaataagttcaacaacagagggggcaataacaaatttggatgaagtggtgatttcacctgaaagacttcaagagattagtgactactatgaaaaaaataagaaaactttacgcccaagattgaaagaaatgaaaaacctgttggataaattaatttgaaaaatgaaatagcttaatgggaaaagataaaatgcttttcaaagatagggtagagaaagtatttaagatagaaaaaaggattttctcaaatttgtttccgtttccgaaaagaaacgggaaacttccggaaaatccttcattttcattccgtttcgtcctaaatccgtcccaaacaaacctgccccaaactcaaaagcgttgatttatgtggggtttcacaggtgaggttaagagcctacgataggcgttaaaaccaatgaaggtattattcctttgacttcaataaataaaaattcaggtagctttttgaaaataccgctaaaacaccctcttatatattatttggaatgtttactttgtgatttggaataaaaaaagaaaatcccacggagtacgcaggatttaagaaataatcttcggcttatagccttattgtgataagctttcaatgcaaagatataaaatttaaacaaaaagtaatcagatggaaaaaattcttggactagatttaggtacaaattcaattggttgggcattaagagatacttcagtaaacgataaccagataattgataaaggtgtattaacctttgataaaggggttggggaggtaaaaggaattgaaattccattagtaaaagccagaacagaagcaagaggaaaacgcaggaattaccaagctgaaaaatatcgtaaatgggaattacttgactttctgataaagaaaaaaatgtgcccattatcaaatgaagaactaaacgaatggaagcattataaaaaaggagttggaagaaaatatcctcaatcagaaaaatttattcaatggttgcggtttgacttcgatggcgatgataagcctgattttggattattcggtttcgacaaacacgaaagttattatgtttttagaatgttagttgtctgtgatgatgagcagaataaaaagatattccagagcaatccgcacattttaggaagagtgctgtatcaattggtacaaagaagaggttatagaggaagagatgacgaggaagaagaggcaaaaacgatcttgaaaggaagcagcaaaaatggcactgctggtgttgaagcaattattccatatatagaacaatacaaaacacttggggctgcgttatattatttacaaaaagaaaaaaatgagcgtatccgtaaacgatataatcttagaacagattatgaacaggaactgaaagaaatatgcagggttcaaaaccttgacgaagaaacttataaacggttatcaaaagctattatctggcaacgtccgctacgtagtcaaaaaggattggtgggtatatgcacttttgaaaaaaataaagcaagatgcccagttagccatccattgtatgaagaattcagaacatgggtttttataaataatcttaagataaaattaccggagaatattaataaggcaacttatttaatgcaaaatatttacccactattttataatgcatcaagagattttaagctaagtagcgttttcaaaagactaaaaaaagacaacggagaaattactgcgaaatatacccctgatacaaaggcaatatcctgttccttgctaaataatttttattccttgttaggtgccgattggaaagaaaagtatggatggaaagaaacatttcaaaaccaacttaaaaattgcgattattctattgaagatatttggcatgtgctattttcatttgatagtaaggaaaaattaaaagaatttgcaacaaataaaataggtttaaatgatgaaaaggcagaaaaattttccaaaattaatttacagcaaggctatacaacacttagcttgtcggctattaaaaaaatccttccttatctatatcatggattcatttacagtgaagcaatttatttagcaaatctgcataaagtatttggagaaaaggaaataacacctgaaaatgctaaaaactattctatagaaatagaaaacgtgattaaaaaacataatcatgaaaagctattggtgaatgtggtaaatggtttgattagcgaccaccttaatctgggtgaatttcgttttggtatggataaaaattatcaattagatgatgatgacaaaaatgatattaatgcgaaattattagacgtattcggcaaagatacatgggaccaaaaattgactaacgaaaaaagagaaaatgcataccagtatgtacaagtcaactatctcagttttttaaaaaaacctattactgctaaaaaagaagatttatttattaaatcaggacgactacatgacatgatattccagcatttgcaagatacttatcaagtaccggatgaaaataaaaagtatttatggcatccatcagagcaggaaacgtatccaaacccaaaggaaaaaaatggcattaaagtattaggagaaccacgcccaataagtaatggatttaaaaacccaatggcattgcgaacactccatgagttaaagaaacttatgaactatttattacaaactcaaaaaattgatgaagatacgcgcattgtaattgagatagcaagggaactgaatgatgcgaatatgcgtaaagcaattgaaaaataccaacgtgatagagaaaaagaaaatgatgattataagaaaaaaataaaagaaatagtagatgagtttaaattaaacatcaatattaatgacaaagaaatagttgataaatataggctttggacagagcaaaagcaaatatgcttatatactgggaaaatcatcaattgcaaagaattatttgatggctccaaatacaattatgagcatacgatacctgcaagtataagtttcgataatgaattgaaaaatctaactattgctgacataaattataatataaacatcaaaggaaaaaaaatcccttttgattgcccaaattatgataaagacattttaggatatactgccattaagcctcggttgatctttatggatgataaaattaatgacttgggaaagtccttaaaagaatggattaacaaaacaaaatttgcttctactaaagagataaaagatgcttgtattcagcgaagacatttaatatatttcgaactggattattggcgaaaaaaatatgcaacctttacggataaagaatataaggctggatggagaaacagtcagcttagagatacacaaattgttaccaaatacgccctcccatatttgaaaacaattttcaaaagaactgaagttcaaaaaggaactgtaacggctgcctttagggaaatatacaaaatacaaccccggttagaaaaaaaagaacgtatctggcatagccaccatgctattgatgccgcagtactaacattaatacccccagccgccatacgtgataaaattttgtttcggtacaatgaagaaaaagataataaccctaataatacctatcacgaaaccccaaggcattgggctacatttgaaacgcaccatatactttccattacagatgatgttttgaataattttcaggcacaaaacaggacattaaaggataccttcaaaaatgtgcgcaaacgtggcaaacaacaatttgtaaaatacaaagacgaaaatgataaatggcactataaattagatgaacaaggaaaagaaattccattaatagccaaaggagatacaatacggggtcaattgcataaagaaagtttttttggagcagtaaaacttccagaagtaagagaaaaagatggcaagtttattcctaaaacggatggtaagggaaactttgtttttcaaataaatgaaaaacgtaaagacaatattttcattgtaaaaagagaagaggatttatccagctttactaaatttgaagactttgatattataattgacccaaaccttagcaattattttagaaccgaaattggaaaccggctaaaggaaggtaaaacatttgccgaggccatgtcagaacctatttgggcatttggaaaatcaaaagataaaaatggcaactctataaaaccaatcagacacgtaagatgcagagtaaaaggaggcggtggggggtatgttaataatcccgcagttattaaacctatcaattcgtatctttctaaacaggaatacaaaagaaacatttatgcacttaatggagaaacagcggtatgtggattttatcaatcacttgtaaataatgaattagtacgggaaatagaaccttactcaatattgaatattgcaaaattaaaagacggtaatgatttggaaagtatagtaagcccgcattatgaaaaattaataaaaaaagaaaagcatcttattcctctttatgcaacattaaaagtaaatcaaaaagttttattttatgaagaagatgtccaagaattaaaaactcttgacaataaagaattgagtaaacgattatactttattgtcaaattcgaagatggtagaatttccttaaaacatcatttaaattcaatgtctgaagaagatttgaagaaagaaatgaaacgactaaatttaggtgatgttggagcctcttcttttaatttttcatttccaattccaaaattaagattatcgaaagcaaacttcaattttgcaatcgaaggcaaacattttcaaataaaaccagatggtgaaataaaatggaaataaaatgatcaagcgcaccctctacttcggcaaccccgcctacctcagcaccacacaacagcagttggaaataaaggtattggaaacgggcgaaactaaaaccgttcccatagaagatgttggagtgctcatacttgaccattggcaaatcacaatcacacaggctgtaatagcacgtctgcttgcaaataacacagcactcattacctgcgataacacacaccatccagtcggtttgttgctgaacctcgatggtaacacgcttcaaagtcgcatatttcaggcacagctcgaagcatccgagccattgaaaaaacaactctggcagcaaaccatcattgccaaaatacaaaatcaagccgctaatcttggacaacagtctgttactggaaatttgtttaatgcacctgacaaacttttattaaactatgccaaagaggtaaagagcggtgacagcgaaaacctcgaggccacagccgctggttattactggaaacgtgtctttccagcatttctcaatttctgccgtgagcgtgaaggattcccgccaaataatcttctcaactatggctatgccattttaagggctatagtggcacgcagccttgtaggttcggggatactcccaactctcggcattcaccaccgcaaccaatacaatgcctactgcctagcagatgatattatggaaccttaccgtccttatgtggacaaagtagtttgtgaaatagtaggtaacaatgggcaatacctcgaaatgacccctaacatgaaaaaacaattgcttacgatacccgctatggacgtaatgatagacgaacaaaccagcccgttgatgaatgcagtgcagcgcaccaccgccagccttgcaaaatgctacgaaggcaagacaaggaaaatattgtatcctgttttataaatatctccatctcccgttgggagggctggggtgaggctatgtacgaacgtttaaacgcatatcgcattatgtgggtacttgtatttttcgacttgcccactgaaacaaaaaaagaccggaaaaactatgcactttttcgtaaaaaaatgcttgccgatggtttccagatgtttcagtttagcatttatatgcggcattgcagcagtaaggagaatgcggatgtgcatatacagcgcacaaaaaagaacctgccagaaaaagggcatgtaggtattatgtgtattaccgacaaacaattcggtatgatggaaatcttccggggacatgacgtaattgacactattcccccaccacagcaattggaattattttaatcaagattcttacataaacaggaataaaaaaatgagcaaaaacccgtttttttattcctgtaaataggctgaaaacagccatagtagccaactgtagcgtttggtgttgtttaagacctgaaagctactaaaaattgaaagcaaatcacaactcttatagatggggcaaaaacaaccatgtcgttgtttaagacctgaaagctactaaaaattgaaagcaaatcacaactgtgccgtcatgactatttaacccagttgcgttgtttaagacctgaaagc

SEQ ID NO: 4329 - DNA, 6104 bp, synthetic construct
  misc_feature 1..6104: note = Synthetic
  source 1..6104: mol_type = other DNA
cccgagcggcggggtgtttaggaggaagggaagttttgtgttgataaggtagggtacgtagaggatgaatctaaaaatcgtaagggaaaccgtaatccgttaaccaaataattgaagtaatttggttcagtcttagaaatcaagctaaattggatatgtcttataaagacagatggcataagaaagccccacggagtacgcagggctcaagaaattatcttcggcttatagccttattgtgataagctttcagctacaaatataattacatttttgaaatacaatacgaccatggaaaaaattttaggcctcgacctcgggaccaactcaattggttgggcgatcagagacacttctgtaaacggaaatcaaattgtcgacaaaggcgtgttgacctttgaaaagggagttgcaatgaataaggattctgaggagcctaaagtgaaaaaacgtacagaaagcagaagtaaacgccgaaactatcaagctgaaaaatatcgaaaatgggcattattgaagtgcctgatcagaaataacatgtgcccattgacggaagacgaactgcggatttggagtataggcgaatggcagacagttgacggaaagaagaaaaatatcggacgtaaatatccacaatctgaaagatttattcaatggctaaggtttgactttgatggcgatgggaaaccagactttgaaagatttggatatagtaaacatgagaattgctatctgtttcgaatgcttgctgtaagcgagcaacctgaacatttaaggttgttcaaagagaatcctcatttattgggaagagtgttttatcaaatggtgcaaagaagaggatttaaagggcgagacgaggaagaagcagaaacaatgctgaaaggaagcgaaaaggccggtactgcggggcgggacgcaatttcggatatgattgccaggtacaagactctgggtgccgctttataccatatcaacaaacaaggtgaacgcattcgcaaaagatacaatctcagggccgattttgaggcagagctcaaagagatatgcagagttcatgatattgactcaactttccagcatcagttacagaaagctatcatttggcaaagaccgctgagatcacaaaaaggccaggttggaatttgcacctttgagcgaaacaaacctcgttgccctgttagccatcctttatacgaagaatttagaacatgggtgtttataaacaatctcaagattgaaatacctggtatggacaggaaagataaactcgaatatattcacagtaagatatatcctctattctccaggaaagcagaagactttaaactcagtgagattgctaaagaattagaaaaggtagggggtaaaattactggaaatttcaaatacggcgagaaagatgcaaatggaaagcccaagaaagatgcgcccgatactaaagtactcaccaataaactcatgtatcggttcaatgaactactcgggagggactggaaggaaaaatataattggaaggaagttcttaccaattctgaaaaatccgttccatacagttatgaagatatctggcacgtattattcacttttgatagcactgataagctgggagaattcgccaggataaaacttggacttagtgacgatgcctccgtcaagttctcgaaaatatctcttcaaagtggctacgctacattaagcttgtcggcaataaaaaaaatacttccttacctccaacgaggcttcctttatagcgacgcgatttacctggcaaatttacccaggctgtttggcacaaaaagcctggcgccggagctcgttgaccatgtggcagaaacatttttgaacattaaagcgaatcactttaataaccgtatagttcttggcgcggtaaatggtttaattgccagccatgtaaacagtgacgttcgatatgccattgaagataacagaccgcttgatgaaagcgaaaaaaaagaagtgcaggaagcccttcaagattcgttcccgtcttctatatggaacgaactctctggcgaccaaaaagaagctctgatatttaaagcagagaaccttttttgggaattcttaaaaaagccaatcagaagcaccaaagatgttttattttatcgcataccgcgactacatgatgaagtatttgaatggttgcgggatacttaccatattcccgaggaaaataaaaaatacctatggcatcccagcgaacaggaaagctacccgaatgcaaaggaataccgtaaatatgccttgaacggtaagtacgtatatgttgaggttgctaattgcggttcattcgaaagaaagtatcctgaagcacattgggaaggcgtggtgatacgccgccttggcgaccctcagccagttagtcggggattcaaaaatcctatggcgctaaaaacactgcataagctcaagttcctggtaaattatttgttagaagccggcaaaattgacgaagacacccgcgtcgtaatcgagatagctcgcgaattaaacgatgccaatcgaagaaaagccattgagatctggcaacgaattcgtgaaaaggaaaacgaagaatttgccaaagcaataattggcaccgcaaaacctaaataccccaatcttgacgaaaacgacccctcagttatcaataagttcagactatggtttgatcaaattgaaaacggccaggagattctaaaacaagtcaaagcgttaaaagatgatgtcgacaaattgagactatggggcgaacaaaaaggtcaatgtttatacacaggaagaatgatttctatcaccgacctgtttgatggcaacaaattcgattttgaacatactatccccgcaagtattagctacgacaatgaattaaaaaatcttacaattgctgatgtaacctacaacaggcaaataaaaaagaacaagttaccgacgcaatgccccaattatgaaaaggaagctgcaggatacccacctatcacgtcacacctgaggtggatgcatgaaaaagtcaggcacctggaaaagcagtatcttgaataccggaataaaacttcagacaaaaaggaggttagggaccaaattgttcaacggaggcacctgataaaatttgaattggattattggcggtataaatatgagagttttacttgtacagaatataagtcaagttggagaaacagtcaattgagagatacacaagtaattacaaagtatgcattaccctatcttaagacaatcttcaaaagaacggaagttcaaaagggtgaagtaactgctatattcagagaaatctaccaaatagcccctcggctggaaaaaaaagatcgggctaagcatagtcaccatgccaaagatgcggcagttcttacacttattcccccatcggccatcagagaccagatcctgttgcgctataatttggagaaagacaaaaacatacattcaacttatcatgaaccacccattggctggaaagattatagtcccagttacattcatgtaattgatgaggatgtattggttaataatcttacggaaaaccgtacacttactcagagtaagaaatatgtacgcacacgcggcaaaatacaatatgttaagtttcaggataacgcgggaaaatggcagtacaaagtcgatcaagatggaaaccgtattccattagtagcacaaggcgacacaatcagagggcaactacatattgaaagtacatacgggaagatcgaaaaagatgggaaatttataatggtcaagagaaatgccatcagtgaattcaaaagcttaaaagactgttcaagtattgttgacgaaaaagtgcgtcaagttgttgaaaatgcgcttacagaaagaataaacaatggactaacatttgagcaggcaaaaatgcagcccataccatttccatcgaaaaaagcggttattaaaaaagttaggtgcaaagtcgctgccgggagaggatacctgagcgctgagcgagctatctcattaaaaaaacatacatttctttcaaaacaagaacataaacaattcatttatacacaaaatagtgacaatgtcctctgcttatattacgagggcttggtgaaagggcgtgtggaaagggccttcaggatattaggcatttttgacttggctagcttggacttgaattcgaaacacgatcttctaaaagagccatattttcaaaccgtagaagttggccgaggcgccaacaaggctctgttacagttctgttggatacttgagaaaggcaccaagtgcattttctataaagagcatattaccgaactaaaagacctttctcctaaagaatgcctcaagagagtttataggatatataaatttaacgaaataggcagtggaaattccagcacaaaatatttatatctgcaaaaccatattgaagcaagaagagatgacgaattgggagaaggtgatgtttcttttgatccggaaaagtatcaggccaggctaacggttaacgcggcacagtttacggcagcaattgaaggaaagcattttaaagtattaccagatgggaaaatagagtggcttttttaaaaaaaaacgaagatcagctattaagatgtaggcttttatcaataataaatcccgaaggctaccgttcttaaatacacgaaccaatatccttatgataaagcgcacgttatattttggaaaccctgcatatctacgaactgcaaacgagcaactgatagttgaaatgcaggagactggagagctaaaaagcgccccaattgaagatattggcttcataatattagaccaccaacaaataacaataacccaggctttgatggctaagttattggccaataatacggcgcttattacttgtaaccacactcaccatcccgtcggcttattgcttaaccttgacgggaatagtctgcaaagcctgcattttcaatctcaaattgaagcttccttgcctctaaaaaagcaattatggcagcaaaccgttatatgcaagattctgaatcaagcagctttgctaggattacagaggcaggaaaacaaattactactacaatatgctaaggatgtgaaaagcggggatagtgaaaatcatgaggcaaaagcggcagtttattattggaaacgtctgtttcccgactttctggaattccgtagagatcgagaagggccgcctcctaataaccttcttaattatggatatgctattttgcgggcgctggtcgctcgcagccttgttgcctcaggacttctgccaacattgggaatccaccatagaaaccaatataacagctattgtctggctgatgacataatggagccctaccggccatttgtggataggatagtttgtcacattgttagaggcaacgggaggtttcttgaaatgactccaagtatgaagaaggaattattatcaattccagctatagatgttaggatagatggtcaaaaaagcccccttttaaatgctgttcaacgcacaactgccagcttagccagatgtttcgaggggaaggtgcgaaaattattgtatccagaacttacttaggattctggacgttggccgacctatcgatattatatattttgcctcgagtgagacatgtttacacgtttaaacgcttaccgaattatgtgggtgcttgttttttttgatctccccaccgaaacgaaaaaagaacgaaaaatctacgctcgtttcagaaaagatatcatggccgacgggtttcaaatgttccaattcagcatatacctcaggcactgcagcagcagggaaaatgccaatgttcacattgaacgtgttaagcgaattttacctgcaaaaggccacatagggataatgtgtattactgataaacaatttggcatgatggagattttcaggggaagagatcaaattgacaacccggaaacagttcaacaactagaacttttctaagataattcaaatgacacttttcccatcttagaattcaaaaaagacaccccaaggcaatttttttaatccaaaaaatcgggcaaaatgcacaacaggactgggtttcagccaatcctgttgtacaagagctaatctacagcataatttgaaagcaaatcacaac

SEQ ID NO: 4330 - DNA, 23432 bp, synthetic construct
  source 1..23432: mol_type = other DNA
  misc_feature 1..23432: note = Synthetic
gggtgcaagtttttgtactattacggcttcatcccgctctttgtagtaaaacctgccgaaaagctggttggtgtccatgtcatgtgtctcttcaatgtcataggcagagtccggcaggagggcaggtacccatccattcttgatcgccttatcctcttttacggatgctgtatcggagtatttgttgataagtgtatctgaaaaataatatttcagcataaaaaagactgcaacaaagaagagcagcattgcaatgatgatttttttcataagttttttccttttgtgtttaattaaatagataagatttgtatctcacagtgtgatatcgcctccggctacaatttggccatgtatgccgtcctgtgtggcgatcacttccgtaccaccgttgcttccgcctacaacccctccgactccgaaaccgacaccagatgaacagcctgttaaaagagacagaacagccaaagtgaaaaagagatgcttcataatgtttttcccctgtagaaaatgaggaacagacccagaaaagcagccgacactagaatgatagaagcgcctgaggtcagattgtatgtgtaagagaaccagagacctacaagtgtaaaaagcgtcgcaagggtaccggagagcagcatcatggaaaaaaggctgcttgagagcttttccgcgatgtagacaggaatggtgagcatagcgatgaccaggatgagcccgaccaccttgatggcaacgacaacggtcaatgccgagaggatcaggataagtgtatagtagaacctgacatttacccctctcagcgcagcatattcgctgtcataagagacggcaaggatatgcctgtagccgaaggtgatcacaaagagaataactgcaagcagtcctcccatgaaatagagatcttccgtgttcacggcgagtatggagccgaagagatagctcatcaggtcgacattgtaaccgggtgtcaggtcaacaaagatcacaccgatagccatacccacagcccagatgagtccaatgaatgtatcaatacggtgtctatttttcatagtcagtacagcgatgagcagggcggcacctacggcaaagagggaggcacccagaaaaatgggcagtccaaaatagacggcaaggccgatccctccgtaggatgtatgggcgatccctccggcaagaaagaccatccggttgaccacgatgagcgaaccgatgatccctgcggcaaaactaaccagtatacctgccataatggcatgctggacaaaatcgaacgacaaagcttctatcatttggcttccctccatttccctgccggttcgagcggatctgtatcgggattgcaggtgttgcaactgtccgcacccagcatttcaagcagttctatttcacagaaatgatcctggtcgccgtgggtatggaaggttttctttttatcgctgatatcgtggaaggagagtgttctgttgacatgggcggctttgttggcatactccagaatgaccgagatatcatgactgaccacaataacggtaatctctttgttgagtagcctgagcagttcgtatatctccttctgtcctttggtgtcaatgctggctgtgggttcatccaaaataagtattctggggtgtgcgcagagcgctctggcgatcatgaccctttgtcgctgcccaccggagagagagccgatcttgttctgggcataatgttgcatacctacctgggaaagtgctcccatagcacaggctatctcatctttcccgtaaccgaaaagcggcctcttctcgcctacatgccccatgaggaccacttcaatgaccttgatagggaagtccgtgtttatgtttgtattttgcgggacatagccgatggaagagaggttcttgtgcggtgcttcaccaaagacctttatgctgcctttctggaccttgttcacaccgagtatcagtttgagaagggtcgattttcctccgccgttggggccgataatggcaaggaaatccttctcttcaacatcgaggttcacattctccagaacaatatctttgtcataggcgaaggtgaggttccgtatttcgatgacattcatttacgttctacttatttcctgcaatggcacgtgcgatattcagaaggttctccgaccatttcttgctcaaaggtgatacctttatcacgcttatcttcaactcttttgccatggtctgtgctgcggcatcggagaattcgggctgcgtgaagatcgctttgatcttttctgctctggcttctttgatgagtgctatgagttctcttggtttggggctcttgccttccacttctacgggaagctgtaccaagccgtattcatgggcgaagtagccccaggagggatggaataccatgaatttgctgcctttgggtattttagccagtatggctcttatctttctgtccgtctcattgatctttgaaatgaaggaatcaaggttctgtcggtaatattctttattttccggatctgctttggccagtgcattgtaaatatttttggcgatgatcctgacattggcaggggaggtccaaacgtgagggtccaaactgctgtaacccatctcttcatgtttatgacctgtgtgttccccatggtgttcatgtgcctgcatgggcagtttcgttatgccctgtgtcaggtctatgatctgcattttaccattgaggtctttgaaccttggaagccatatcttctcgaactcaacgcctatggcaaaatagaggttcgccttggcgatctccttcatctgcgagggctttggttcataggtatgtggggagttgccgggcagtaccatcacagagacattgaccttctttccgccgacggctttgacaaaactcttttccggcaggatgctgacgactatattaatattagaaaatatataagtactcaaaagtacaagtaaaaggatgatttttttcataaacagattatagccaaataatattatcgcaacaacaaaatacccaaacttttgatagatatatttactaagtgccttcatagaataaatagaaaatgatatactttgattcgatcctgcaatggaaggtatatttatgaaaaaatatctgcttgccgccctgatgctctctgtgacattgttcgcggacataaaagtgggagatgctttcccaaaaatgacactgcaggaccagttcggcaaagcacatatgctttccaggcatgacaggctcattcttatggcttttgaaaaagatgtttccattggactgagtgattacctcaaaagcaaaggaaacacttttttaagtcaacaccatgccatctttcatcacttccatgtttgcactgcccaaaatgaggaagtatccttttcctgtattgctgattcgtgatgattctggtaatatcttcgacaggcgcaaaggcagaatcactgtttacacactcaaaaattttaaagtaagcagtgttaagtttatagcactaaaagaccttgacgcgatctgctggctttcacatgcctcctttcttgtgcaattgggaggcaaacgcattctgatacagtaaaaatactcaaaccgggcgaagttttcaacatgatccatagttttggctataattccgaaaaataaaccgtatcaggaacgaaaatgcaggctaacacgataaacagagagaacattgagatcatggtcatgcgcttttacgggaaagtgattcaggatgaaacagtcggacccttcttcatagccaaactcggcagtgacatgaacagcgaagagtggagggtgcacctgaaactgctggtggatttctgggcttccatcgctttgggtgacactacctacagagggaacccttttgcgccgcacatgtatcttggagaattgaaaagagaaacgtttgagcagtggctcaaactcttctatgccacactcgatgaagtatttattccccgtcttgcaaatcagtttaaagagcgaagcactattatcgcagggaacttcatgagaaatctggggattagataatctttacagatactggtccaacgtatatttcatatcttcatcgagatcgaggttgtttctcatccactggagataacctctgtcttcacgggcgatctcttcgatctcgcggtctttgtatttcccgaatttgaacgttttcataagaacaggcgtttgagtaagttccgccattttctgcatggggttgattcccggaaaacgttcctgggtcagtgtaaccagtttggagagcagcagtttcatcaccagtacatcgccgatggcatcgtgtgctttgatggtgatgccgagtttctgtgcttcctgggcttctgttttgtagagtcccaatgagtagcgcaggtactgaagtctatggtaggggctgtccggcagaagatgtttggcgcagcgtacggtgtctatcagcgtatagtggttgacaaacccttctttctcaagcataccgaggtcaaacgagatattgtgggcgatcaggtagttttccgttgtgttgagttcctgcactcttctggcaaaggctgtttcactgtaggcgggtttgtctgcaatgacatcaggtgtgatattgtgtacctccatcgcttcgatgctgataggtacctgtgtggaacagagttcgtcaaaaacctctatttcatcctttgagtgtacgatcatcgctccgatctgtatgatgcggtccgcttcctggttgcctgtggtctctgtgtcgaacagtacgtattttgccattttgagtcctattatataagtgaagaatcatatcagattttatctgacaacccccaactctaaatcacacatggtataataattcccattcttacacaggagcacaatgcatgacaatggatgcacaagttatagaacatatgatgaacccgaaaaattacggtgctctgcccggtgcgaatgccgaaggtatgggaaagaacccggagaacggtgaaaaggtggctgtatacctcaggatcgagaccgatgaggatgagccttatatcggcgatatcaaatttcaggccataggctgtacgacgactgtagtggccggctccatgctgaccgaagaggccagggggcttaatctcaacggtgcctacaatcttgtagatgcaacgatgaagctgctcgagaagcttcccgccgaagatgccgcctgttccgaaatggtcgccctggcgatcaaagccgcagtcgatacctatgtgaaacgacaggaagacccgtcatatccggtgatcacctatcaggtggcaaactcctgtgtgcccaaagaagaaaacaaagaagaaggaaagtaaaatgaaaacagtggcgataaaaacacatgaagcatggcttgctacactgatggcaggatttatgagcaaaacagagaacaagcaggttcttttcgacttctcagacatccttttccggcactttacctggcttgaaaatgaaatgataacattgaacgaatcgtatagttatgacagggatatcataccgataaaggtggaaaaactgagtgatatgttacatgacatcgtaaaaagactcgatgaaatagacctgcagcttctcagttctccggacaaggacctcgatgccaggatatccagcgatattcattatatgaggggagtcttgaaaaaaatggatgatgagactgtcacggcattcagtatggaacgcaaatttcccgggattgaactaacagaggaagcgacggatgcgcttacgctctttttgtttgaagagacttataaagagtatgaactcattatgatctacaactatctgaaagcacacagtaacgacgcctatatgaataggatcttccaaatactcatcgaggaaagtttcttccatctcaaaagttttggagatatgggtgcgaagatgggtatccttgcagtgccgcgtgtcgtgatgaaagagttgtatcaggttacagatgtggtacagttcctcaaagacggcattaacgaagagcttgctgccaaagaagagtgtaaaaagctctctgaagcggtagcaaaagacagtgatgagttggcaaaattctttgacttcatcaaccatcaggagaactaccatatctcactgatgacggatgcgttggcccactatgcgaaggcagcgaatggctaagcatttcacttccgtcatttcacactatttcgggaaattcgcttcaaaagaattccccccatcggtacagtgtttcatcaatactgcctatgtcaaactgatggggctggacatgagtgagttcagagagccgtgcagctacaaaacactcaataaactttttaccagggcactcgaaaagccgcgggcacttccggaagatgaaaacatattgatttcaggggtagatgcgctcattaccgatgcaggaacgatcaaagaaggtaaagcctaccagatcaaagggatgagttacggcatagaggaacttttcggagcgtatcatcaggaagccgcggcaaaagtggaaggaggggagtttataaacttttatctctctcctaaagattatcaccgatatcacattccgatgcgtctgaaagtgaacagcctgacgcatataccggggaaacactaccctgtgaactttcccctgcttcgcaacatgaaggaccttttcatagaaaatgaaagagtggtcattgaatgtgaggatgcgaagggaagaatgcaggttcttgtacttgtagcagcgctcaatgtgggtcagatggtcgttaccttcgaagagaaagtaagaacgaattccgagataagagagccggtccattatacctatgaagatctatgggtggagagaggagagttctacggatggttcgaaatgggttctaccattctgaccttctctgaaaaagggagtatcgtccctgaagtcgccatcaaccagaaggtctcatatggtgatgccctgggcagaatttgttaaaaaaggagaaataggatgctaatggtcaaagagatacaggaatatgcgcagatacgtaccaaagcaagggcctacctctgctatatcatgagtcgaaacatctcccagaatatggagagcggtacacttgaaagtgtcataaaaaaaatagagcatctgcaggaagccctgccgcagagtgaagtgatctatgccattgacggtaacggcatacagatcatagacaacatttccaaaaattcgaaactgagaggctttggaaaaggtgaagaccggagtgaccgtgcctattactacaaaacgcttcaggagcaccgatgtgtgctgactgacccgtacccttcacttgtcagcaatgcactggttgtaacagcaacattccccctgtatgacaaagacgacaatcttctggcgatcatctgtgtcgatatcacactgaagaatattttgaaaatggtacatcccagttcgatcgattcgaatttcgggatacttagcaaatggatctatacagcttttgccgcagcactttttgccgtagcactgctgcttttctttaagggagttgcagattttcttcattttggagtgaactttgctgatatcgatatcaacaaaatcttcaagtctaccattcttctgacactctctctggcgatcgtcgatctgaccaaagctatcttcgaagaggaggttctcggacgggtcaaaaagaaggagtctacggatgatacccatcagacgatggtacgattcctgggctccattatcatagcgctttccatcgaagcactgatgctggtcttcaagtttgccttgaccgatccgggaaaactgctttatgcggtttatcttcttgtcggtatcggtgtactcattctttctctttcagtttatctgaaagtcaaccagaaaaataaataagagagataatgaagtccaaactgatcatattcgatatggacggtactttggtgaactcatcactcaccattgccaacgccatcaactatgtacgccagaacctcggcttcgagccgatggaacaggagtatatcctcaagcatgtcaatgaccataccatcaatccagcacaattcttctaccattccaaacgctttgaccctgaccatgaaagatggttctcggagtattacacgaagaatcatgaaaaagagctggtactttatgacgggatcagagagcttctcgacgcattgaaagagaaggggcatgcactcggggttgccacgaatgcttaccggggttcgaccatagagtcactgacacacctgggtgtccatgatcattttgacgccatagcctgctacgatgatgtcgcacaggggaaaccccaccccgatatgctctacaaattacttgaagagaccaacacagaaaaagagaaagcacattttgtcggtgacggcccccgagacgagatggcaagccagaaagcgggtattccctataccatggtcgactggggatttacggagcatactgacgcggtcaggtcggtcaaagagcttgaaaagattttactgagggtttaatactggtttccaccaacaactttacctgttcgttgcaaaatactattataagtggtacgtaataatcatgtgaaaatatgagatgatgttttaatgtggtttgaattggttgcgggagaaggatttgaaccaacgaccttcgggttatgagcccgacgagctaccaaactgctctatcccgcgacatttataagaaagtatgagattatagcttgaataaatatattcaaacttaaatcttcggtggatggggtagagggattcgaacccccgaataccagtaccaaaaactggtgccttaccgcttggcgataccccaaccaaataagctttattgcttatgtggacggcattatagcaccaaatgtttctcttgtcaagaggtttttttaaaaaactgtaaaattttctccggtatggaaaattatttgtgtataatcatcttatgagtcataaaaaacacccacagccggttaaacggatcgtcgatattgtcaggcggctttacgcatttgagaggcttcgtgccagtgagatatccaaagagtacgaggtcagtaccaaaacgatcggtagagatatgaaaaagataagcgagatcattccgttgctctccggcagaggtgtctaccatgtagatacggaaaaaatgctgcatttaagcagactgccttcggcaatgctccactcttttgcttccaatgcgggaatgagcatagagtgtctgggcggttcgacctctgccatcccggttatctcttttgccattgcttacgacggtattcccaagcagatcgccgagcagatcatacagagtatggaaaaagagtgcaagtgccggtttgactacaccaataaccggggtatctccagtctcagaacggtttctcccatcaagctctatacagcaaaaggaaaatggtacctgcttgccaaagacgatacaagcaaagaggtaagaccgtttgattttctcaagatcaggcagttcgagattcttcccggtgtacccaatgacctgacccgctcagagatagaagaggtaaatgaaagggcttccatctgggcgagtgccgggcagaagccttttgaggtacgtctgcatgtttctgcctacgccaaacgctacctgatggaagtaccactgcacaaaagccagaccctggagtctccgcatacagacggtacggccacttttacctatcaaataacacataacatggaactcctccccgagatcaagaactggataccgcacatccaggtcatagaaccaaaagagtttagagatgttttgaagaaagatgtggagaagtatttggctgaaatggataatatggacatctaagtgtctactgaattgtgttaagatgtcagaatgatatattataagactttatagatttcagatagaatattttaaatgtttaatgtttgataaggaagagaaaaaatgagtaaaaaaatattagcagttgatttgggaatcacttcttttggtttcagtgtacttaaagaagtagaggaaaatagttacataaacatagacaatagtgtcattatgagagatgcaccctatgataaagatggtaaatcaaaacagacatcacgcagggaacaggccagccaaagatcattgggtgaaaagagaagacagcgaattaaagaggttgcaaaaacttttaactcctttggggtattgtcttatgatgaatgtatgcaagtacagaagaataatactattacagataagtggaaactaagagctgaagatgctctttatagaatcttgagtcctcaagagctgtttgctatcatggcacatatggccaaacacaggggatataaatcgattgctaccgaagatctgctttatgagttagagttggaacttggacttgttgaagagcaaacagaagaggaagatagtaaaacagatgaaaaacgacaggtttatgcagcgctcggaagactcaagcgtctaaaggagacctataaagtcgatacgatcgcacaggtgatacacaaagcgatacaagaaggtaaatttcgttcttatcgtaaccatgatgattatgaaaagatggttagacgtgaagatatagagtatgagattgaaacaattattaagaaacaatgtgaattgggagcatttgcatttgacggtgaaagatgtttacagtttattgaagtactgcatgaagcgatcacagatcaaattatgcctgagaatgatgagtctctttttggtcagtgtagttactacgcaaatgaaaaagcagcacctcggtatagctatctatatgatatatacaggctttataaaactttagctgacctgaaaatagattattatgatttaacacaggaagatagagataaaattgttgattttgttatacagaaaattgcaaaaggaaaaaatcttaaacaggtttattacaaagatatcagaaagatactcgggttgtccaatgaacagaaactctatggcaaagatgatcaggttgttattaaaggaaaatcttctcaaagaaccctgatcaaatttttctttttgaatgagataggcaaatttccaacattgatgcaaaagatactttctcatacagaggcattgaatatatttgcacaattagctgaagttgtacgtttccataaaacacctaaactagcattagcagcactgcatgaattgttggaaccttatggtattgaagtagaggctacagaacttttggctcttatcaaaagtaagagtgccggaacactctctatctctcatcgatttattttggatgctttgccatactttaatgaaggaaaagatgagagttttgttaaagaaatactcggtatcagtccttccgaggattataatacttatccgaaatcgcttaaatatttacatcttggaaaagacaatctttttgagaaaacacaaaatgccatcaataatcatgcagtcaaatctttagcatcgtgggcattgcaaaatatcgctgatcttagttggagatatggatcatttgatgaaattattatagagagtgctagagatgttttgccacaggtcatcaaagatgctattgaaaagtctatgaaagaaagggggaaagaaatagacaagattatagagagctataaaaaagagtttccgtctatggatcgtaagatggcaagaaagattaagctgcttgaatctcaaaaattcattgatatttatagtggtgaagtgatcaatataagtgatctttttaatggcagagcagatatagagcatgtcgttccacgctcattaggtggactcagtaccgattacaacctgattattgccaatagtgataccaatatgcaaaaatccaatcgcttgcctatggattggctgagtggggatattgaatatgtcaagagggtcgaaatgctgtttaatggacataaaataaattggaagaaacgcaagaacctattggcaacttcactggatgagatatatgtggaggtacaggataccaaagcactcagggcaacaagctaccttgaatcattagtaagtgaagtgctgaaaatgtattatccatttccaaataaagaacacagaaaaaatggtgtagctgtacgaaatgtaccgggtaagacaacttctaaaacacgttcctggctcggtatcaaatccaaaagtcgtgataccaacttccatcatgccgaagacgcacttatcttggcaacactgaatagaggctggcaaaatagactgcaccgtatgctcaaagagaattacggaaaaagtgaagaggaacttcaattactttggcaaaaatatacaccgcatatagaaggggtggcaatagccggctacataaaagaagcctatgagcgttttatgtcaaaaggggaagagagcttatggtatcgtgatatgtttggtagtatccgaagtgtatcatactgggtcagcaaaaagccacttagtgcttcttcacataaagatactgtttactcctccaggcatcgtaatccaaataatcctgataaggtggtgccgacagttcgaaaatcaattttaggtgcgtttaatggacttgatatacttaaaaacagacataagtggaataaagaagagtttttaaaagtttatgacaaagagatacgccaaaagctttggctctatcgtttagataacaccaacgatcctgtttatcgtgccatagaagaaagagctaataccatagggaatctcatagaaatttatatttataaagatcctcagcatgataaagcggtggatgaggtgtatcaggaagtaattcgctcattacttcaaaagccgattacggcagcaggtaaacctgtgtataaaactgtatttgtggatgatactttccttccgatagaaatagagagaggtgagagtaataaggttttggtgagaactgatgataactttttggctgtaatgtttgaaaaaggagaaaaagagaaactcaatatcagtaaagttgatgtcaattcattgcatcggttaaaaaaggaaaatgcaatgatcgtttatctgaacgaagtgatctatctatttaacaaaaagaagatcattcattatggagcattgagaagctttaagattttaagtagcggagctaggtatatttcattatttaatcctcgttttcctgcaaatccttcatcacagccaaaaaaatttacagatggaaaaagtattaaaagtataagtattggaagtacaacgggggtaataaaagttcatttggatttaaacggaaaaatgaaaagttatcaaaagtttggtttcattcctaaggaacttgaagcgcaatttctcaaagagtctggttatggcatcgtggaagacgatacgaatcactaagccgtgcaggcttagaatcgataacgggaatctattggttgaggatgatgaattaagatttaaactttcattggaggatacagacagtattgtttttgagggagacaggtttatgatcagtgccaaagtactttcggcattgagtcactataagattgctacactgttttgtgatgaatactatttgccttccgccattctgcatccctatcaccaaagctctcttgctacaaaaacacttaaagcacagcttgcagtgacaccatcttatgctgacaaattatggcagaggatcatcattgccaagataggacagcaaagagaggtacttgaaatcctcggaaaagaggccgaaaaactgaaactttacattacacaggtacgtgaagcagacaaatacggagcagaagcaaaaagtgccaaatactactggaacaggctttttgatcagttggtaagagagcctgactcatttgatatacgaaatcaggcacttaactatgcttatgcactggtacgcagcctgcttacacgtgatctgagtgcagcagggtttttacctgcacttggtatctggcatgacaacaaatacaacgcttttaatctcagcgatgatttgatagagccattccgtccaatacttgatatcggtgtttaccgtatacttgaatttcatcctgatgaagaggtgcttactccacaaatgaaaaaagaacttatcaatctacttgatattgtatatatagaatatgaaaaaggtagttcgagtctgcgaaatgtctccaggctttatgtacagtttttcaaacgatctgtagagcagggtgatgctgagttgttgagtttcccggtttttgatataaagaaattagatgagtgcctttaggatcatgtggcttatagtaatgtttgatctgccaacacagaccaaaaaagatcgtaagcgttatcgatggttctccaagcatcttgatacagagagttatatacgtttacagtattccatttatgccaaagtattcaacagtatagagtctgccaattatggaaaaaaacgattacgtaattttcttaataccaatgtcaaaaaaggtaatgtcaggatattgatgtttaccgatgcacagtttgggaaaatggagataattataggagaacagtcatctcaagaagagatagtacagccaacactttttgatttttgataaaacttcagaattattataaaaagaggaagtctatccgaagataaactttataatggttgctataacagcaacttgattttaagacccctcttaaaccgccacctgttataacaaccttcattttatcaaaaatttcataaaaagacaatagatttaagaaaaatagataattttttagaaacttagaaaatttttaatagttttaagacccctccaaaccgccacctgttataatagatgtgcccgcccctatgtcgttggttgagttttaagacccctccaaaccgccacctgttataatgattttaaggtgatatctcttgccggctatgttttaagacccctccaaaccgccacctgttataatgtgacatgctccaaggcggttatcctgccagttttaagacccctccaaaccgccacctgttataataaagaaaattatcgacaacatgacatctgagttttaagacccctccaaaccgccacctgttataatataccccatctggggcagttgctgtaggttgttttaagacccctccaaaccgccacctgttataatagaaacaaagtcgatcagtacgaaaaagaggttttaagacccctccaaaccgccacctgttataatcaaagacaacggatggatagaccttatatcgttttaagacccctccaaaccgccacctgttataattcattttgacactactttctggcgggttgtgttttaagacccctccaaaccgccacctgttataatagtaaacgatggaatagtcacccgcgcagggttttaagacccctccaaaccgccacctgttataatttggagatagaggagcataacaaaaacagggttttaagacccctccaaaccgccacctgttataatctataatcacgactagcccgcgcccaaatcgttttaagacccctccaaaccgccacctgttataatcgtagaataccgcgttaggtacttccagttgttttaagacccctccaaaccgccacctgttataatgatatccggtgttgccgtaccgtcaagattgttttaagacccctccaaaccgccacctgttataattcacgcggtgggtatcgcgttcgctatgctgttttaagacccctccaaaccgccacctgttataatagatgttagcggggacagcgcagaaaccgtgttttaagacccctccaaaccgccacctgttataattcacgcggtgggtatcgcgttcgctatgctgttttaagacccctccaaaccgccacctgttataatgatcgttaatgaggttcccgaagcggtcctgttttaagacccctccaaaccgccacctgttataatcatgttttcataaacgcggtccaccatttcgttttaagacccctccaaaccgccacctgttataatactttaattattaaggagatatagaatggcgttttaagacccctccaaaccgccacctgttataatcggtgatgggataatgtcaaaaataatcatgttttaagacccctccaaaccgccacctgttataatggcactactgaatttggcaatgactactacgttttaagacccctccaaaccgccacctgttataatgaaaaagagattgatatactgtataatatggttttaagacccctccaaaccgccacctgttataataaagaaaataatcgacaacatgacatcagagttttaagacccctccaaaccgccacctgttataataaagatcatctgtaaagtctgaggcataagaggcataagggtcaggtgacaataacaactattcaacaaggttcaacattattataaccatttcggtgaatgtttgatggtatccaaattacgatatatggtgggctgaagcaccaccctacaaaaaggtaaaatcgtaggtaccacgtgacaatgaccataggcagcttgaaagttctgcaccgtccagtctgccgcgtccattacgtaaactgccgcataggcagcttggaagataacagtggaatgaccccaaaaccatagacaattctgagcgactccgaaccgacacaagagttgtatttaatttaaatccagttttattgttagttcgactttttttcgacaccttgaaccgacacaaatccttttataaagatcctctaagcattttctccatctcatcagccggcattggcttggcatataaatatccctgaatgttgatacatccattgctcaccaaaaatgatttttgttcctctgtctcaaccccttcggcaataacacgcaggtttaaactttctgcaagagcaattactgctttggttatggctttatcttcctcattgtcagagagatcttttacaaaagattgatcaattttaagtgtatcgatggggaaacgtttgagataagacagggaggagtaccccgtaccaaaatcatcaatagatagactgatgcccaatttgtttatcttttgaagtatcaaaatcatttgttcaggatttttcattatttgactttccgtcacttctatttcaagccattgtggctgacatcccgtctcttccagcagcatctccaatattgaaataaaatcatgtttttgaagttgcagcatggaaatgttaatcgccaatcttcccgggtataatccatcagcgtgccattttactatctgttgcataccacttctcaatatccattgacccaaaggaatgatcagtcccgtttcttctgcaacaggaatgaatgttgcaggagaaataaagtttttatgtccatcttcccagcgtatcaaagtttctatccccatgatcctgttatctttcccattaatttgcggctgaaaataaagcatgaagttttcatcttttatggattggcgtaactttgattccaatgctatacgttcaaacactttttgtgtcatatcttccgtatagaatttataggtattacgtccatcctctttcgctctatacattgctgcatcagcatttttcaaaagatcatcagccgtctcggcatcctcaggatagatgctgataccgatacttaatgtcacgtagatactatgtccaccaatcataatgggatcatgcatactctgcattattttttgtacgatattcacaacaacaattggatcgcttatatcattaaagatcatgatgaactcgtcaccgccaaaacggcctatggtatctgtttcacgtatctgaccctctatcctctgtgcaacttctttgatggcttcatctccaaatacatgtccaagtgaatcattgatctctttaaatctgtccatatcgatgaacaggacagcaactttctgtttattacgatgggctttgtggatatattgattcagtctgtccaaaaagagtaaacggttgggaagtccggtcaaagtatcatgataagcttgatgttccaaggcatcacgctgcagtttcagattcttttcattctcttttttatgtgttatatccatataagcacctaaaataccaaaggtttttccgtttttatcgatcaagggtactttgaatttggaaacccatttatgttttccctctttatcggtaagaggttcttcaatatttaattccgcaatacctgtatctatgatatctttatccattttacgatacaggtcagcctcatttttccacggcatgtcataatcattctttccaataagctgatctacatcctgcagatttgcatcctcggcaaaaagcttgttagcacccaggtatcgtgattcaagatctttccaaaatatcctaatgggtacagtgtcaataacagttttcagtaaagcactctctttttggatttcctgctcaagatgcttctgctccgcatgatctatacaggcttgaatagcatggagaagttttagatttattttttccagagacttgactatcagctcatcaagcggattagctgattttgtcaagatgagataaccgaaattattcagttcgaaaaaataatattgattattagacttctcaaacagaataggagtatgactacagccatgataatatttttcttcaagttctttcacaacactgacataatctttattcctgaccaatacttttggcttagcatagagcaattcaaacttgttgtccttcttctggtatatggatactgaagaacagtttagtcgactcaacaccatagtggtaacttcaccgagcatttttttaagctcaagcgtgttccctatggacattgaaatttcataaagtgcccatagcagaggatttttatccatgaccaatatgccctactacagatgttttattaaaaaattccagataatttttaccgtcattggcgatctcaccaaaagtcattgctccaacaagaggcatattgttcttgcataccactttgatctcatcacaaaaatcctctttcaaaaacagtacacgtgatatacagtctataaacagggtaaaatcatttttaaaatgcatattttctttactgatatatgcagcatgccttgcggcctttatcaatgagtcgttgtcaccgcttaagatatcgacataattaccctcttctatatttccgacacagattatttccgtaccgtttaagatgatagggtcacgtactatcttttcatccgaaagcgtgttgattccacaaggaaatgatttggcaacattaaaaaagttatctgcattgataggttcagaggagtattggtctacgatatttttataaacctcaaatgccggtttgtaatcgagttctttaagtatggtagcttccgacttggtcacctggtaaggtccgctgatacttttccagccatgactgacacctatggaactttggcgtttcgagtaggcgtagaccaaggcatcctgtatgagtccatggttggtaaagagcgaaggtttctgttcaaaacttaatgatccgctacctcctcctatatagttgatacccagtccgtaattgtcaaacaggacattgatacatttaccgatatgttttgtcaacccatctatataaacgaacatggttttgactgattcatcgaaatcacctatctgtttttccatatcagcatccaactcatcatcatttttttgactgataccttgaataacattgacttgtattttatcatttaggccgataaaaatcgtacctttatcatactttttatcattataaataacagaagggaaaataccgcctatgatagatacagtatgcttcagaaggataggatcgaccaattctttcttaaagccattggcatcacatgccaagatcataacagactcattttcagagctgagtatattcatgttgctggtaaaactttctattgaacctgtcggatcaaaaataatatcagccatactctaccttttgatacatatatgtaatataaaactaattcaggacttttttatattaataatatcattttttattctgaattaatgtaggaataatcttacatcgaggctaattacttaagatatcaacatattcctttattgaggaatagggctcagtcgatgttctgtctgttaggaagagaaaggattgatggtaaagagaatagcattagcatcactcatagtgataatttttgaatgagcataattagatatttacgtgacgggccctcattgtctcttcatctatcttacagatatacatgatttctgagataagtgtctccagatataataaactgctaagttcaaaaagtgtcccaagtgggggttttctgtcattaatgttctgtttctttcgttttttcttgtttctggtatcgatcataaccgtgaaatcggctagatttttaagaagaccttttggattggcagtaatggcaaggatggtagctccatgtttttttgcagttgttgcagaattgactacactactcgttgttcctgatgctgaaatacatacaaggatatctcctttttgaatggaaggtgtgttgatctctcccagtacaaaaacatcgtttcccagatgcatcaaacgcattgcaaaaaattttcctacaagaccgcttcttccctcaccggtaacgaaaattcttttattttgcagaaaaaattctataaattcattgaaattattttcgtcagcattttttagaccgtacttgagttgttgtataagtcttttagcgaccattctatttgcctttgattcttttggcaatagccttcgctgcttttttaggatctttagtccctgtgattgcacccccgacaacaataatctcaggtttgagttttacgatatcatcaatggtatcaaggttgatcccccctgcgacagccaaagggatttttacatttttggaaacctctttaaggtcagacaatggactttgaccggcattttgctgatcgataccggaatgaatacctacaaaatctgctcccagtttgtttacctttttggctaaagcagttttattcggaacattgatcatatcaactaaagctttcttgccatgttttttggcactttttatcgtgcctttgatcgtattgatatcagcaacacccaaaacagtaacaatatcagcacccgcttcaaaacagtaatttgcctcatactcccccacatccatggttttgagatctactaacaaggttttttccgggaaaagagttctcatggatttgactaatttaatgccctcatgtttgatcaaaggagttccaatttctataatatctatatattttcttgtttcctgtactaaagcaaaagcttcgtccgtagtaagtacatcgattgccaattgtagtttcatgcatgctccttagaaaaatttggatgataatactctagttctatcataaaatagaattaaaacaaatgatcaagcgtcgaatactcacctttaatatgcatataattattataacacatattttttgaaactaaattccgtatgtttttatgatatgatatagatatcaattattggagagaataatgggaaattttagtttgagagcaggatatattggtggaatatgtgccataacctttttattggcaacgacacagatacaggcatcatggggagcgacacctctggaggacaagtacagacctgccagagcgtggatagaaaaattttcttctacccccgatattgttgctgctggttcaattgcagatgcaatagaatcctgtgatgatgtggtggggaagaacgggtattgtgtggttgaagtaggggacagtgcttcaggactgcctctggagatcttccgctccaacacaaaactgcagggaaaagcgaatatgtctcccttgacaagttcgaagaatggaactttcatctatatcggtgataatacgaaacgtgttgtgatcgaagggcttgatattcagggacacagtgcggggaatcacgggatctacggtatcatcgtagagggagagaacattaagaatatcctcatacgcaataacagaatccatgacttcaacagtaattccaatgcacacggtattgctgtgtacggaacggcagagagcaacaaacgttcgatcgccaatgtcatcatcgaagggaatactgtgtatgacatgcggacgggatcgagtgagagtatcgtggtgaacgggaatgtaaagaagtgggagatccgtaacaacgatatttatgatatcaacaatatcgccatcgatgccataggcggtgagggaacttcaccgtcacgtacgaacagcgaggggagagttcttcccgggaaactggatgcggcaagatacggtttcatcgaagataactttgtggagaatatgcataccacggacaatcctgcctatggcagcaaagagagctgggctgcggcgatctatgtggatggagggcatcatatacagatcagggacaatgtcgtacagaacacggcatgggggtatgaagtaggtgcggagaactgcatggtctccaggcagatcactatgacaggaaacagtgcggaagagagttactatggcgacctgctcctgggcgggtatgcacataaggggttcaaggctgacaagagcattgactgtgacccgtacaatacggttgatgcgaatgaagggcacggctatgtcaagtatctgaccgttaaagagaatcttttcaattctgatcctgtggaaccggataatgtcaccctccagtacagaacgaccaacgcgatcattatcgagccgggtgttgaacccgtcaacgaccaggggaacgggtcggcacgaggtgacgagaatgcggtcagaacgactgaatagagatttgcactaaagttttaattttagaggtgccctttatacaaaaggggatactttaattctgtggagtcaaattggcactgcagatttccttaacttcgatgctgactactttttttacggttgggacggggttttgagaaatggtaaatgtattatagaaggtgagataatatggcaaacttaaagatatcaaataccgctacgctggatgaaaatgagatagagatcactgccattagggcacaaggctccggtgggcagaaagtcaacaaggtttctgcggcgattcatcttcgttttgacatttctgcctcttcacttcccgagttttacaaagagaagctactctcactgaaagataaacgcattagcaaagacggtatcgttgtgataaagtcccaacagcaccgaagccaggaacagaacagagaagaggcacttgaacgtctgg

SEQ ID NO: 4331 - DNA, 23399 bp, synthetic construct
  source 1..23399: mol_type = other DNA
  misc_feature 1..23399: note = Synthetic
agagctcaccctcaagctccacaccaagatcgtcgagggggagaacgagttcaaagagaaaatcaagcgccgtatcatcggcatctctcccaaagtcagcaaggatacgatcatccgcttcgccccctccgaagccctcttctacgcctggaacgagaccaaaaaggccacactcctcattgccaccggcgtcaaaaagatgagcaccggggaagtgggcacggagaatgtgggaggacccatcaccatcttcgacattatgatgaaattcgcccaggcgggcttcgtctatctactcttcatcatggccctcatctccgtgaacctcggcgtcctcaatctcctgccgatcccggctctggacggcgggcatattatgttcaacctctatgagatgatcacccggcacgaacccagcgaagtggcttactaccgtttgacggtcctgggctgggtgctcctgggcgggattatgttcctggggcttttcaacgattttcaacgactaatgggaggcacacatggctgattataaaatcctgagccgggaaaccctggcccgaaatctcgaggcggtgatccagcggatcgaagcggcccgcatcaaagtggatgagcaccacatcgtcaaaatggtggtcgtaagcaaatacacggcgatcgaaaacatcgccaccctctacgacctgggccagcgggcctttggagagaatcaggtccagcagctcgaagagcgcgtccacgccctggaggatctgcccctggagtggcatatgatcgggcgcctgcagaagaacaagatcaacaagctcatcgatctggacccctttctgctccaatccctcgattccctggatctggcggaggctctagacaagcggctggaagccaaggaaaagcgtatggagtgcctcctgcagatcaacagcgcccgcgaagagagcaaggccggcgtcgccccggaagcggcggtggacgtctaccgtgagatcaaagagcgcttctcccgcatcgacctgcgcggcgtcatgaccatcggagcccataccgacgacaaggcgacggtgcgcaagagtttcgaaaccacccgaaggatcttcgacgagcttcaaagcgaaggcgccgagatctgctcgatgggtatgagcggcgatttcgagctggccatcgagtgcggctccaatatggtccgcatcggttccgccctctttgcggagtgatccctcccctcgatgatccggagactcttcaaaagaaaaagccacgaccccgacagtaagctcggcaaagtcctcgagaagtatcacatccccaaagagtatttcgccatcaaccgccggatggtctcccgcggtgtcctggtgggactcttctggggctttatccccatgccctttcaaatgctggcggtgatctttaccacccccctcctgcgcttcaatgtccccatcgccatcagtatggtctggctctccaaccccctgaccatgccggcgatgtactatatggagtacaaaacgggcaatctgttcctggggcttcccggattggagaacgtggagctgagcatcgaatggttcaaacaccatctggaggatatcttcctgcccctctatgtgggcactgccttctactccatcatcatcagctacctggtctatctgctcatcaaccgtctctgggtcctctcggtccatcgagagaagcaccgcaaagagcaagagcggcgacaacgaaaagagatgatcatatccccgaaggagactctgtgaacccgtcccgagacccggctactcttccgcctgaatttacccaacgcctcgagcggctctttcctccccatatctacgaaagggtcctgcaaagcttctcttctcccaaaaccaccaccttccgggtcaatcccctcaaaaccgatgcttcgagcctgcaaaaggagttggagtccctgggtttcgagattgaagcggtcgactggctccccggagctttccgcctgctcgatcccgatcagcgccgggccctgaccgagagcggagccttctatgaaggccggctctacatccagaacctctcgtccatgctggcgcctctgatcctggccccgcgacccgaggagcaggtcctcgacctggccgccgccccggggggcaagaccctgatgatggcgggaatgatggaaaaccgggggtggatcagcgccgtcgagccggtcaaggagcgtttccatcggctcaaacgcaatatcgagaacgccggcgccgaaatcgtccacacctatatgaaagacggccggagcgtaggacgcgcctgtccggcgatgttcgaccgggttttgctggatgccccctgctcctcggaggccaaattctccaccctcaaccccaaaagctacgcctactggagcccccgaaaagtcaaggagagccagcgcctccagaagcgcctcatcctctcggcgtggcagagcttgcgccccggaggacggctgctctactccacctgctccttcgcccccgaggagaacgaagcggtcgtcgatcatctcctgggcaaagcccccgacgcgaagcttctgccgatcgagctccccattgacaatcagatggaggggctcgtcggctgggagaaaaagcgcttcgccccggaactcgaacgggcccggcgtgtcctccccaccgaggagatggacggctttttcctcgccctgatcgaaaagagtctatgataagatacttccaaagactcaaaaattcgaaaggatagaccgatgttccttagactccttctccccttcctgctcacgctgggcttccttgctcccctcagcgccctcgattgcggccggggcaaacctttcccccaatggctcaaagccttcgagcgctacgcggtctcccaggggatcagccccgataccgtccatagggctctcgacggtatcacttacgacccttccgtcatccgccgggaccgcaggcagcatcagttctcctacgatttccgcaccttcgccaagcggatcatctccccctaccgcctgcgcaaaggcaagcagctgatccacaaaaaggcccgactcttcaaagctatcgaaaaacgatacggggttcccgcccccgtgatcgtggccttttgggggttggagagtgatttcggcgcctatatgggcaaggacaataccctgcgctccctggcgaccctcgcctacgactgccgccgcagcgatgaattccaaaaagagctcctcgctgcacttaaaatcattgatgaaggggatttgacaccccggcagatgcggggttcctgggccggtgaactgggacagacccagtttctgcccagctactatctcaaatacggggtcgatttcgacggggacggacgccgggacctcatccacagcagcgccgacgccttggcttcgaccgccaactatctgcgccatctgggctggaagcccggagagccctggatccgagaagtcatcgtcccccgtcaaatgccctgggatgaaagcggcctggagcatagccactccctctcctactggggaaaactgggcgtcaccgaccgcaacggacgccccctgcacggcagcttcaacgcttcactcctcctgccgatgggcaaggacggccccgccttcctcgccttcgacaatttcaaagacacttacctgacctggaacaattccctgctctactccctaacggcggcctacttcgccacccgcttagatggagcccccgctatgcgccccgaccgggccaaaatcgcctccctctccggacgccagatccagaccctccaacgcctcctggccaaacggggctacgatgtaggcaagatcgacggcatcatcggcgaaaagacccgcctggcggtcaaggatctccagaagaagctgggtcttcccgccgacggctatccgacacaggagttgctgcggcgcctgcgctagtagctctgccttctactccccctcgttcccacgcttggcgtgggaatgcatacctcagcccgacttgcccaaaacgctcaatctccaaaagccctctttgcccttcataatccctggcactcgaatagcgccaatgggaagccttatcgacataccccccgttttacagggttttggtgaatgtagtcaatcttggctctcatcatctcatctgaatggatcaatttcggctgtaatccctcctgccatacttgatattctctatcggacttatgtacctttttatagaaggccagctgatccagaatcgtctttataccgtttgcttgaagcagtttgagtaattctcttgccatatgtcgtttgaatttcgccatactttgagcgatatcatcactttgcgctatgagatgaaggtgattttccaatatcacataagcatagattttgaattgatcgtgcttctacaggtaacgggagctctccagtaaaatttcgacactctccttgcgggtaaaaagaggaatccagtgcaagactgtacacgtcataaaataaggatatgtcggttcctggattttatagcggcttcttcccattttgagttcttttgcaggtaatgtcacattcagtatgcattcccacgccaagcgtgggaacaagagagggaaaaagaagatatcaatcgcagaggcagagagcccccacttcttacattttggaggcgaccagatcggccaattcaaggaggcgtccggagtatccgaactcgttgtcgtaccaggccatcactttgaccattttgccgttgagcacctgcgtcgagaggccgtcgatgatgctggagtgggggttgcccaggatgtcgctggagaccagctcctcggtgctgaactccagaatccccttgagctcacccttggcggcctcctcgaaggcggcgttgagctcctcgacggtggtctcctttttgaggttggcgacgatctcggtgatggcaccgtcggctacgggcacccgcagggccatagcggtcatcttgccctgaagctcgggcaggacttccacggtcgccttggcggctccggtggtagtggggatgatgttgaccgccgccgcgcgcccacggcgatgcttgccgggctttttcttgtcgatggtgacctggctggaggtataggcgtgggtggtggtgatgtgggcgtcttcgacaccgaagcgctcttcgagcaccttcatggccggggccagagagttggtggtgcagctggcgttggagacgatgtgatgctgcgccggatcgtattgatcctgattgacccccagaaccaccgtcaaatccacattcttgccgggagcggagatgaggacttttttggctccggcttcgaggtgcttagccgctccgtcacggtcggtgaagtggccggtacactccaggacgatatcgatgcccatctcggcccaggggagcttggcgggatcacgctcgtcgacaatagcgatcttctgccctcctacggtcaggctcgtatcgtcataactgatctctgcggggaaacggccgtgcatcgaatcgaacttgagcatataggccagatcctccggggtgccgctgccgccgttggcaacgacgatctccacattttccggtttgttggtcacatagtgccacagaaccatttttcctatcctgcccaatccgttgatcgctacctttttcatcacaaacgctccttctttcagatgtatgtgaaagtataatctctctatcttaactcaagctcaatcccccggctgcggccaacggggcagccggcgatcgagatccccgaagagagcggccgtatcgagatgatagtaggcgcggtactccccgtagaggtcgggaaaatgctttttgagcgtagccggacgttggaaaaagagttccgtcgtcacggcgaaaaattccgcctcgttggtggcggcataggcgccgatcagccggtattctccccagtctctgttctcttccgcccgctctctgagctcttcgtaacggcgcgaaacgacctgcagccactccttgcggcttcgctgcatcagcggaggcaccccgtcggcagccccatcctcgaaatcgagcacgtgggtgaactcgtggatgatcacattatggggccaggtgtgataggcatcccgccgtgcctcgtgccaggcgatcaccaccgtgtcaccggaggactccccctccagcaacgcctcctcttcccgcacgatccaaccgttttgctccctgcggggggcgacaaccacattgggatatatcaggaccgtctgcaaaatcccgtagcactccccttcacgccccagaacgatcagacaggcgtagaaagagatgatcaccttcatctcattatcgagctccgtctttatgggacggaattctttggtctccataaaatagcgcaggctttttttcacccgcttacgcatttgctccggcaacagccgatagtggggtgtccgcttcagccacgcttcccactcctgggggaaaggctccttttcgatccacttcatcaggcgcactcttttgtaccattgccaagcctgccaaagcagccagagggccatcagagcgaatatgaattccatcaacgccaaataataggccattgcatcctcttttaatcaactgttctcatcatagcagattcaccacgggagttgtaataaaatagcgccgataaaatctttttcggaggagcgaaatatggaaaaaattcctgtcagagaatatgccagacgtcaccgaatgagcctctttgaagtgatcaaaaagatcaacaatgaagagttgaaaggagaaaccgtcgaagaaaacggccgaaaggtgcaatatgtcctgctcgaaactccttccgatgaagtcaaaaaagagccaaaagtagcaccgcaagcccatcccctccatcctctcgaaaccaatcgactgatggaggagatccgcgatctgcgtaagcgtgtcgaacgcctggagagaatcatcgcagagcgcgaagagaattgatcagagttttttcccttgcagcagacgaatgtggcctttcaaatactccgtctgggaaaagtccccaaagccgtgggtttcgagcatcttgcgggtatcccggcggatgaaatcctcagccaaagggcactccactttgcggatggcaaaacggacccaggccggggcttggtccacatcgaaattgttgtaatcgagaatggcgaaggtaccgcccggtttcagggcccgagtggcattggcgatgatggcgtcgcgcttctcctggataaaaccgtggagaacgaaggagatgaaagccagatcgaactcctcttcgtagggcaagggctcatcgatacgccgctccaccatcacgatattgggatagggcccggtctttcggaggaattggcgctgcatctcttcgccgatctccaggccgacgatctgcccctcctctccgacatactcccgcatcagcagagcgttgcgccccgtccccgctcccaggtcgagcacccggtcgccctgtttcagcccgaggtcagcgatcgccctgcgtatgaacgaggggtaccagcccagagtgatcagatccatcagcgtatcgtaatacttcgcttcaaagccgctcacttcgactttcgaatcttcctggcgcaattgagtcatcaatcacctcccgttggagatttgtcgaaactatcgtgctccgcggacgaggatcttcccatacttcgccgtccagagcacaaagagcactatccacagcgtggcactgatgtcgaaccaggggctgatgctcccctgcgccgccgccagagagagggccaggcgccccagtaccaccacctgggtcatccagagcagccacgcgccccagcggtccatccccaaaactgctccgccgtgccccagggtcacccgggtaccgaaggcgatcataatcgtcgtcaaaaatcccagcacgagcaggtgcaaaggcagataaagggaagcgtaaccgaaccaggcttcgaaaaactccaccgccgctcccgccaaaaagccaagcggcagccaaaagagcgccagatgcagcccccagagcagcggatcgggattggggaaaggaagctccatccgccacagctcccgcccgagccagagggctgcaagcaggtccacggcgaagagccccttcggccaggcttgggagagcagcacgtgggccagcagcaaaagcagaagcaccccgtcaaaaccccggctcttgcggtagttcatacagcggctgaaatggggcaccatccgaaaagcgatcaccgcgggcagaaagatcagatagagatagatcccgacctccacccccatatcgaaatagagccccgaacggcagtggcggcaggggatctgggccaaaaggaagagcagatccgccaaagcccccatcccgaaacccacgatgatccagtattgatcctttttgggctcgggggctttggcgtagatccccataaagatccgcagggtataggcgaatgaaagagccatcaagagcgccgcgacatagaaaagaggcggcatccaaagagaaacatagaaactcaaagccgccaacaggttcaaaacccagacccgcagatagcgccgctcctcgatagggggctgggcgctgaagcgggtgaaggtggtataggtaaagccgtagaagaagttggtaaaaacgagaaagatcattccgtaagcgtgcagcaggcgggcatcgatggagagcatacctctaaacgccgggatgaagaggagcatcaccgccagagcgttgaaaagccccaaggcgaaaaagggctgatggggctgggagaagaaatagacgagcttcggtcggggcattcagccctcctttggggatttcgggttatggagaattttcttttccaccttttgggtcgctttgtggaagtagtagtagatccccccggcgatcagggcaccgaaggggagcgcaatgtaccagtagtcgcgggcccagtggagcagatggaggatatgctcaccgaaggtccaggccagcaggatcgtcaccgccgcccagaccatcgcgctgaggaagttgatgagcaaaaatttcgatgtggggtagcgggtcatcccgatggcgatgggaatgacggtgcgcatcccgtagaggtagcgctggatgaagataatgggccagccgtattttttaagaagcaggtgcgccagggcgaatttgcgccgctggttcttgaacttgcggtagacatatttccgattccaccggccgatgaaaaagtagatggtatccccggtgaagcctcccaaccccgccgtgaggatcgagagccagaggttcatatctccggtatgggaaaggatccccgccatcaccaggccggtctccccctccataatgctccagataaaaagaatgggatagctgtactctttgagaaactccaccagcagatcggtcatcgctacgcttcctgttgaattgaatggaagatattctatcccgttatgataaacagcaccttgggcaagcgtgctagaatagcgctatgaaagcaccaaatgccctggtcgtcgtgaccaccaccgagacgaaagaacacgccgaattcctcgcccgcaccctcctcgaagcccgcctgggcacctgcgtgcagatcatccccatccacagcctctaccgctggcagggggccatcgaatcggcaggcgaataccgcctggagatcaagaccctcctccgctgctaccccgccctggaacgcctgatcctccggcatcatccctacgagacaccggagatcatcgccctgccggtcgtcgaggggtcggcggggtatttggagtggctggagggggaatgccgaaaggcatgataaacatacgtattttatccaatcagatacaactaatcataaaatttaatttagaaatattattttgatactatataaaaattatatttgggaatggaggatcggatcgtgaaaaaaattctgggcgttgatctgggcattacctcttttggttatgccatcctgcaagagactggaaaagatctatatcgatgtctggataattctgtcgtaatgcgcaacaacccctatgacgaaaagagtggcgaatcgtcccagtcgatacgttcaacccaaaagagcatgcgtcgcctcatagagaaacgcaaaaagcgcatccgatgtgtggcacaaaccatggaacgttatggaattcttgattattcggagacgatgaagatcaacgaccccaaaaacaatcccatcaaaaaccgatggcagctccgtgcggtggatgcctggaagcgtccacttagcccgcaagagctcttcgccatcttcgcccatatggccaaacacaggggatacaaatcgatcgctacggaagatctcatctatgaactggagcttgagctcggtctcaacgacccggaaaaagagtcggagaaaaaagcggatgaacgacgccaagtctataacgctctgcgccatctggaggagctgcgtaaaaaatatggcggagagaccatcgcccagacgatccaccgggccgtagaggcaggtgatcttcgttcctatcgaaaccatgacgattacgaaaagatgatccggcgcgaagatatcgaagaggagatcgagaaggtccttcttcgccaggccgaactgggagccctcggactgcccgaagaacaggtttccgagctcatcgacgagctcaaagcctgtataaccgaccaggagatgcccacaatagatgaatccctttttggcaaatgcaccttttacaaagatgaacttgctgctccggcatacagttatctctacgatctctatcgcctgtacaaaaaacttgccgatttaaacattgacggctatgaagtgacacaggaagaccgggaaaaggttattgaatgggtagaaaagaaaatagcccaagggaaaaatctcaaaaagattacccataaggatctgcgtaaaatcctcggactcgcccctgagcaaaaaattttcggtgtggaagatgagcgtattgtcaaaggcaaaaaagagccccgaaccttcgtcccctttttctttctcgcagatatcgcgaagttcaaagagctttttgccagtatccagaaacatccggatgccttgcagatattcagagaactggccgagatcctccagcgttccaaaaccccgcaggaggccctggatcggctacgtgccttgatggccggaaaagggatcgacacagacgaccgggagctgctggagctcttcaaaaacaaaagatccggaacacgtgaactctcccatagatatatcctcgaagcactgccccttttccttgaagggtatgacgaaaaagaggtccagaggatccttggattcgatgatcgtgaagattactcccgttatcccaaatccctacgccatctacacctacgggaggggaatctctttgaaaaagaggagaatcccatcaacaaccatgctgtcaaatccctcgcctcctgggcgttggggcttattgccgacctgagttggcgttatggccccttcgatgagatcatcctggaaacgacccgggacgccctcccggaaaagatccgcaaggagatcgataaggccatgagagaacgggagaaagctctcgataagatcatcggcaaatacaaaaaagagttcccctccatcgataagcgtttggcaaggaagatccagctctgggagcgccaaaaaggactcgatctctacagcggaaaggtcatcaacctttcccagcttctcgatggtagcgccgatatcgaacatatcgttccccaaagcctgggcggtctgagcacagactacaataccatcgtcacgctcaaaagtgttaatgcggccaaaggcaaccggctccccggcgactggctcgccggaaatcccgactatcgggaacggatcgggatgctctctgagaaggggttgatcgactggaaaaagcgaaaaaacctccttgcccaatccctcgacgagatttacaccgaaaatacccatagcaaggggatccgcgccaccagctatctcgaagctttagtcgcccaggttctcaaacgttactatccttttccggatcctgagctgagaaagaacggcataggggtccgaatgatccccggcaaggtcaccagtaagacacggtctctccttgggatcaaatccaaaagccgggagaccaatttccaccacgccgaagatgccctcatcctctcgaccctcaccaggggctggcagaaccgcctccatcggatgctgcgagacaattacggcaaaagcgaagcggagctcaaggaactctggaaaaaatacatgcctcacatcgaggggctcaccctggccgactatatcgacgaagcgtttcgccgcttcatgtccaaaggggaagaaagcctcttttacagagacatgttcgacacgatccgcagtatctcctactgggtggacaagaaacccctctccgcctcctcccataaagagaccgtctattcatcccgccatgaagtccctactttgcgtaaaaatatcctcgaggcttttgacagcctcaatgtcatcaaagaccgccataagctcacgacagaggagtttatgaaacgttatgataaggagatccgtcaaaagctatggctgcatcgtatcggcaataccaacgacgagagctaccgtgccgtagaggaacgggcgactcaaatcgcccagatactcacccgttatcagctcatggatgcccagaacgacaaggagatcgatgagaagtttcagcaggcgctcaaagagctcattacctcccccatcgaagtgaccggaaaactgttgaggaaaatgcgtttcgtttacgacaagctcaatgctatgcagatcgaccgggggctggtagagacagacaaaaatatgctgggtatccatatctccaagggccccaatgagaagctcatcttccgtcgcatggatgtcaacaacgcccatgaactccaaaaagagaggtccgggatactctgctatctcaatgagatgctttttattttcaacaaaaaaggcttgatacattatggttgtctgagaagctatctggagaaaggtcaaggttccaaatatattgcactattcaacccgcgattcccagccaatcccaaagcccaaccctcaaaatttacttcagacagtaaaatcaaacaggtaggtatcggcagcgctacaggaatcatcaaggcccatctcgatctcgacgggcatgtcaggagttatgaggttttcggcaccctgcccgaagggtccatagagtggttcaaagaggagtcgggctatggccgcgtggaagacgatccgcatcactaagccctgccggctcagcatagagaacggtaatctcgtagtcgaggatgagaaagtgagattcaaactctccctctccgataccgacagcatcatcttcgagggagaccgattcactctcagcgccaaggtgcttgccgccctgagcaggcataaggtcgctaccctcttttgcgacgagtactatatgcccaccgccatcctccacccctatcaccagagctccctggctacagagaccctcaaggcccagctctccctccccgatgacctgcgcgaccggctctggcaggaaatcatccgggtcaagatcctaaaccaatcggccgtgcttagccacttcgcaaagaaaaatcccaaactcgaaagatacgccgaacagatccggccgggcgacccctatcggacagaggccaagagcgcacggctctactggaataagctcttcgacggtctcaaacgggaagcagactccctcgatgtacgcaatcaggccctcaactacgcctacgccatcctccgcagcctcatcacccgcgacctcagcgcagcgggattcttacctgcactgggcctctggcatgacaaccgctacaatgccttcaacctcagcgacgacctgatggaacccttccggccgatcgtcgatgcggcggtctatctcctcctgccgctctgtgacgaggagtacctcacccctgagttcaaaaaagccatcatctccatcttcgacagtgaatacctcatctatgacgcgggccgctccacccttcgcaccgtcgccacccgatatatccagggattcaaagcggtggtccgtagcagaaaaatagagaatctccatttccccaccatcgatttcggggcgcttcgtgagtgcttttaggatcatgtggctggtagtgatgttcgacctccccacccaatcaaagaaggaccgcaaacgctaccgatggctctcccgctatcttgacaagcagggcttcatccgtttgcaatactccgtctatgccaaagtcttcaactctctacaatccgccaaccacggcaaaaaaaggatgaaagaattcctccatatcaatgtcaaaaagggaaatgtcagaatgctgctctttaccgacgcacaatttgggaagatggagatcgtcgtaggggaacaaagttcacaggaagagatcacacaaccgacacttttcgatttctgatgaagaaaaattctgatctgtaaatagaagtagtaaatagaggctgaggcccgtccgaagatgggccctagaatggaactgttgtaacagttcttgattttaagacccctcaaaaaaccctaccctgttacaacggttagaaattatagcaaaaaccttactgtagatgcaaatttcgatgaaaatcaccaaaattttcaaaaactttgagattttttaatggttttaagacccctcaaaaccccaccctgttacaattatctatatgaatatagccttcaccactaagttttaagacccctcaaaaccccaccctgttacaattggtagcgtcggacagatcgacatcaaccggttttaagacccctcaaaaccccaccctgttacaatccaattcagaaagcacgtttgggacgatgtgttttaagacccctcaaaaccccaccctgttacaataaatggacagtggaatatcccgaaagacctggttttaagacccctcaaaaccccaccctgttacaatatttttctctctttttgcctccctctccctgttttaagacccctcaaaaccccaccctgttacaattgtattgttaaagattgacactcctgaactgttttaagacccctcaaaaccccaccctgttacaatcaagattaaacgacttaaaaaagacatcctgttttaagacccctcaaaaccccaccctgttacaattgatctcctggatcttgcggtcggtgtcgtgttttaagacccctcaaaaccccaccctgttacaatcagggctttcgacattgcctgtaaatacttgttttaagacccctcaaaaccccaccctgttacaatgacccggtgcggcttttcgcttgaagttttgttttaagacccctcaaaaccccaccctgttacaatcctcaaaagttctttcaaagaatcttctcaatattcctatcatccatcaaaaaccacccaaaaacagcataaatccctctccggcattgcgctataatgaaatattcccacagaaggagtcaaaaatgtctagtgtcgtcaaagtgatcgaagtgatcgcccaatccaagaaaagctgggaagatgccgcggccaatgccgtcaaagaggttgccaagagcgtcgacaacatcaaatccgtctatatcaaggatatgagtgccaaggtcaatggtgacaagatcaccgtctatcgtgtcgtcgccaaaatctcctttgtggtgaaaaagaaaaaataagctcgactagcttttggcggagacccaacgcaggaaaagcgccgtcgaaagtcccgaagcgctgaagatcatcagcatcaccataatctgatagcgggctgctattagcggggagacgcccgagaggatctgccccgtcatcatccccggcagtgagaccaggccgacggcgaagagagcgttgagcaccgggatcattgccgcgttcatcgcctgacggcgggcttcgggcgaagagcggccttcctgccgttcattgagatagcgctccgccgctaacgagacgctgttcatcgcgttggcgaagaccatcccggccagggggatcaaatacctcggcgcataccagggcttcagatccagcaccccgaagcttacgaagcccagggtcacccctcctcccagggcgatggaaatgagcgtcacaaaaaaccatttcctccgccgatcccctacggtccgcagcgcgatccaggaggagaaaaagagcatcacccccagcactcccaggatgatccaccccgacttcgcctgaaagatatagagcagcaaatagccgatgagggagagttgcagcagcatacgccccagggcgtagagggcattgcccgcgcccaggctccagcgccaaaagatccacagcaccccgcacaccggcaccgccataagcgccaagcgccccaattcgatcatcaccatttccacctcccggtttctctgagacgctataatgccgaaaaagagcttccaggagccatcctatgccccaagagaccgaaatctacgcgcttatcgacagccggctgctccgacgctacgatctgagcctggccagagtgggccgtttcctcgaagaggcgaagatccccatcgcccagtatcgggacaaagaagcctccgacgctgatgtcgcccgggccctggaggagctaagaatttactacagcggcaccctgatcgtcaatgaccgtctcggactggccgggctggccgacgggctccatctggggcaggaggacctggccgccatcgatccggactccgaagcggcagtatcgaaggtgcgtcggcagatcggctccaaactcctggggctctccacccacaaccgtgaagagatcgaaacagccaacgctctggaccttgattacatcggcctgggggcttaccgctccaccgccaccaaggccgacgccggcgtcagcggcaaagccctcctggagctcgcccgactctcccgccatcccgtggccctcatcggaggggtccgctgggaagatcgcttcgaagcacccatccgctacaaagtcctgggctccgccctgatggagaggatcgcaaacctatgaaacgccatctgttcctgctctacggaatcgtcgcctatctgatcggcctggggacgctgctctatctggtcttctgggtctatccctggagctggatgcctacgagcatcgacagcccaaagcccggaccccttctgccttcactactctgggatctggggttgatcctgctttttggagtgcagcactccctgatggtccgtccccgtttcaaagcctggttcgactgctatgtctcctacggggcacagcgccccacctataccctcatctcctcttttttcctggctttgatcctcgtcggctggagacccctccccggcatactctggcacttcgagccggggagttttggctggtgggtgatgaccctgctttatttcctgggctggggcgtggcggtcatcgctacctttatgatcaaccacttcgctatgctggggctctatcaggcgtggcggggatggctggggctgggggaagccgaagcggcctttacagaacggggcttctaccgctggatccgccaccccatccaggccggcaccctgttggggctctgggctacgccggtgatgagcaccgggcatctactttttgctctgagcttcacgatctatgtgctcatcggcctctatttcgaggagcgggacctaatgcgtaccctgggcaagccctatgccgactaccgccgcagagtgccgatgctgttcccttttatcaaagccggggaaaaacgaaaggagaaaagatgaaagagaagatcgtttggcaggatgatgcgctgcgcctggaactccacgagagtgaaatcccctggctgatccttcatccccagaaggattatcgggaattcagcgaactccccaggaagctgcgccttcggattatagatctgctctgcgccgtcgaagaggagatgctctcctactaccgccctcacaagatcaacatcgcctccttcggcaactatctgccccggcagcattggcacattatggcccgctttcaagaagacagctacttccccgaaccgatgtggggaagtaaacaaagagagagcactctggagctgccgccgatggaacccttcctccagcggataaaggagcgactggaaaagagcgacggctagtttttgaccttcaaactccgtgccagtttctccaaaaagcctttctcatcccggtcgtaaaggaaacagcggtcgacccggcacgcctgatagaggctctcctcgaccgccctgaaaagcaaaaagggataagcggtgtagcgcgtgatctcgtgccgcaaagcgggaagcctttttgcggggatcttgagcaccacatagccgtagcgatccgccagccagaccaaaacccccatcggtgccgtctgcggatagcgggccaaaacccggctctggcgcgtcaggatctcccttgcatcctgccgatacttcagatcctccgtcaacacggcaagacgaaggaggttatccgccatcaccgccagcgggctgcggtaggagcctccttccaggctcagaggattgcggaaagagccctgggcgtcgtaccagatcccccgctcgtaaaactcctttttcgcttgtgcatagagggccttggcccagtcaagccaggcggggtcctgactccattcataagcgtccagcgccgcggcgatggtgaagctgtaatcctccaacaggcccggaacctttggggtgcggcccggcagtttctggtgatagagccgcccatggaggtagagctctctttttagcgcttccaaagtggcaagagccgtttgagcgtatttgcttttcaggtctgacgccgtaaagagcccgtgaatcagcatagcgttccaggaggcttgaagcttggtgtcgatgaagggatagggacgcttggcgcggagtttcgccaaaaccctcttgtcggacgcagggcacgctgccccctctttcaggtaggggttggagcgaaaatcggccctgttcccatcttcgctgatcccgcacgcttccagtgccttctccggctcggggatcttcgcttttttgagggctttgagggcttcgtcgtaagcgaaggtgaagtagaagccctcttcctttttatgtgtctcgggatcgaggctgtcggcatcgctggccccgtagaaaaggccgttcctgtcccgatagtgacgctccagcaccgaaacagtctcctcgacaatacgccggtagagcgctttgcccgtaagctcggcggccagggcataggcttccaggagttctgcgttggtatagagcatcttttcaaaatgggggatccgccactttccgtcggtactgtagcgaaagaatgccccctcgatctggtcgtagatccctcccctggccatcgccttcaatgtcttttccgccatatcgagcgcggctttgttccccgtcagacggtggatctggatcagggccgtcagcgtcgtcgccctggggaatttgggccggctcccccatccgccgtgctcccggtcgaagtcttgctccaatgctttgacgaaacggcggctcagatcctccctgatcctcactccatcctcagcgctctctctttggctgacctgctgcatcagcgtcgtgatctcttcgccgatacgcccgagtctgcccggctctttttgccagagcttcgccgctttttgaaggagatcgagcaggccgggctgaccgtatcgctcttctctgggaatataggtcgcggcgaaaaaaggtttacggtccggggtcaaaaggatcgtcaggggccagcctccggagcggcgggtcatgatccggtggacctgctgatagtatcggtcgatctggggatgctcttccctgtccactttgatcgggacgaaataacggttgagcaccgccgccacctccggatcctcgaaggattcatgctccatcacatggcaccagtggcaggtgctgtagccgatggagaggaagatcggtttatgctcccggctggccttttcgaaggccgctctcccccagggcatccaatggaccggattgtgggcgtgctgctgaaggtagggagactcttcgtggatcagtgcattgacgggttccgccctcatccaccccagggtagcgatgagcaaaaatacccatttcaaaaagtgataccgcataagagcttccttccgttacacaaatgtagggcattgtatcacggaaatcaaaacggataaataggaaaaatatggagagataaaaagagaagagaatcaccgccgaagcggtgaaagggtcattacttgccgagtttgctgatgtagtcagccagggctttcatgtcgtcgtcgctcagtgcagcggcctggccgtgcattacgccgcccatgccgtacttgttgagagaacctgctttgtagccctgcagatctttgacgatctcgtcagcagctttgccggcgatgggagcggatttacccagagctttggttttaccgtcctggccgtggcatccggcacacttggcgaacagagcggcaccatcggctgccatcagtgcagcaccggcaacgatcatggacaatgcaattttcttcatgttgactccttgtgtttaattacaacggtaattgtagcagaaaaattgtgaagttattgtgtaatggaggtaatgcttcaccgtttaacggagccgaccgatcactttgtagcgctcccagtactcatccagagcctcttcgagctcacgatcggacagggtgcttgggggcatcagccgatggtttttgaaatactcttctcccatgaccgacgtctctttggaagggtggcggaggaaatatttgagtcccgccttcatattgtgctccccgctgtagatcaggagggcattcataaaggtcttgcgcagggagaccccttctttacggtggcaggggacacagttgcgatcgaagcttcccgccgagagcatcccgctgagtccaagcactagcaccagagtgaaccgccatctattcacgattggcctcccatcgcaagatcacttccgtccccttacccttttgtgaatgtacttcgatcttccagccgtaatgatcgacgatccctttgacgatatcgagccccaggccgaagcccccctcagtgtcgttgaaacgccggtagcgctcgaagatctgctcgacctcctccggctccatccccccgcccgtatcggcgaccctcaactctccgggcgtgagagagacttggagcgtgcctccccggcggttgtatttcacggcattggagaggagattgtcgaggacccgtgccagcagtcgtcgatcggcccggatcgtgacgggttggatatggctttcgagcttcaggtttttcgaacgcagcagcagatcgaaatagtccaggcgctctccaagcagccgatccagatcgagattttcatcccgggtggggcgatggcgctccagggtcacgaatttcagatcctcatagagggtcgagacggtgcgcgccgccaccccgatacgctccaggcgtcgccgatcctccgggggcatcgaggcggcatcgatcatctcgatattggccaggatcgaagagaggggggtattgagctcgtgggtggtatcgtggataaaatcgtccaaaagccggatcgactggcgcataggccgcacaaaaagacgggccagataataccccagcagcgccaagaccaatcccaaaacggcaccggtgagaagaatgcgtcgccaaaccccgttcatccacgagtgatccctgggcacttcgatgaagaggtatttagcccccagatagtagaggtcgaggactttgacatagtggatcacatccccgacggtgtagatatctcccaggaaatcgacgtgagggttgcgcagcgtggagaagatcctgacatgctccaggtcgtagatggcgcttcggaaacgctcgtcccttggatagcggttttctttcggaaaatgttcatggaggcgtctgagccggtggatctgctccgtggcgtactccatcatccggcttttggtccgcagaagcatcagctgctcttgattgcggtaatagagggtgcttcccagtacaaaaagtccgaacatcaggaggctgtagagaaaaagaaaacgccgaaggctcttgcgttcactccgcagcacgatagagatacccctgttttttgaggctgacgatccgttctttgccgatgcgtttacgcaggtttttgatgtaggttctcagagcgctgtcgctggggttctccccataatcccaaagccgctcataaatccgttcatgggagagcacttccccgggatgggtgacgaaaagctccaataggcgggcctctttgcgccccagcagctcctcttcacccccggagccgaaaagccgtcccgaagcgggatcgtattcccagccgttccccagagagatccttgaagaggcggggtgttttacgcggcgctgcagaagggtctcgatccgaattttgagctctttgagttcaaaaggtttgcgcagatagtcgtcggcaccgctgcggaagccctcttccaggtcctccacactccggcgtgccgtgatgaagatcgccggtgtctccgtcccctgctctctggcctctttgagaaaatcgaatccgttgacccccggcgtgttgacatccagcagcagcaggtcgaaggattgttcatagaggcggtcctgggcctcttcgccgtcataggccgggacaacctcgtatccggcactctccagataatcacaaagcgttgcactcaaattggcgtcatcttccaataccagaagtttttttgatgccattggcgccctttagggggaggtttgagagattgtagcatattctctcagggagaaaaagcctcaaattccgccaaatctttgtgcctcttgagaagaaatctcaatgctcaacgctcagctctcagcgctaagcgctaagcacggctgcggatccactggatgatctgatcggctccaagcgcaccgctaatgcggtccacttcccggccgtttttgaaaaggatcatcgtggggattccccggataccgaactgggcgctcacctggggattctcctcggtattgactttgacgaactgggcctgcagcggcatcttggccgccgcctcggcaaaggccggggccatcatacg

SEQ ID NO: 4332 - DNA, 23390 bp, synthetic construct
  source 1..23390: mol_type = other DNA
  misc_feature 1..23390: note = Synthetic
tccccgtcaccggcaccactgaagcttcaaaatccctggtttccaggtaacgttacactgttttgcgcaacgaaacggttaaaaacgccatgcaaagacgggcaggacccgtgctttgcccgcaaccaggttacacagctttcaaaccgcctgcgaaacaggccgcaatcagattcgattttaccatatacggcctctgcaagccctgagccgtatagaaacacaaatctccgaataaccttttcaatctttttttagcggaagagtactagaattggggaaagataccctataatatctataatgtaaagtaacttttcaatgtattatgaaatttccgtaagattttcgaatcaacctcctgttccggccgccgcccgcggcaaacgtgggccgggctccgttcgccataccagaaagctcaccgtagcggctttcaaaaagttatacggtgaaggttcgacaggtatgggctgtgacatagtccattacatcattgcgatagcgtcttgcagacggctcacctctttaggggggcgtgtatgataaaacgtctgatacttcttttttttctacttgcgacgggatctggcgcacacctgtacaacgactccatgctccttatatattccaaaatcgtacccaggatgatgatgctggacaacaccgagagagtccagaaaaagagaagaagcctctgcatactctacgaaaaggttgaccggcctgtcgccgggaaactcaaaaagctagtcaaagagaatctgcctccacaggtgcggggggattttgaggttgttacagaatcctatgacaggaagtggagcgaaagatgcaggaactccaccgccttcatgctgctggatacaaaaagggataatatcgccgaggtcttgaagcttgcaaacgagaagagacttcttacattcagctacagcaactctcttctgaaacagggcgtcgcagtctcactcatgacgggtaaaaagatctatccgattataaacctgaaagctgtgaagagctcgtcgctgaagttcgacccaatgatctaccagacatccaaaatatatgacggtggctccataagatgagccgttcattctcactctccaccaagataatagtggctgttattctcttcttcctggcagctctcggtacgattacctatttcaactacacctcaatgcagagtttcgcgaagaatagtgaaagagagaagagcgagcagcttataaattcgatcgaaccggtaatctcgataaacatgtttctgggtatggatgaccccatgcgagaatacctggagaagataacggagaccacgccgatgattctgaagctgactgtaagagacagcggcggcaaagcgcactactcctacacttctccgagatacgggacacagagtatctctccgatagagataaggcacaccatcagggacaagattctcaaaaagcctatcggcgagatcgaaatggtctactccaacgccaagtactccgagattctgaatgagtacaaacacttcagttttcaacttctgcttgctgctttggcactggttctgctgcttgccattatgctgaaaaaggctctgactcccctgaggaagctggcgaaagagctgaaaagttatgagccgtcaaaatccaacttcccgaaagagaggatcgaaggcgacggagagataaacattatacagaatgccgttatagagatgataaagaagatagagagctataccgacgctatgttcaaactgaaccttgaacttgagatgaaggtcagagagaggacgaagacgatagagcagaagaacgagcagctcaaaagagagatagaggagaggagaagggcggaagaggctttgaaatatgccaacagaatgctcgaaaaactctccaccaccgacagccttaccggtctttacaaccgcagggtattcgaacagagcctgaaaaagtactggaaaaccgcactcagggaaaaacagcccatctccatgattctttgcgatatagaccatttcaagaagatcaacgacacctacgggcaccaggccggcgacagatgcctgaaggagtttgcgcagattctacggcaatgtatcagccgccctatggatattgttgccagatacggcggcgaagagttcgtttttatcctgcctgatactccgctgcagggtgctgtaaccatagccaacgaaattcaggcccggctgagagagcgaaacgaagattaccgtacaaagataaagatgacaaccagtataggtatcagcagcaccctgcctatcgaaatagataagggccatatcctgatgcgtgaagcggacaaggctctctatgaggcgaaagagagaggaaggaaccgaatcgtggtcaaccctcttgagtagagggtgaccgcttctacttttcgcgctccgggaatacttttatactctttatcgtatcgttctggtctatcgaatccagaaccagcatactgtcggcatcatcctcttcgattccgccgaataccgtatggacaccgtcaagatgcggacagggcacgaagcagatgaaaaactggcttccgcccgtatctttaccggcatgggccatcgatatcgtcccctttacatgcttgtggagattcttgtcggtttcacatgcgattgcccagtccggtccgcccgtaccgactcgtgccgggttgcctcccggaccgctgtgaggacaccctccctgggccatgaaacccttgattacacggtggaacttcaggttgtcgtaaaagccctcctccgccagtgtagcgaagttggcgacggtattcggaacctcgtcaacatagagtttaagccatatatcgcctttatcggtctctattttggcatacctgaacctcttcatcgtctctgcgtcatagtcgtatgttttgagttttttaccgaacataatatatccttttcgtagtttgtatcgcgcgccgattaccaaaatctcgaaatagaatagtttgaaatcgttgcgatacctgcggtcaggcggtttcgggaaaacttgaggcgtaccggtcaggtgcgtcgacggttttccccaaagtgcgcggctgcaatgatcgtgacgagttctgctatctctatttcgagatttggggattataccatgttgaaaatatcttccggagatctaccgcatacgtattatctttaccctgaacagaagcagaaggcggttgagccttagaagtgccctcttgtacagaggcaggttggccactttaagctggcagaagagttcgttgaggccgtcacgttcactttgagtcagattgctcatccaaagcccttattttatgtactacacgaacaatctcgtcatcatccagttcaccaagcatctgcataagtgcgcgtgcggcgacaggctgcgccttccccgtacgccaatcctggtaagtgcgcatcgaaataccgagctcttcggccatagccttctgcgaaatcttccggccgtggtttttcgcttcgagcgcattgtggacaatgttgaaaatatcgctgactttcatcacaaaattatactttcaaaagctgttatgcacattaaacttcttcttttttgaggtttatttcctgttttaagtatttatttacatttttgacatactaatattccttttaaagcaatttttattccgttttcatacggttttctgtgcattaatctctcaatttatctctttgctataatttccggcatacaaaggagtcgcatgaagagagtggttatagcaggtgcgggatatgggggactgagagccgtagagagacttgcagagctgccgggtatcgaaattacactggtagacgccaacagctttcatttcatgcagacggaagtctacggctacatcgccggaacgaaagatatagacgagttagccatagaccttgggctgtggtgcagcggattcgaccgtccggtcaaattcgtcaaagaccggattaaagggctggagcccgaaaagaggctgctcctgctgcaaaattcgacgctggagtacgattacctgataatcgcgacaggcgccagaaccggatttcccggttttatagaggggctaagagagttcagcttcggcataaaaagggtcgaccgtgccttcggctttcatcacagattcgaaagcgtcgtcaaaaagaagctcgatggagagagaggagatgtaaacatcgcagtcatcggcgccggtctttcgggcgtggaggtggccgcagagatgggttacatgctcaaaaggtacaggtatatgctcggcgagcgcgccgacgatatacgcataaccctcgtagacgcatgcgaaacaatactgcccggtatgcacccctatctagttaagagcgcttcgcaaagactcgaaaaactcggcgtaacagtgaaaacatccgctttcatcgacagggtctccaaagatctcatccacttcaaaaacggcgacgagatggagcatacctttacgatcttcacgggaggaataacggcaaacagcgacttcacgccagaaagtttcaaaaagggcgataacggccagctagaagtgaccaactctctgaacatccccggatatgaagagatcttcgccataggagatgtggccctcataaaagatgagaacgcaaaaccgcttccgcctaccgcacagattgccgaaaagagtgccgagtatgctgctaaatcgataaaaaacgcccttgaaaagaggagaacagagccgttcaggggaagactcgacggcatgttcatagcgctggggggcagatacgccgcggcggagattttcggcttcaggttcagcggggcggctgcctactatatgaaacgcctcatcactttcatatactttctgggaatcaacctcagggccaacgcaggctacagggtacgaaggcgccctcaccgctgatgtataaagagtccacaatctattagacttcttgcaaaactatacacagtatgagcaaaaagagaaacgattcaatcaaggcagatgttcccaagcgtagccaaagctacgtttggggttatctaacgcagagtcaatcggtttatctttttgcccttcgggaggcataaaaaggggcaatctcgcacaaaaaaatgttttcaccgtagctttggctacgctgaaaaatctgtttttcacgatcttacccctttttatgcctctcatatctgcgtatagttttgcaagaagtctattatataaagctttctcttttccattaatttaatcttattcgctatactatgaaaaaaaatcggcacaatatccattattataataaaggagaaaaaatgtctgaatcaaaagagctctattttccgaacagggagttcgccaaagaggcgcggataaaaaatatgtgtgagtaccgcgagctgatggagtgggccaaagaggactatgaagggtactggggccactgggccgacgagaagatcgactggttcgaaccgtatacgaaggttctcgacgaatcggatgcaccgttttacaaatggttcacgggcggcaggctgaatgtaagctaccagtgcatcgaccgccatctcgataccagaaagaacaaagcggccataatcttcgaaggggatagaggcgacaagcagatcatcacctatctcgaactctacagaaacgtgaaccgcttcgccaacctgctgaaaaaccgcttcggagtcaaaaagggtgaccgggtggtgctctatatgcctatgattccagaagccgcatacgcgatgctcgcatgtgccagaatcggggccatccactccgtagtcttcggcggcttcagtgccgaggccctcagggacaggatcatagatgccgatgcgaaagtggtgattacggccgacggagccttcaggaaagataaaccctacatgctcaaaccggttgtggatacggcgctcgaagagggttgcgaatctgtcgagaaggtgcttgtcgtacagagaaacaacgaagatgttgtctggatagaggggcgcgactacagctacaacgagctgatagaccaggagagcgacgtctgcgatcccgagccgatggagagcgaagatccgctctttctgctctacacttcaggctctaccggcaaacccaaaggggttcagcactcccaggcaggctacattctatgggcacagatgactatggagtgggtattcgacgtaaaagagaacgacacctactggtgtacggccgacatcggctggattaccggccacacatacatcgtctacggccctctcgcgatgggagcaactacggtcatgttcgaaggggtcccgacatatcccgacgccgggcgggcatggaagatggtggaagagtacagaataaaccagttctacaccgctcccacggcgatccgcgtactgcataaaatgggagaggatgaaccgcagaagtacgacctcagctcactgaaggtactcggaacggtcggcgaaccgatagatccgccggcatggaagtggtatttcgaaaagatcggcggcggccgctgcccaatcgtcgatacatggtggcagacggagaccggcggccacatgataagccctctgccgggagccacacccataaaaccggcctgcgccacattcccgcttccgggcataatggccgaggtgatcgagagagacggaaccccggtcgagcccggtgagcaggggctgctctgcataacgaaaccgtggccgagcatgataagaaccatctggggagacccggaaaggttcaagaagagctacttcggagatgccaaaaaagatggaaaaccggtctacttctcaggtgacggggcaatagtcgacgaggatggctacattaccataacagggcgcgtcgacgatgtcataaacgtatcgggccacagaatgggaacggcggaggtcgaagcagccatcaagaagcatccgcatgtagcggaggttgcggtagtgggtaagcccgaccccataaagggcgaaagcatattcgcttatattgttctcaaaaatgccgatgatactttcggcgaagaggccgaacttgcaaaagagataaacgaggtgatcgccagggagatcggaaatatcgccaagtgcgacaccataaaagtggttcctggccttccgaagacacgatcgggcaaggtgatgcgccgtattctgcgcgcaatagccaaaggtgaagagataaaacaggatatctctacactcgaagacccttcaatcgtggcgaaaattcaaacctgtgtgataggatagagatgtgaaactatggatagctctgcttctgccgatactgctgtttacaggatgcaatgagaaaaccgaaaagggtaaagagttcgctttttcggttctgattccgcagcctgcggctggacagagcgtccactatatacacggaaaacaggtgtttacctctctttccggagactcagcagtctcagccatggttataaacaaccctataatggcggggagagaggccatactcgctatagccatagaaaaccgtacggacggtaccattgagctgaagtgggacgacataacctttttcaaccccaaaaactacataaaactgcttcccgtatcggagatagaggagtatttcaaaaagccgaacaggtgcaaacccatgctcaatgcgaaagctttcagaagagagcttgagaagtacggcgtttttcacgatcccgcactggatacgcaaaaaagagagctcttcccgtccgaagctgcgctcttggatattttcaaagagataaaagaggacctctgctacacgagactgccgaacaataccacactcgaacagcacaaagtcaccgtaggatatatggtcattctgctgccggccgaaaacttcgaacggcgaatgcttttcatgctgaaaatcccggccgccggcactctgcacaaactccgctacgctctacagccgctccaataataatgatataatttcgaaaaaatcataacaggaacggcaccatgcagctttgcgtcgcactagatctgccttcgttgaaagagaatctcaaactggccgaagagctcaaagagttcgatatctggctcaaagtgggctttagaagctttataagggacggcagagagtcactcgatgcgctgaaacagatcaatccttcgttcaaaatctttctggacctcaaactctacgacatcccgaacacgatggcagacgccgccgaagagatagcgaagatggatgtagatatgttcaacatacacgcaagtgccggaaagaaggcgatgcaggaggtgatgagacggcttgaacctctaaaaaaacgccccctcgtcctggctgtaacggccctgacctccttcgactacagaagtttcaaagagatatacggcgaagatatagaggagaaggcgaaacagttcgcgatgcagagctatcaggccgggctggacggtgtggtatgcagtgtctacgaatcagatctcataaaacacgaaaccgaccccgagttcatcaccctcacaccgggcataagacccttcggagagtcaggcgacgaccagaagagagtcgccgacctgaagaccgcgatagagcacaaagtcgacatcatagtggtcggtcgccctatctacaaggcagaagatccggcggaggtcgtaaaaagagtactggaaaatacctagagggcttaccagttgccattcggtaccgccgtctccattccccatatcatccatcccacaaaaagcataaagagtattacgaacacaagcggagcgtacttttgaaacatccatgactcctgaaaattgatggtgccattgtatccaaatatctatgaaaaaaggtgaagagataaggtggaacacaacttgcttaatctccgttacaggttgcctcggcgcagccgcaatcttcaaaggaggcagtatgaaaattctcgacaaagtggagcttatcgtaaaactcaaagagaagatagaagaggcgaaaaaggagaacgcaaaggccgcagagcggctgcagggtctgctggaaagcatcatgaaatcgggagagctcaaagctgtatagaccaaatttaagccgtatattaagaaccagccgctataatttcatccacttcatggacaggtgggtgagctggctgaaaccacacccctgctaagggtgcgtacctttacgggtaccgagggttcgaatccctccctgtccgccataaccttcaaaagccccattttatgggtatttactacttaaaataaaataaatatcagtcgttttcgagggttttcagctgacagcgtcagtagctttttcttaccagctgacgttacgcaagcctcaaccgcttcaactcggtcatagcggcgagattggctttgacaagcaccttggttttaagggcgaaatggttaaggtagtgcttgatttccaggcattcaagcttgaaaaccgcaatcatggacatgagcggaagtgctatctgtgtcgttgctcttttcgttggtgatttggccgatgcagcattgtatttaagtggtttgtgatactccttgactctccatctttttagatagattttcgctactatatcgcctgaaagcgatatatcagagtagacgagattgactcggacctgttttccatctctgtttgtaaacccaaatctctacgtacaggaagcacctctttgttgtaacctttgagatagccttgcaaagtctcgttgtcttgcagctccaatgtacctacttttaaattctgcctgctgtctatcttcaagcttgggaatagagataccgttactgtggtagatcatatatttctctctatctcctattacgagcgtattgcacttttttgtgtcatatcggttatttgttgattatattcagactatgttgtaaactaaaacttataaatttcaagaccaaaaggcgtgaagatggggagaaagatttttgcactcgatttgggaatcacatcgttgggctactctatactggaagaggttgagcaaaacagctaccattgtatagacaacagtgtcatattacgtgacagcccttttgatgataaggggaactccaaacagatgattcgccgcgctcatgtaggtgcgcgcaatctaaataaaaagagaaaatatcgcatcatcaaagttgcaaaaacattggaaaatttcggagtgcttgatttcggggaagctatgaaagttcaaaaagagaatcgaatcataaacaaatggaagctccgtgccgaagatgctttttcacgtcccttatcccacgaagaactttttgctctcttttctcatatggcaaaacaccgcggatataagtcgatagcaaccaaagacctgatatatgagctggaagctgagcttgatctcaccggtgaacagagcagttccgcaaatttggatgatgaaagccgtaaaatctatggcgctttgaataaattggaaaaactgaaaaaaagatatccgtctgaaactatagcccaagtcattcatagagcggtacaaagcggtgaactgcactcctatcgcaatcacgatgactatgaaaaaatgattcgcagagaagatatagagcgtgaaatcgagtctgttgtactgcatcaatataaactcggagccatcgatataccggaagagaagatctccgaactcatcggcgaactcaattcgtgtatcaccaaacaggagatgcctactatagacgagtcgcttttcggaaagtgcaccttttacaaagatgagacagcggctcccagatatagctatctctatgacctataccgcctctacaaaaagctggcagaccttcgtatcgacgattacgaagtgactaggaacgacagggaacggatcatagaatgggtggaagagaagatctcttccggaaaaagcatcaaaaagatcacctacagggatttgcgtaaaattctaggtctctctccggagcaaaagatatttgggcaggatgatgaacagatcattaagggcaaaaaagagccacgcaccttcctgccctttttctttctcgcagatattaaaaaatttaaagatctcttctccagtatccagcggcatccagactcccggcagatctttcgccggatagcggatatccttcagcgttccaagactccccgggaggctctggatcgacttcggattttgatggcggatgaaggaatcgaagcaccagaccgagagcttctcgagctcttcaaaaacaaaaaggcaggcactcaggaactctctcaccgttttatatgtgaagcactgcctcttttcctggaggggtatgacgaaaaagagattcagaagcttctcggcttcactgataccgaggattacagccgctaccccaaatctcttcgtcatctgcatcttggcgaaggcaaccttttcgaaaaagaggagggtgtcattaacaaccatgccgtcaaatcacttgcttcctgggcacttggtatcaccgccgatctaagctggcgttacggaccattcgatgagatcattctggagaccaccagggacgctcttcccgaaaagattcgcaaacagatcgaaaaggcaatgggtgaacgagagaaaatactggaaaagataatagagaagtacaagaaagagtttcccttcatcgataaacgcctcgcaagaaagatccggctatgggagcatcaaaaagggctagatctctactccggcgatatgatcaacctcactcagctcctcgacggcagtgccgatatcgaacacatagtccccaagagccttggaggtctaagcgccgactacaacactgtcgtcgcactcaaaaacaccaacgcggcgaaaggcaaccgactccccggtgactggctcgccggcaattccgactatcgcaaacgggtcgagatgctctttgaaaaaggtcttatagactggaaaaagtgcaaaaaccttctcgccgtatccctcgatgaaatctacactgaaaatatccacagtaaaggcatccgcgccaccagctatctcgaagcgctggtggcccggctcctcaagcgctactaccccttccccgatccggaactgagaaagaacggctcaggagtcaggatgattcccggcaaggtcaccagcaaaaccagatctcttcttggaatcaaatccaaaagccgcgaaaccagcttccaccatgccgaagacgccctgattctatccacccttaccagaggctggcaaaaccgccttcatcggatgctgcgggagaattacggcaaaagcgaagcggaactcaaagagatttggaaaaaatatactccccatatcgatggactcacgctggctgattatatcgacgaggctttcaaccgctttatgtccaaaggggaagatagtctcttctaccgtgatatgttcggcggtatccgcagcgtctcctactgggtaaacaaaaagccgctctcagcctcttcccacaaggagagtgtctactcctccagacacgacgtccccacccttcgcaaaaatatcctcaaagccttcgacgagctcaatgtccaaaaaaaccgccataaacttacggctgaagagttcatgaagctatacgacaaaaagattcgtcagaagctttggctccaccacatcggcaacaccaacgacgagagctaccgtgccgtggagtcccgcgcggcccgaatcgcccaaaccctcacccgttatcaactcatggatgcaaaaggcgacaaggagatcgacgaggagtttaagcaaacactcaaagaactggtcgaatctcccatcgaggtcaatggcaagcagctgaggaaaatgcgtttctatacaaatgaaagagtatttcaaattaatcggggcgctgttgtatcagacaaaaatatgataggtgttcaaatcaccaaaggccgcaaaaaaaagatcatcatccgccgcatggatgtcaataacgctatagagcttcaaaaagagaaatcaagtatgctctgctacctcaacgaaacgctttttattttcaataaaagcggattagtacattacggctgtttacgaagttatctggaaaacaagcaaggcgcaaaactcatcgccttattcaatccccgttttccggccaatccaaaagcacaacccctgaaattttctgacaataatcaaatcaaacaggtgagcatcggcagcgctaccggtgtcatcaaagcacaccttgatctagacggccgtgtgaagagcttcgaagtcttcggtatgcttcccgaaggtgccgtggggtggttcaaaaaggagtctggctatggcagcctggaagacgatccgcatcactaagccctgccggctcagtatagagaacggaaatctcgtcgtcgaagatgagaccatgagggtcaagctctcactccccgataccgacagtatcatcttcgagggtgaccgcttcaccatcagcgccaaagtcctggccgccctgagcaggcacaaagtcgccactctattctgcgacgaatactacatgcccactgccattctccacccctatcaccagagctctctggccaccaaaactctcaaggcacagctctcgatgccagatgaactccgcgaccggatctggcaagagatagtccgcgtcaagattctcaaccagtcttccgtactccgcaacttctccaagatgtacaccaaactcgaaacctatgccgaccatatccgccccggcgacccctaccgtgccgaggccaaaagcgcgcgactctactggaaggagctgtttacggatctcaagagggaagccgactcgctcgatgtgcgcaaccaggccctcaactacgcctatgccattctgcgcagcctcgtcacccgcgacctcagcgctgcaggtttccttccggcactaggtctctgtcacgacaatcgctacaacgctttcaacctcagcgacgatctcatggagccttttaggcccattgtcgacgcggcgctctattttctcctgcaacgttacgaagaggagcagctgaacccggagtttaaaaaagccatcatctccatcttcgacagcgaatacgtggtctatgaagcggggctttcggccattcgtaccgtctcaaccagatatattcatggcttcaaagccacggtaaaaagcgcaaatatagagagtctacactttcccactatcgacttcaaggcacttcgtgagtgcttttagaatcatgtggcttgtagtaatgttcgatctacccacccaaacaaaaaaggagcgcaagcgatataggtggtttgtcaattttctggacaaagaagcttatattcgcctgcagtattccgtatacgccaaagttttcaactcgcttgaatcggccaattacggtaagaaaaggctcaaagagtttctcgacatcaatgtcaagaaaggcaatgtacgaatcattctattcactgacagccaatttgggaaaatggagataatcgtcggagaatccacccctcagcaagagcaggcagagcgctcactcttcgatttttaatgttgagcagcaaaaaagcctgtccgaaaacaggctctaaaatggaactgtcgtaacagttcttgattttaagacccctcaaaaaatccctgacctgttacaacaaaatctattttacaacaaatcagatctgttttcaagtttttgtttttataaaactgagaaattttttagcggttttaagacccctcaaaaccctgacctgttacaatacattcttgctataatacccctatgccacggttttaagacccctcaaaaccctgacctgttacaatggtacaattgtacgggttgagctccaatttgttttaagacccctcaaaaccctgacctgttacaatagcttatttcgatacgtaagacgttcatatgttttaagacccctcaaaaccctgacctgttacaatagcacatatcgtaaggtatactgagcccccgttttaagacccctcaaaaccctgacctgttacaatctgatcttcggaaaagcggaagtgttcggtgttttaagacccctcaaaaccctgacctgttacaatctgatcttcggaaaagcggaagtgttcggtgttttaagacccctcaaaaccctgacctgttacaatgaaaccgggactggaagagctaggctggttgttttaagacccctcaaaaccctgacctgttacaatgaagggtaaaaagaaagctgggaagcctatgttttaagacccctcaaaaccctgacctgttacaatgactcattgtttaaccttcccggctgcaatgttttaagacccctcaaaaccctgacctgttacaattgccgccactgagaaaacaccgtgaaatatgttttaagacccctcaaaaccctgacctgttacaatagggctaaaggcggctaaaaacttcctcttgttttaagacccctcaaaaccctgacctgttacaatttcattaatgtctacgagtattttcaggcttctgttccaacctaagcccgtggccgccgcttctcaaagcacctctacatcgcatccgagtctctctattttagctcttagctcttcactctctacgttttctatatagagaaggctttcaacgctttttacaagcagcatgagcgactctctgaaggagtcgctcatatcgagaaaacgggtagcccccattttcaggtagagaggttgtacggttttgagtagttcgagcatcttttcgtcggcatcgaagcctgagattcctacatcaaccccgcctcttttgagtttttgaacgagcctctccacggtccgggtctcatacttcagtatgtcgttttgcgccagctccgctacaagccccctgccgcaggagtccagcctctttgccgactcaagaaggcggtccatctcgtgggtggtatcgagaaaagagagggtaattggaagagccgcttttttgttgacgaaagtcccatcttcaaccaccctctccaaggcgtaatggagataccgctcaagcagccccaccgctccgagcatgggtgcgtatatttcgtaagggacggtatcaccgttttgaagggggaggtcaaatgtaaccaggcagtcgggcctgcccgctttttcgcctcccatctctttgcataccggaatgagccgccttcgatcaaacgcttccgacagcagtgaacgccacagactctttctggtcggggttctcttttcgtactcaaccgtcttcacacaatccctgttttggctccgggcatcctccagggccagatctacggaggccagaagctcttcgagactcttctcttttccgtagtgcacgaccgcgacacagacgtagagtatctcttttacttcatcgtaaccgtcaactatctccctggcctccgccaaagctctgtctgccgcctctttcgctttgtcggaggcgactccgggcagtagatagagggcttcaatcccgctcagtctgacagctacgctctcttcccggccgtttacggtttccgcccctttgagggcgatctccctgaatattccgtctaccacatcgtagcccacgatactgttcgcactcttggtaccgcagagtctcattacgactacggcaccgttgtctagattgtgccccccatttatatactcttcatactttatgatgaagtatcgcctgttgaagagagaggtgagcctgtctctatactccagctccgcgttttttcgtgtgagctgaaggagacggtcgtgcatctgctccatacttccgaccagtctgttcatcacttccgttacactatctatctccgcgatggaagatctctcttcattgacgctgaaacggttccgcaaaactccttccgcctgtatacgcagctttttgatcggctcaagaagagagcgtaccagcagggctatgagcgctattccggctatacccagcaccaaaaagagtccgatcagcttcaaaaagaggctgtagagatactcttcggccaaagaggtgtcggaggtgacctcaagtataccgagaggtttccagccggcagagacctgggcggcggctttcggagctttcagggccgcgacggtgaggaaccacttcggaaccgcgctgctgcgctccttcgttttcacgaagagagatctgcctctcatatctttcaactctatcttcctgaaatatcccgtatcgaacaccgcatcggctatggtggagagctttaccacatctcccccgctttgggacatggagacggccagggttgccgatccgtttactgcttttgcgtagagctcatcctgcacatactctttcgactctgaaaagtttatagcaagcaccagcgcaaggattgtaagaaaaaagagtgaaaacatcagtgtcatctttttgaaaagtgtcatagcggctccttctttattcgttcgatcaggtcgtcccatttaagctttaccatgctgtttttatcccccagtccctctaccgatcggtccttgaatctctgcagaagctcaccgttgaacgtatataccggtattatatctttgcgttcggatgcgcggaatatttttaggttcagactgtccagtaccagagggtccgactccggtgtttcaaaatatgccaggaccatatggggcagtttgtaccctttgaccctgacatacacgaagtagagcctcttcgtatctatgccgagttttttgagtgtgaagtatttggctattacataatcttcacaatcccccctgcctctcaaaagaaactcatacggggttgcccagtaatccttttttccccatacggttatgtcaccggcgtatcttaccccgttccagaagtcatttacttcgataaggagttttcgttcgggaagatcttttgcggagtctagaaacttgtagtagtatctgaatctgtcggcggtggaatggccgtattcgcgctctatctttttcaacctcttctctacggccgacgaggccgcggcgatagcggttatatacaaaacggagagaagcgccgtcatcacagtgaagacggcgcttctttcaagagagcctctcttaagtatggcttatatcctctctatttttcagaaccgtcggaatcggtcatatctatacaccctgcaaagccgacttgaaacagtcggcggcacaacccttttccggaccgacccatatctttacttgtctctacattttcggctaatgccgcaccgcaaccttaaaataacgatattataccgctatacatatgccgaaaacaaactctcccggaactttttcgccagccatatttcggtagactcttttcttttttgcagatacggcagccgataagataaatcatacagagagaaaatcggagactatcttctcgaactccgaagcggcttctccagcttttttctgtatgaatgtttcgaaatattcatcgatataacgctcatgcgaaccgaaagaggtgacatacatttcacgcttcggatttaccagtatggagtgggaaaattcggtcgccataggaacgatgtcaatgacctgcccgctcgtacctatggcgacgaagaggccgctctcgtctaccgctctttggatgaacctgtatgccggagccggctctccgaacatcacgacgttgtggcgtacatgccggctgccgcaccccgggcactcctcatcctctctctgctcacggtagcctatatcccatatatggccgcacgactcgcaacgcagatcgcgaagtgtaccgtgaagatgtatgacatttctgcatccggccctctccaaaaggtcgtccacattttgggtaaggttccatatctgcccgccgaaccgcttttcgagcccggctatcgcatagtgcgcggggtttggacttctgctctccagatctttgcgcctgtcgttgtagaagcgtgtcaccagggcacggtcctcctcccagccctgcgtggagcagacctgcatcacgtcgtactcctcccagagtccgtcgctgtcacggaatgtccttatgccgctctcggcactcagtcccgcaccgctgaagataagaaccttcttcatgaaaccccctttgcaaacgcccctagacgacccacataatctgtgagagtattattattatgacgacaagtgtgaaggggaagtagtggcttttgaacaaccaggggtttatcttgaataccttctgcatgaaacctctcaacccgagccagagcccgagaaaggctttgaatagcagaaccatctgcatatttgtcattccatcttcaccgaccgtaccgaaaacatagggaaacatgatgatacccgtacccacgaccgtaaagagagcgtagggaaccactttgcgaacgtgtatcattatagcctcgcggcactccgcacccttttcgcccccgagcgtcttctgcatttttgtcagaaagaggatgtccacaaagagaaatccgccgtaggtaaatgcggccagaaggtggattgtgtggatagtggtgtagaacaacttcgtctcctttttgaatggtaaatatgccgatgtctaacataaaaccggtcaaagccgattttgccgctgtacactgccgcggctcaacatctttttaaaatatggacacctttgaaattactggtgtccatattttaaaactggtacatactacgtaacatcagtttataagtcgcatattgtagcagttacactataatttcgcaaaaaaggaggcttcatgccgaaaaaacagccggaagatatcgggtgtgaaaacccggagtgtatcaaaaaagatgagtgcaaacgccaggtaatcgccaaaaacgggaccgccagagaggttagaaagttcggcggcacagccgaaaagggttgcggtcagttcatacagaaatagagaggccgcacctgcctccgttcgcacataaagcaggtaaaatcgtggggggaaacgcccccacattatgaaaacataacttcttccctccatcagtttcgatttcagtaccgaattattgttacaacgggagtgtacgaaccatacattatgcctcaatctcccaaagagtatctatacaacttctgtataggtgcctatctcctaaaaatcaaaaagaacggagaagtttatataaaaaaaccgtctattatcgaaaccgatctccaaaagagttgtcctttttggatattctctactcttccgacaatacagatgaaaatctgcattttttaatttcagctttaacaaaaaattaacatatacttaacaggtacctgtcataattgctacaaattttccggccgtctaacggcctgcaaggagttgccatgttgaaaaaaggtctgttgccgctatctatctttgccgcttcggttctggcccagggacctgtcgaagatctcgcacctgtgagtgtaatcgctaccggtgaagaggagccggtggtcgagcagcctgtcagcatatctgtaaaggagagtgccgagatagagctggatcaggtgatcttccagaaggatcttctcaactctctcgccggggtgcgcatagagcagaccggctccgttttcgggcacatgacatctataagaatgcccataaacaccgggccgtactaccttttcatgcaggacggaattcccgtgcaatcctccggttttttcaaccataacggactggcatataccactttcggctcatctacatccgtagaggtgctgaagggtgcggggaccgccctttacggttctgatgcggtagcggcggtcgtggacgtcaagtctctagccgcaccatccgaaaagcgggagtcaaacatcaaagccatgggcggcagttacggttacggctctctatccgccgaaacgagcgggccggcaggtgaaaacggaggctacaggaccaacgccaagtttctgcacagcgacggatggagagaccataccacgagcgaaagaggtgagctgaacttccgttacgacactcccctgaacgacgacaacctgctaaaagtcatatttaacgccagcaaaaccgacgccgagcaggccgacagcttcaacgactacgccaacatcgaaaacggctctacagccgccagcgacgaccctaactacttcaaggcgctggagctgaccgatgtgcgaagaaagttcgactacgcaagactgagcgccgagtggagcaactacagttacgaaaacctggagctaagtctcaccccgtatctgcgatacaacaggaacagatatgtagccacctggaatgccaaccttccgagaaacgacaacaagctggcaacagtaggacttatgcagaagggccgttacgacacttcatggggaagagtcatcggcggcatagatgcggagtatacaaagtcggacctcaaatatacccaggatttcgatatcaacgtaacaagctggtccggcaccactacataccttgccggagacctctacgactacaatgtagactatatagccgtagcaccatacatccatgcagatgtcaacctgggcgaagagatggtcgcaaccttcggcctcaggtacgactacaaccgttacgactacaaaaacaacctcgctcccgacagttacgacgcatcaggaaaatatttcagacctgccgacagaaccgacaacttttcacacctaagcccgaagttttcactcagctaccgaccggacaggagcaccaacgtttaccttcgttatgcgaacggattccgtattccacaggcttcccgcctctactccatgcagaaggggtacgaagaggtcgtactagacccggaaacatccaataccttcgagatcggctacaaaaagctgtttgaaaacagaagctatgtagagatatcggcctactacatgaccatagacgatactataacgagatacaaaaacgatgtaaccggcgactactactatgccaacggcggaagtaccctgcacaggggcatagagtttacacttacggcgaagatgagtgaggagtggagcagcaaaatagcctactcctactccaggcacaactacagagacgaccctgtatacggaagcaacgagatgcagcaggctcccaaccaccttggaaaccttaggctaatctattccccccttgcgctcaaagggcttaagatcatgggtgaatacgtctatgtgggaccgtggtggctggatgacgagcatacagcaggaaaatatgaaggttacagtactggaaacctgaaggctgaatacaggtatgactacaactggaaatttttcacaaaaataaccaatataaccgacgaaagatacgcaagccgcgcaaggtatgcctggggtaaaacggactacacccccggagacccgagagagttctacgcagggctcgaatatagatggtaaaactcttcaaaatacacaaactctccggccttgcggccggggcacttctactgctacttgcggtgaccggactctttctcgatcacgacaagtggcagtttctatactccactacgtttacttacactcccgaacccctcgaagagtggaacaaccgcctcttcgagggctaccattatgaccccgaaaacagcggccgcataatagcctgctcgaagcggggaatattcgaaagcccggacaacggcttgagcttcgagcggagattcgacggtatctgcctgggacttagaagtgacaaagagaggctcgtagcggcgacaaacgacggaatatactccctcgaaaacggtgagttcagaccgtttgcactgagaggtgcctacgtaaacgccctgagcatatataacgatcgtatattcgccgcggtcgacaaacatactctgtacctgatagatgctgatgacgggaaagtattgaaagtctctacgtcggagctggacaaaaacgatctgaaagcccctgtaacactctccagattcgtccgggacctccactacggcagaggatatttcgacggcgatatatcgctctatataaatgactacgccgccgtaatccttgcatggctgggactcggcggctatataatctggtggaaaatcggacagaaaagaggggctaaaacgataagggctcttataaagagtcacgcaaacatatttacggtcgccgcggccgcaccccttttggtcctgctcgttacaggtatttttctggaccactcatcttctcttgccggtttcatgagatccgtcaaggtaccgtcagtcctgctcccgcccgtatacggaagcctcaggcacgacatatggtcggtagatttcgacggaaacatgttcagg

SEQ ID NO: 4333 - DNA, 7115 bp, synthetic construct
  source 1..7115: mol_type = other DNA
  misc_feature 1..7115: note = Synthetic
agcgacgatgcggccaccttcgagataatggggcatgaagtgacactgaagataaaataggataatagggagaatgaatagaagtggcaaaataagactccttttttggctctttgttgtatctttgtttctctatctatggatagtctggattgcgattgcaacattcatcctcccagaaactccccctctggagtttccagccgatagagtgggaacaatgtttatactctatggcattttggcatttacttctctctcgggagtagtgatatctatcttcatcaataaccgacgatacacacagcgattcagcgctcttgtaatgattatatttgccaccatcatggccgcaaaaggactctttggctaaaactccgagagctcttacggaaatttgaacacttcttgggccaaggagagataggatagtagatttaaacatcatatattataattttctatccatataaaaaggaggtctatttaatgaaaaagataccgataattttgtcgatgttgcttgttagtgagatatcgtttgccacaaattttgtctgttatagatatgtcaatggcaaaccgacgggaggttttttgaaagtcaacgcaagtagtcagaaagaagccgaagaaatctcaagagacaaatacaaaaagcttggctactctttggactatacaaaatgcaaaagagcttggtagagtcaaatcgatagcagaggcaactggtcgatagtaatatattcaagctatcggtctctgtttctgctatagcgctcctctatattttatccatccatataactatattcttgcagataattatagcttgggctttctatttcgccgtgcataagtaggatagttttcatcgaatacaagcggatctcgagcatagacgagcgaaaatgagactccacttccctatggcttctgcgacaatttgtccgctctatggacgaagcgggctatctccttcgtatcgagatcctcactgcagggatcgggatgctcaccgtcgcgaccttccgccaactcttgtaaaatcccctccagctcctcacaccgctcccattgcatatggcaggggtgctcttcgagcgcggcatcggccagattccgtacatggcttcgcaagagacgcgtgccaagttcattaaccctgtcgatggtatcgtatctttctactccggtggcttcgagttggcgctgtatgcagatacgccaaaagcgcagagcgatatagtgtttctccctctcgtcgctctctttggcagcatagaaagcggaggcctcacggtcgtaacggtgcagtagccgccgtatggaggagttggaatcgagggagtctggggcgacggaagcgtagtattgcggcgcgaagagttttctcgcggtgtagcgaacggcgatgcccccatcggaagcgaaattgctccagagtatcagagcgctcaagagatagtaaaagagcagtaggagtttatagctaggagcaagacccgactctctatggacgatgatagcctgaatggtgatggccaccagggcgaaaaagaagaggaaaagatggggcagaaagattgtgactgcatagagtagccctataccattggcaccctctccggtgaaactccagccggaatcgacccccgctatgaaaaagatgagcagcactatcccatcggccagatatccaagccccaaagcgatcggcaaaccccaacccctacgagggaatcctctctttttcatcatcttccatatccttcgaccatcctgcaaagagctgcgaagagagcctcttttccatctcttgtactttatggtagcgaatgagctattaaatccctttttaaagccgtctatcctctatgaaacaaagagacgaagagtgcgagcgcttcaagtagagcagcctcgcagcgatatcgctatcaaacgagccattggaaaaacgaatcatcagggaaggaactatggtgccggctatacagaagcggattatcgaggcaatttgcatctgtatagattttttacgaatccgattgttcatcgatacccgacctccgctcctgcgatataatagacaacttacgataacttggaaggagatggaatgaaaaggattcttgcggtggatttgggcatcagctcttttggatatgcgattctggaagagagtggagcgaatcattatagatgtatagacaatagcgtagtgatgagagacactccctacgacaacgacggaaactccaaacaatctctcagacgaagccactcctccatgcgttcactgaacgaaaagagaaagaggcgcgttagagagcttgcaaggatattcgactcttatggcctgctatcctatgaagagtgcaggagagtccgcagagagaacaagattatcgacaaatggaaattgcgcgccgaagatgccctgtcgcgccctctgagcatggaagagctctatgcaatcctggtgcatatggcgaaacatagaggctacaaatcgatcgccaccgacgatctgctctatgagctcgaattggagctgggcttgacgcaggaggagcccgaaactctcaaagacgacgaaaaacgaaaagtatatacagccctgaaacggctcgaaaggctcaaagagcgctatgaaggagagacgatagcccaaatcatccacaaggccgttttggaaggagagctcaggtcgtatcgaaatcatgacgattatgaaaagatgatacggcgagaggatatcaaagaggagatcgagacgatcgtcaagaaacagtgcgagtttggggcgctacccctcgatagcggaaggtgtatggagttcatcgaggcattgcacgccaccatcacctctcagaccatgcccgaaaacgacccggaactcattggaaaatgcagttactatccgcaggagaaagccgcaccgagatatagctatctctacgatatctatcgtctctacaagacactcgccgacctgaatatcagcaattacgagatcactgcacaggatcgtgaaaagatcatcgagtttgtcacccaaaaagcttcgaaagggaaaaatatcggccaacttctctataaggatatacgaaaactattgggattgggagatgggcagaaaatatatggcaaagatgatcggctaaagatcgggggcaaatcggtagaacgaacactcgtaaagttcttttttctcaaaaatatatccaaatttccatcactgatgcgaaaaatcatttcacacacagagagtctcgatatctttggtgagattgccgaaacgatcagagcgcacaaaactcccagaccggcgatggatgctctgaaagatatcctgaagagatatgagatcgaatatgatgatatggaactcatagagctcataaaaggcaagagtgcgggaacactccatatctcgcaccgttttatcaaagatgcgctaccccatttcgccgaaggcaaaaacgaaaaagagatcaaggagattttgggtgtccatatctgcgaaaattacggcgactttccaaaatctctaaaatatctgcatcttggcaaagacaacaaattcgaatccgaaaatagtcaaatccccatcaacaaccatgctgtcaaatctctcgcctcctggtcactgcgtcttatagccgatttgagctggagatatggtgttttcgacgaaatcatcatcgaaagcgcccgtgatgtactgcccaaaagcatacaagatgccatcgacaaatccatgaaaaaaagagagaaagagctcgatgcgattatcgggaaatacaaaaacgagtttcaatccatcgacaggaaaatggcaagaaaaatcaaacttctggagtcgcaaaacttcatggatctctatagcggtggtactatagccattagcgatctactcgaagggcgagccgatatcgagcatatcgtcccgcgttcgctgggaggattgagtgcggactacaacctcgtcatcgcccataaggatagcaatatgcaaaaatccaatcgcctgccgatggattggctcggcggcgacaagcaatatctcaacagagtggagatgctttttgcggagcacaaaatcgactggaaaaaacgcaaaaatctcctcgctacatctctcgatgaaatctatagcgaagtcgctcactccaaaactctgcgcgcgacgagctatctcgaatcactggtgagtgaaataatcaaaatgtactatccttttgcggatgaaaaatcccgcatcgatggcaaagccgtccgtaatgtaccgggaaaaaccacatcgaaaacccgttcgtggctggggatcaaatccaaaagccgaaagagcaatttccaccatgccgaagatgcgatgattctggcgaccatcagccggggatggcaacagcgcctccatacgatgctcaaagaaaactacggtaaaagcgaagatgagctaaaagatatctggaaaaagttcacccctcatatcgaagggatttcgcttgctgagtatatagacgaagcctatgaacgcttcatgtccaaggggctcgagagtatctggtatcgtgatatgttcggggggatacgaagcgtttcgtttcggatagacaaaaagccgctctctggagcatcacacaaagagactatctactcgtcgagacatcgcgatccggaaaatccggacaagattcttcctacggtgcgaaaatccattttggatgcattcggcgcattgaatatattgaacaatcgccacaagtgggatagggagaaatttataaaaaaatacgacaaagagattcgacagaagttgtggctctatcgtatgggaaatttgaacgaccccgtatttcgcgcgatcgaaaaacgcgccggtgagataggcgatctgatggagagctatatctacaaagagccgtcgcacgacaaagagatcgacgagcgatatcaggaggagttgagagagcttctgcaaaagccgatagtcgcatccggcaaagccgtctataaagtacccttcgtcgatgatagtttctcgcatatcgagataaacagaggcaggggaaacagggttatcgtgcgaaccgacaagaactttttggcggtgatgttcgaaagaggcaaaaaggatagactcgaaatctccaaaatcgatctaaactcgatgcataggctccggcacagcgacgccatgattgtatatctgaacgagattatctatcttttcaacaaaaagaagatcatgcactacggtgcgttgagaagtttcagtatcgacaagcaaggaggcaagtatataaagctattcaatccgagatttcccggaagcccgaaatctcaaccaggattttttagtaccggttcgtcgataaaagctgtaagtatcggtagtgcgaccggcgtaatcaaagtacatctggatctcgacggtagagtcaaaggctatgaaaagtacggctcgatcccgaaagagcttgaaagagattttctcgaggagtccggctatggcgtcatggaagacaatacgcatcactaaagcggcccatatcgggatacgaaacggcaatctcctcatcgaagacgatgagttgtccgttaccctgtttctgccagatatagacagtatcattttcgaaggagaccgtttcactatcagtgggagagtcttcgccgaattgagcagacacaaagtggcgacactcttttgcgacaagtactatatgcccacagccatactccacccctaccatcagagtacactcgccacgagtaccctcaaaagccagcttcggacgacccgttcgttcgccgatgaactttgggccgagatagtccgcatcaagattttgcttcagtctgaagtgagcgagagatacggagagggaggagaggctatcgcaagatatgtagatcatgtccggcctggagatccatatagggccgaagccaaaagcgcacggctctattggtcctctctatttgaggatttcaagagagagcaggagtcgttcgatatccgaaatcaggcgctaaactacgcatatgcgatacttcgaagcctcataacgcgcgatttgagcgctgccggattcctgcctgcactcggtctgtggcacgacaacaaatacaacgctttcaatctgagcgacgatttgatggaaccgtttcgccctattgtcgatgtggctgtactgcgtctgctccccctcttcgacgacgagatgctcaatccggatttcaaacgggcgattatcgggatattcgatagtgaatatattctcttcgaggcgggattgtccacattgcgtagtaccataccccgttatgtacagcgtttcaaaaacgcagtggcgagcaacgacccccaaaaagtctctttcgcttcgatagacttcggacatctggatgagtgcttttagaattatgtggctgatggtgatgttcgacctgcccacacagagcaaaaaagatcgcaagctctaccgctggtttaccagatatatcgacgcgcagggatatgtacgactgcaatattcggtatatgccaaagtcttcaactctctcgagtcggccaatcacggcaaaaagaggttgagaaattttctcgaaaggaatataaaaagaggcaatgtaaggatgatcctctttaccgatgcacagttcgcgagaatggagatagtggtaggggagcagagtctccaagaagaggttacacaaaagagtctttttgatttttgaatctatgaaggggatctgcccgaaagcagatcctataatgaaccgccgtaacggtctcgattttaagacccctcaaaaaaccttaccgttacaacgatgatattctaacatagatatgctacaaaatgcaaattttcaaaactttgaaaaaatttaatagttttaagacccctcaaaacaccttcctgttacaatacagcgtttgttccagctcgcgacttcttggttttaagacccctcaaaacaccttcctgttacaatttaatttgtgagcgagtctcctatgaagaggttttaagacccctcaaaacaccttcctgttacaattcactgtctgctcaagttgtcttaccgtccgtttt

SEQ ID NO: 4334 - DNA, 5938 bp, synthetic construct
  source 1..5938: mol_type = other DNA
  misc_feature 1..5938: note = Synthetic
tctagggaggatttggccttggcaataaactctttagtatcttctatgtggtgaagtgtcatagaagagacgaagagatcgtagtttttgggaagatcatcttttaatatatcgtgatgggctgtggtgatgttgggaatcttgtgatcttttatctttttatctatctgctcaagcatctttttggagctgtcaagcgctaaaacctcacttgccttttgagccaagagtgtgctaagcagtcctgatcctgctccataatcgataatctttttatcttcaagatcaagaatagtatcaagcttttcataaagagttttggcattttttacacggtttgagttttgatcccactcttttgccaaagaatcaaatatattcactttttatccttttcaactaatctcaactgccatccaaagataacgagtctgcttactcctatccctgcatgtctaagcatatcaccagtccaagagttgcaggtataaagaagattatatgctctttttgcttcataatagtcataaaaattatcagcatttttatcaagatatagtatgagtgagccatctttggtcttaaaactctccagcacggctttttcaagccttctaaacccctcctcattaagaccgactttgaatgtcatactcttgtcaaaatctcccatatgagccactttcatcagtgaaggagtaggcaaaaaaagagcctttatagccaaaggataattgatatcctcaaatcccccctcatccatcataaatgccttgtctccaaaactaaatgccagatacccatcacttccacggtgaagcaatgatctaactcttttgtcactttggtttaggtcattagctttcaagatgatctcagagtgagaaaagataccgtttttgggtgcatagatgtagatggtgtgatctttgcctctgctagtcgagtgtctggggatgagaaagaaaatgagaagaactgttaaaaggataaaaaatagtttagcgattttcatctgtgtagtttagccaattttttattttattaatttcatttaaataatattaagtaataatttattaaactaactaattgtaattttaaaggtttaattatggaatcaaagaaaattctctctctagatttaggtataacatcacttggatatgcagttttagaagagattgaacaaaacagttataagtgtttagataatagcgtaattatgagagattctccatatgataacagtggagactcaaaacagagcctaagaagcaaacaggcaagtctaagaaaattaatctctaagagaaaaagaagaatcaaaaatcttgcaaaactttttgaaaaatacaaactttttagttacaaagatgcaataaagcttcaaaaagaaaataaatataaaaacaaatggatccttagagctgtcgatgcacttcaaagagaattatctatagaagaaattttttcaataatggctcatatggcaaaacatagaggttataagtcaatttccttagaagatctactttatgaattaaaaattgaattgggactcattgatagtcacaaggagaacaatataaatgatgatgagaaaagaaaagtttatgctgcattaaatcagttagaacagttaaaagtactctacccttcagaaacaatatctcaaacaatccaccgtgcagttaaagatgggaaattaagatcgtatcgtaatcacggtgactatgaaaagatgataagaagagaggatatagaggatgaaatagagactattatcaataaacagtatcgacttggtgcaataaagcttaatggagatgagattgttgagtttatagaagagctaaaggagataattacagatcaaataatgcctcagaatgatatgaaccttgtagggagatgcacctttttcaaagatgagtatgcagctcccaaatttagctttctttatgatttgtatagactatataaaacattagcagaccttcgtatcagaaactacgaaattactgataaagatcgttataaaatagtagaaacaatttttgaaaaactaaaaaatggcaaaaatgttaaagatattacctacaaagaggtacgtaaaattctctcactatctgaagatcaaaagatttacgacagagatgacacttatattgtaaataaaaaaagggaacaaagaagattggtaaaatttttcttcatatcagaagtttcaaaatatccaaatataataaaatcaataattttaaatagtaacagtattgaaatttttgcaaaaattgccgaaattatccgtgaacacaaaactccaaaacctgctataaaagagataaaaacccttctgacagatgagggcataagtattgaagatagcgaaattttatctctagtagaaacaaaaaaatcaggcacactatcaatttcacacaaatttattattgatgctctacccctcttcaaagatggaaaaaatgaaaaagagattcaagaaattttaggagttactacgacagaagattatagcacttttccaaaatctcttaaatatttgcatcttggtagaggaaatctatttgaaaatggcaattttggaaaagcacctatcaataatcacgctgtaaaatcattagcatcttggtcactaaagcgagttgcagagcttagttggagatatggtccatttgatgagatagttatagagagtgctagagatatacttcctgaaaaaaagcgtaaagagatagaacgaggaatgcatgcaaaagagaaagagatagataaaatcattaaagagtataaaaatgaatttccgaccattgatcggaaaatggcaagaaaactcaatcttctcaaatcgcaaaaattcttagatatatatactggtaggacgataaatatctctgatctatttaacggtaatgcagatattgagcatatagttccaagatcacttggtggacttagcacagaatacaatcttgttatatcatacaaagatagcaacatgaaaaaaggtaacagactcccaatggattggctaggagaagacatagattatataaacagagttgagatgttaagaagtgagtatttaatcaatacaagaaagtataaaaatctattggctaaaaatctcgatgaagttatagtagaggtaaaagatagcaaatctatgcgtgcaacaagctacattgaagcacttgtttctgaagtgcttaaaatgttctatccctttttaaatccagttcatcgcaaatatggtaatgccgttagaaatatacctggtagaacaacttctaaggcaagaaacctactcggcataaagtcaaaaagtagagatacaaattttcaccactcagaagatgctatgattttggcagccataagcaggggatggcaaaacagacttcatagattgctacgagaaaattatggtaaaagtgaagatgaattaaaaaaaatttggcaaaatcacactccacatatagagggaatggctatcgatgaatatatcaaagaggcatttgagagatttatgtcaagaggtgaagatagtctctggtatcaagatatgtttggtggtattagaagtatctcatactgggtaaacaaaaaacctattttagcctcatcacacaaagatacaatctactcaccaaagcacaaagtacctactctaagaaaagatatcaataatgaattttcaaatctggacattataaaggataggcattcaataaatagagacaaatttatgaagaagtatgaagaaaagattagatcaaaactttggtataaccacatagttaactataatgatcctgtaatgagagctattgataaaaaagccaatgatatagcatcaatttttgatgatccatactatctaaatagtaaaaaagacaaagagatagatgaaaagtttaaggaaaaattatccgaaacgattaactctcccatcatggttgatggcaaaagagtaagaagtgtgagatttgtctatagtaagctaaatgcaataaaaatcactagaggagttgtagagagtgataaaaatatgatgggtatctatgttgaaaaaggcaataaaaaacttcagcttcatagaatcgatgtaaataactttcataactttaaagagaaaaaagatgggatgatgatctacctaaatgatatggttatttttttcaataaaaaagggattatacactacggtgcactaagaagctatgtagatagcataaaaaaagttgcactctttaatccaagatacccatcatcacctaaactacaaccaaaacaattttcaaccggtacacaaattaaacaagttggtattggaagtaccacaggacttattaaaatagttcttgatctaagtggtactataaagagctatgagaagtttggaactatacctaaagagtcagaagataagtttttaaaagagagtggctatggcatcttggaagacgattagagtaactaaaccatgcactcttcgcattgataacagtaatctacttatagagtacaatgaatcagagtatagattttcactagatgataccgatagtatcatctttgaaggagaccgttttatggtcagtgcaaaggttttatcatctttatcaaaacataaagtagctacactcttttgtgatgaatactatatgccaagtgccattttgcatccatatcatcaaagttcacttgcaacaaagacattaaaatctcaactctctacttcaaaagagtttgcagataatctttgggaacatatcattagagcaaagatatcactacaaaaatttgtcttagatatcttagaaaaagattcatacaaactagatctctacttagaacaagtaaggggagccgatagatatggtgctgaggcaaaaagtgctagatactattggagcaatatctttgaagggttgataagagaacaagagtcatttgatataagaaaccaagcactaaattacacctatgcacttattagaagtcttatcacaagagatctaagtgcagcaggttttttaccagcagttggactatggcacgacaatatatttaatgcttttaatttaagcgatgaccttatggaaccctttagacctatagcagatcttggagtatatctgatacttaaaaactataatgaagatcaattaactccacagatgaaaagagatctaatcaacctgcttgatattgaatttgtagagtatgagagaggtttgtcatctattagaaatgcatccaaactctatatccaactctttaaaagatctgttgagacacaaaatgaaaaaattttgagttatccaaaaatagatcacgagaaactttatgagtgcgtttaggatcatgtggcttgttgtaatgtttgacctgcccacacaaacaaaaaaggataggaaaagatatagatggttttcaaaatatctagattcacaatcattcataagacttcaatactctgtatatgcgaaggtgtttaatagtgttgaatcactaaactatggcaaaaaacgattaaaaaactttttaaaaacaaatgtaaaacatggaaatgtaagactcttatcatttacagatgctcagtttgggaaaatggagatactagttggagaacaatcaccacaagaagaggctacacaactgactctgtttgatatataaaaaggagatcacccgaagatgatctctataatggtgctgttataacagcacttgattttaagaccccatttcaagttaccgcctgttataacagtgagtatattgtataaaaaaattgtttttatgtcaaattttcattttttttacaaaatttagaaactttttaatggttttaagacccctacaagttaccgcctgttataatatttcaagcgatatagtcgaagtg

SEQ ID NO: 4335 - DNA, 14039 bp, synthetic construct
  misc_feature 1..14039: note = Synthetic
  source 1..14039: mol_type = other DNA
atatataaaattatattaataattatcttgaaatttttattataattccaataatggcattatgtatgtagaggtaaagtttgaaatagaccgaaatactttgtcaacgcttttggtgttggcggattatctggatttgtcacttggagagtttatccaagattaccttgaatgggaatatgatgaaatagacgggttgagaagcaaaaataatgtctaatggttgtttttgatccgctcgcggcatttggccatagatggatttagccgtgaatctatccggcgtcagttggcaatttttagtattattattccggaaagaatcagtaaaattgcaaagctgcgcataaaagtcaaagggtcggagaacattgccacccctattataaaagttcctatcgcgccaattgaagtccaaataatataggccgtaccaatgggtatagtcttttgcgcgacatataaaaaatatccgctaagagccatagaaattacagacaatgcaatccacgctattttaaagtttgatccgtgcgccagcttaaaacccagcggccatcctatttcaaatattcctgctattataaggtaaatccagttcataattttatatgccagctaatataaccgtattttttttagtcaagctcaggaatattatgcaatcaagccagtttaaataaatctcggcagattggcaagttattccaccaaaaaaaacggcgcgataattcgcgccgcagaacaagaaaactctttcacatttgaagtgccgtatgaacgcgcagtgttcaaatttgagccactaattttgtccttgattccgtttaaaataaatgataataatttaaaaatgtcaacaactaatttgagcaattttaatttgtctttcgatatcggatattcttcaataggttggagtatttcatcaaagcctgctaatgcggttttcccaaattggcttggggcaggggttgtggtatttgacgacgattcatgcatggcaaaatcgcgggcggaatttcgccgcatgcgcagaaatatagcctcaaagcgaaaccgcataaagcgcatgagagaagtcttgtctgggttgggtgtcatgggcaaagacgagcttgacaacgcaaaaacggaacatccatggtttttggctgctgaaactctcgctagtgggaaaattttatcgtggagtgaactttggagtgttctcagatattacgcccacaacaggggatacgacggaaattccatgtgggctaaatttggagacgattccggcggcgattctgaaagagaggcaaatgcagaaaaacttatggccgacttgggaacttccacgcaggctgaaactatttgcgcgtacctcggtgtggatgcaaaatcccctaagcctttgcgctttaagaaatatttcaagggtcagaatttggctttccctcgtgaaatagtatttaaagaggtagagcggataatagatgcacacataggcatacttccgaaatgtgacgaaaattttaaaaaactaatgataggcaattggcgcgaagtcccgtcgaatatcaaattgcccgggcgttttacttccgacagggggttgttattcgggcagtatatgccgcgtttcagcaacagaataataactaaatgcccgttgagcggcgaaaagactcccaattgccatagccgcgaatttctagattttagatggaagtctcttttggcaaatatggctttccctgacggtacggatttaatggagactaggcgtaaaatagacgattttatgcttttatacggggcattaagcaaaaatgcattaaagaaaatattaaaggaagttataggagaactgccgtctaactacaatggtatgtttcttgcctccgaaatggaaaaagcgctggaggttgatcctgtcagggcgttaattttaaggacggtatatccgaatatttctttttctttgccaaatgcagagctcgttgaaaaactctggaaattgattcccaagttcgttttcacgcggatgttcagattaaaagaatattcatttgcggacatatgcgctcttctgagtccagaaaaatccgccgagctggcggaatttgttcgcgtaatttttgatagttctcccgcgtcgaaaaaatctccgaagcctgattttgaaactgcattcaattttaaaatgcgcgtgcaaaagatttcgggtcgctcgccgtattcgcggcaattgatgaagtcggcttcggaagaaatcatgcgtggagtcgatccccgttccgaaggtggctctctatacccaaggagcgaatccacaaaaaaagaggtgctttcaaatatagatacgtggacaaacaaccatcttgtacgccataggcttaagatatttaaacgcttgtacatggatatcgtaagagaatattgcggcgcagacaaatctttggtcaaatctgtagccatagaggtggtaaaggacataaccgcattttccggtttagactcgaaaaagaaggcggcaaaactgaacgacttggtagcccaccataaaagcgtgtcggcatatttaaaaaaggaatatcccgaattaagtccaaacggatctattctaagaaaggcgcgcatagctgacgatttaggatgggtatgtccttataccggatgccatttttctccgaggcagctttttgaaagcggaaatatggagagggaacatataattccgcgctcgctccggccgtcagattcattagaatctctggttataacgtggaaagaggtaaacgatatgaaagggcagcgcactgcatatgagtttataaaagaatgccagggaatgaaagttccggggcggcagaatctttccatcgtgacgcctgaacgttttgaagcgtttgtgaggcgtttgaaaaagccaatgcaccctgcggggaaggctgatatcgaacgaataaagatccgcaataagctattgcttacagaacactataagaaacgcgaaggcggctttcttccgtccgatttgactcagacatcgcatttaaataaattggcgtttaaggttgtaaaatctctgtacgcagacgcagaaaaagctccagaacttatccacgtgcctggaatcgtcactagcgtcgttagaaagaattgggatttattgccatgcatgggcgatgcctgtcctgagatatatgaaacgcttgaaaacggagacaaagttttgcgcttaaaagacgagattcgttcaattacccatttgcaccatgcagttgacgcggttgcaatggggctggcagcctctgtatttccgcgcacgagaaatttttacgaggctgtctcaaaaaggcgcttgaaccaggcagaccgccaagagttgcttaaaaccgggctagttttgttttcgggcgacaagtggaaacttgttgaattggagaagagctatctgaaggaaatttccggcaggatttctgaaaatagagttgttaaatttttgccgcgcaaaatgtcgggcatggacgtagaacaaactctttggggagtcgtaaaggaaaacgaaaacggaactgtcacaatacggcagtatggcgctggcaaaggggagtcccgccgcagtataaaaaaagcatacgaaccgaaattgaaattgctgggatacgaatccaagaatactgctaagagcaagcttgctcgcaataaggctgttattataataaagggcaactttggcgtggcgcttgcgaatccacctcaaataataccgcatcacaacgtttggcagcgcttgagcgaattggcggagaagaacggcggaagatttccaaaaattcttaggcgcaatcaaataattgaaattccctcagggcgttataagggtatatggagaattacttccataaagaataattcaaattatattggagttgatatgattcatccaatatatgtgcgcataaaggaaaaatcgaaaataaatgtaaatttaaacactataataaaagacggaatgaaaataatagatacgcgtctcataggtgcgtagcgccaaaatgtcttaccatatagtaaatatagacactccagaggcgtatatcacatgccgccacgggcaattggtatgcgatgacggttgcggtaaaaccaaacaattgccgctggaagacgtttgcgcaataataattacaagcttttcctctactgttcacagtaggctattaaacgaagctgctaaactcggcgtttcaataatattttgcgagaatttcaaaccgcagtcaatattaatgcccgcaaacagaatcaccgatacggttttggcgaaaagcttcatagaaattccacgctatgaaattgagtcgtattgggataaaacaatagacgccaaatgctacaaccaacttgctgtcgcaagtcttattgctccagcgtcccagaagctggaaaatataaaaattgtatgccagagaaaaacggctttaaaagaaagccaatgcgcgagatattattgggaaatctttggagaaggaattcgccgcgaaggattttctcgcggagatgattctttttctgagaataagcttttggatttttcatatacagtactgtctgcaatcgtgatgcaaaagctttttggatatgggttggacgcttcttatgggatagcgcattcagttagagagcggtctgctccattagcctacgatttgatggaaccgtttcggccgtatatagactattgcgtatttagatggattgagcaaaatgcgttattggaggatgatgtttgcgttgacaggcaattcaagcgtttcttgatggatggcataatcaggaaagtcccgtatataggcaagcagatagagtttaaaacggctatagacgaatcaataagaagctttagaagtgcggtaaaacgaaaagatataacattatataatccgtggacattaaaaaattcaaaatgggttggatgatagttgcctttgatttgcctgtaggcacaaaagaagaacgaaaatctgcatttggtttccgaaaatttttattggacgacggataccaaatgatgcaattcagcgtttatttacgtccattagtatcgtatgctagaatgcagactcatgtgcgccgcttgcgggaacataccccgcctaacggagcggtaagagcaatttttgtgactgaaagccaatgggagagatcgtatgttgtgtatgggaaatcgcgcactccgcgagagcctgaaaaaataccggagcaattgcatctctggtaaatcgcttaaaataagcaaattccagaaatgcattttgctctgatagattttggaatcaaggcaaaacgaatatagcgcgcttgttttctctgattgaattttgctctgatagattttggaatcaaggcaaaactgacttaatttaaatggcttgtttatattaaaatgaatttattgaaaatattttcaatagttaagcggaaaatttttcaaaatgtttttatttcttatcggaaattctgaaatatattattagaaaaggcgatctcttgttttttattgaatatgtctgcctagtgttttacttgatttattatgaaactttgggctgttttttttgcgttgtatatatttgcgtctgccatttttgcggagtccgataaaaaaaacgtggtcttgataattgccgacgatttaggattcggagatttaagttgcgcgggggcctcggcttttaaaacgccaaacattgattctctcgctagccgcggcatagttttccagcaaggatatgccactgcttcaacttgtacgccttccagatatagcatgtttacaggcgagtacgcttggcgccaaaaaaaatcaaaaaccggaattctcgccggagacgatccgctttgcatccctacaaatgttattactcttccaaaaattttcaagtcggcgggatacggcaccggcgccgtcggcaaatggcatcttggtcttggagacggttcggctcctttggattttaattccgaaatacgtccaaatccaaatgacataggttttgatacatcttttataattccggcaacagttgacagggttccttccgtttggctgcgcgatggcaaagttgtcaatctagacccttctgacccgatagaagtcagctatgttaaaaatatcggagatactccaactggattggagcgtccggatcttctaaaacagggggctgataagcagcattctggcagcataataaacggaataagcagaataggttatatgcgcggcgggcatgcggcgcggtttgtcgacgaagaaattccgacaaatgtagtgcgcgaagcatccaattttataaacgctaataaaactcggccgttttttctctatgtggggctttttgaaccccatgtgccgcgcactgtggacgctaggttcaaaggcgcatcaagctgcggaataaggggggatgttatcgcccaggctgattggcaggttggggaaatagtcggagccttgaaaaatgccggagttttggacaatacaataataatattttcaagcgacaacggcccagttgtctttgacgggtattacgacaattcagaacgagacttaaacgggcacaagcctgcaggaattcttaggggaggtaaatacctcgtctacgacggcgggatgagggtgccgtttatagtggtaaatccaaaagccgaaaaaaatggggtaagcacagcgattgtggggctaaacgacttgccggcgacatttgctgaaatgttaaaagtaaaaattccggcaggagaagctgttgacagtgtaagcgctctcgaaaatttccgatcggcaaaagcggcggggcgccgcagtgaaatcgtattgcaaggcacgcgcgggaaatcaatacgcattggagactggaaatttgtgcctaagacatcgggcggaaaagccgacataggatcaggtgcaaatccaagggacaaacgctttgccgatgccgtcgtattggaagatgccctttacaaccttaaggaagatccatcggaaacatgcaatgttatatcgcaaaatcccgaaattgccgagtctctaaaaaagcgtttggctgagattgaacgcataaagtagcagaaactttttgggtaaaaaggcattaaaaaatatataacgtatgaaaatttttcttcgcttccttaaaaccttattggtcggcgcagttttgtcggcatttatttcgaatgtgttttcggcgcaaaagcgccctaacgtcataatagtcaatcttgacgacttgggagctggctggctttcgccttacacgaaaaatttaaagccgtctgatatggatgaaggcgctttaaaactctttctaaaaaattccgggaataagaactttgacgttggggaatgcttgaaacttgttgagagcggaacgccgtatatcgattctctcgcttctcaaggggtcgtttttaataggtgctatgcctcaagcaatttgtgcgcgccgtcaagaaccggattgatgaccggcaaataccagcagcgctggggtgtttgcgacttggcaagctccatatcaaaaggcgtaaaaaacgacaatattccgctgcttgcagagaattttaaaaaggcggggtattcgtgcgccgcaatcggaaaatggcatgtgtcgcgccacaatgaaggtgattttcaagcggctgtaaaacgccaaaaaaattctccaaaaccaaaaaaacagttttcaattgtgcggggtaaaaaaattcccatagacgacccgcttgaggcggataggcgttcggcttgggcttcgtgcgcagaaggagagtggccgacagatttggggtacgattattatttcgggtataatctgcacgacagccgctattattgcgcggctgatttgtgggaaaacaaatcgcgagttccgcagcgtcctgaaggcgaatttttaaccgacctttttgcggacaaggcggcggcatacatggaagaatgcctcaaggaaaataagccatttctgttgtattttgctccgatgactatgcacgggaggctagaccccgcgccagaaaagtacgccgttaagagctctatgccgcagatagccgcgcatgttgaacatatgcgttcgatcgacgaaactgtccggaggtttttttggcttctaaaaaaatacggcgaagataaaaatacgattttcgtgctttgcgccgacaatggatcgccctatattttgccgccgtcaaacgcgccctaccgcggtggaaaagggcagggatggataggcggttcgagggttcctctgataatatgcgcaccaaatgcaaaacccgggtattccaacgccttggcaagtttgcttgacgttttcccgacagctatggattttgccgaaattccaatcccggacggactcgacggcgagtctctaaaacctgttgttttggggcagaaaactaaaacctcgcgtaagaatttttataccgacggacttcatgccatcacttggtatcccaatactgactggggttttgttaaaatgaaaactcaggatgcgaaccgttgcccaatgtttgcgttcaatatatcggaagccgacaaagtgtatctcgctatttccaccacaaaaaaaggcgcatacaaacatatttcaaacgagattcccgcttccctggggctatatgacttaaatgccgactgcaagcaactttctccgcttccaggcgattccgcggaggctttaaaaatgcgcgatgaacttaatatgtggctaaaatccatgccgtatcctcacgatacgatgctcaccaagaacaagactcacgcatataaagagctcttggagattacctcaaagtagcaattaggctgcctcgcattcacggcgcatcccttgaaaataaggcccgcgcttgcgtggaatttgccgaacccgctagaaaacaaccgcttcgatattttaattggagttcttgttgttgctcgtccactcttgccaagatcctgtttcttgcggcgcagtccatcggactttattcagccacgacaaatcttgcccgagcgcgcggaaatcgccgtctttctcaagctcagtctgcaattttgcctttagcttttcagcaatttcagagtacttcgggtcggatgcaagattgtttagacattcggggtctttgcggatatcatagagttggtactcggggcgtttcccgaaactccaattgtaatatttatcgaaacgcgatagcagaagcgtttttgtgggactgtcgtcgcagttgcggtatcctgtttcaggatttcctaccggccatgcgtcaggctcgtagttgcgcacaaaaaggaagtcgtttgttctaatcgcgcggacaggatatcctgcattgttcggtcgtcccaaatcgtgccgctctttgcccacaagcataaactgttcggtatcgggggcaggcgggttgggtgaggttagaagggatagaaagctttttcctgtcatttggggatgcttcggaacgcctgcaagctccaaaaacgtgggagcgaaatccctaacatttataaatgtgtcttcaacccgcggttttggaatatttttcccccagcggattgccaaaggcacattgtatccgtgttcaaagatttgtccctttacgcggggaaacggcattccatggtcggatgtgtaaacaaccagagtattgtccaattcccccgttttctgaagatattccaataccttctttacatgcgagtccatatattcagcctcaaaggcgtagtctaatatgtctgagcgcactatatcgtttttggggtagtactttggaacttctgcggatttcacgtctttccccgcgcggactcccgctccgtcttcgtatggcctatgcggttctgtaaatcccagccagaaacaaaacggagttcctgcggggcgttccttcataaagtattctataaaattgcgcgaatagtcgttgcggtttatatactttgcagggggatcaagaaagtacttattgtaagccttgccggcaggattatttttgcgccctgcacatttgtagtctccggggccccatcctttaccggtaaaccctacatggtatccattggcttcgagtatgtccggatacgttataaattcctttggccaggggttgaagtgctgtacgccttcttttaattgccaagtgttgcggccggttgttatgcttgccctgcatggggcgcactttggatttgatgtaaaacaattgttaaaaaggattcttcttcggcaactttatcgaatgtcggcatatttatccagtctccggtcccgtacgatttggcatgcttaccccagtcgtcggctattataaacagtatgttggggcgttttttgggagtgtgttgcggaggcgttgaaggtgaggttgcaatggcaaaaagcggcgcgcaaataaatgcgcatatgtatagtccctttaagaaatatgttaacatcttacgattcattcctttatattgacaggacgccttaaaacgggaaacataaaactatgtcgaagttaatattgttttttggggtgttggcgtttttcgttcaggcagcgttttctaaagaacgcccaaatatagtttatataatgacagatgaccatagttatcagacttttgcggcatacggaggatccctgaaagatatagtcaaaactcccaacctcgattccatcgccaacgagggcatgcgctttgacagatgttatgtaacaaattctctttgcggaccttcgcgcgccacgatacttactggcaaacatagccacgccaacggtttttatgcaaattctgcagggcaggtttttgacggatcgcagacaacatttccaaaaattttgcaggccaatggataccaaacagcgattttcgggaagtggcatctggtgagccatccaacgggatttgatttctgggaaatacaggacggacaagggttgtactataatcctatctttatcgggatggacggaaaaaaatttcgcaggcatgggtacaattccgacatcgttgcagatagggcgttatggtggctaaaagaaaagcgagactccaaaaaaccatttatgctaatggttcattttaaaggcgtgcactccgagtggcaccctgcattgcgccacgccaatatgtacgacaatgtgaaatttccgctgcctgagactttttacgacgactattccacaagaggatcagccgcaaagaaccaagaaatgcggatagacaatcatatggaaaattatcgcctcgtgcttgacaatccacctaaatcaatgactccggaggaaaaggaaatttggcgccaaaagtttgctgccaaggataaggcgtttttcgagggcaatccaagcggccgcgaacttgtggaacgcaaatatcaaagatatatgcaaaattactgcgcaactcttgcaggcgttgacgagaatgtcggtcgcattttggattacttaaaagaaagcggattggacggcaacactgtagttatatacacatccgaccagggattttacatgggagagcacgggtggttcgacaagcggtttatgtatgaggaaagttttagaactccatttgtaataaagtgggaaggcgttataaaacctggttcaaagagcgacgctttagtacaaaatctggatttcgccgagacaattctagacatagcagggtgcgatatacccgatgaaatgcagggggtgagctttaagccagttttgctctccggcaaaactccggaaaattggagaaaatcgctttattaccattattacgaatggccagccattcatatggttatgcgccatgacggcgtaattatggggaaagaaaaattgatagatttttatcctattggagaaagggaatactacgatttgtcgactgatccaaatgaacttaacaatcttgccggagacccgtccaaagccgagagggttgaagccttatctaaggaactcagacgcctgagagagttttacaaagttccgaagtccgataaatacgagcccgaacttttaaaatcggctttaaaagaaaaatacgggaagtcgcaataaaaactttcgcattgtttgcgcgcgtttttatttatgggatgttgcggtaggcgggtgttttaacggaaaaatatcaataaaaaaacaatgtgcttggaaaagtttcttgcggcggcattttttctttttacttttgccttatcctgtacggcggaggttaaaattgacgaaaaatcgatgtttcctcttacggaagactctaaacaaaaatccggagtaaaatatggcgagtggattgaatctaaattctccgcctccaaggtttttcccggaacggagagaaaagtttgggtgtatgttcccgccgaatacggcggaaatgaaaaagcatgcgtggttgttttgcaagacggtccgcaattccacataggcaatgtcatttcaaatcttcttgcgaagggcgagatcccgatgatgatagcagttgcgtcctctcccggaatagttgctggcggcaaagacaaagattcgccccgagcaaataggacgttggagtacgatactccgtctccgcgttttgccaagtttgttgtgtcagagttgttgccgtttgccgagacattaaaaacaaaagacggccgcaggataattctttcgaaaagcggcaatgacagaatgattgcgggttttagttctggcgcagcagcggcttttaatgcagcttgggcttgcccatgggagttttcgagagtctttacagggtccgggtctttcacgggacttcgcggatcttttgcaaatgcgacactcgttcataaatacgaaccgaaacctctgagaatatttatgcaaagcgggtcgcgggatatgtggacttgcttcggggactggtggagcgcaaaccagtctatggcgagggcgttggagtttgccggatatgattttaaattttcctttggagaggcaagccaccgcggatttcactcagacatgattatgccggatgtcatgcgctatctttggaaggattggcctaagcctgttgaggcgtcgcaaaagagccgcaaccacatattgcaagatgtgctgatcccgggtgaaccattcataaagatagcggacgccgatattgaagactgccttgtaatgggggaaaacgcgtccgttgcgctggcgggtgaaaagtccgtaaaggcgctttggggaaacggagatttccatgccggaacagttgctaaagggctcaaagcagacttgtcgcttcaaaatggaattttaaaaattaggagtggaaacaatttcgcggagatttgcaaacgcgttgcgtatgcaagggcggttgcgacgcgcggctcgcatttttatgcgcttttatcgtacagcggggcggatgcgtctcttgttagtattgacgcggacggcaatatctctgagcttgacaaaaatgttgtgacaaaaggtgctgtaggaatagccgcaaacgagaattggctgtacgtttttgattccgcaacaagaagggggtacagctacaaagtattggatggcggaaagatagactgcaaacaggaatttttctttcttcatgttccagaccaatgcgacggaacttctgcgagttcggcggtatgcgacgacagcggccgcgtgtatttggcgacatccgtgggcattcaaatctgcgactacaacgggaggtctgctgcaatattagagttgccaatgggtgaactgccgttaagtttggcgttcggcggtgagggaatgtcggagttatttgtcgtagggcacagaggaaatgtatttaagagaaaaacaaaggctaagggcgcatcggtttttacgcctccgcctaaaataagggtcggagctggttagtttttgaacttaaaattggcatttgcctttttgcctgcagaataaatttgttgagcatagacgggttttgcaatgccgggtgtagtgagcattgaaatagtacagaaatttggcta

SEQ ID NO: 4336 - DNA, 5429 bp, synthetic construct
  misc_feature 1..5429: note = Synthetic
  source 1..5429: mol_type = other DNA
ctatgaaaggcaaatctaaaaaatcaacctattccacaacctttggtgttgacccgaaaaatcttaaaaacagctatacttggggataaagggaagcggcgcgcaaaaagcgcgccgcagaacaagaaaaactctttcatatttgaagtgccgcatgagcgcgcagtgttcaaatttgagccactaattttgtcttgattccgaactaatgtaaatgttatagataaaatatgtcaagatctgatttttgcctatttaaattgtctttcgatatcggatattcctcaatagggtggagcgtgtttaagattgcccacggtgatgccttcccaatcttatgcggatgcggatcgctggtttttgacgacgattgctgcatggcaaaaagccgagccgcattccgccgcgcaagaaaaaatattgcttcgcgcaggaaccggataaagcgcatgcgcaaagtcttattgtcaatgggagtgatgggcccagaagaactggataatgcaaagaccgactatccgtggcttctggcgtcaagagttttgtcttgcggcaataaattatcgtggggcgagctatggagcgttttaaggtactacgcccacaacaggggatatgacggaaattcggcatgggcaaaatttgacggcgacgacggcgattccgagaaggaggcaaacgctataaagcttatgcaagagcttgggacgcggagtcaggcggagacggtatgcgcctatcttggggttgatccgagttcttccgcaaagccagctctacgcaagtatttcaaggggcaaaatgtagctttcccacggcaaatagtcatttcggaagtaggacggattatagatgcgcacataggccatcttcccggatgcgacgaaaattttaaaaaacttataatgggcaattggcgcgaagtaccgtctcccatagaaatgcctgggcgctttacttccgacagggggctgttgtttggccagtatgttccccgtttcaacaaccggataattcccaaatgcccgatagaagggaggaatgtgccaagttgccatagccgcgaatttttgaattttaggtggaagtcgcttttatcgaatatgagcttttctgagggaatagatatcgcggcagccaggaaaaatatagattccgcaatgcgcctgtacggctcatttaagaagaccacgttaaaaacaatatttaagagtctgctgggggagcttccattaaattacgagtctatgtttctgtctgaggaaatggacaaggcattgttgctcgatcctgtaagggcgcttatattaaagacaatttatccgaatatttctcattctcttccttctgccgagcttgtacaaaacctttgggacttgattcccaagtttatatttacgcaaatgtttagattgaaagagtactcgctggaagatatatatggcctgcttgaagataagaagcgtgctaggtttaggagtttattgctcgagatttttgatagttcccccaattctaaaaagacgccaagaggtgacttcgagaatgtgtttaagttgaaaatgcggataaataaaatttcgggcagggccccgtattcgaggattgcgatgaaaaaggcgtgcgcggaaattatggaaggccgcgatccgcgcgctaatgggggggccttgtatcgaaatgcggaaaacgcaagaagtgaacttttatcaaacatagacacgtggagcaacaaccaccttgtccgccatcgtctaaagatgtttaagcgcctgtacgtcgagatagtaaaccggtattgcggtggcgatttatcggcggtaaaaagcgtggcagttgaggttgtgaaggatatgggtgaattttctgggctggatccaaaagaaagggcggcaaagctaaatgatttggtgtgccaccataagagcgtgtcggaatatctggaagaaacgtatcctgagcttaaaataagcggctctatcataagaaaggcgcggatagccgacgatttggggtgggtgtgcccctacacaggccgacacttctcaccccgggagttatttgagagcgggaatatggagctcgaccatataattccgtattcgttgcgcccgtcaaattcgctggagtcgcttgtggcgacatggaaggcagtaaacgagatgaaggggcagcggtgcgcggctgaatttataaaggagtgccaggggatggaagttccgggtatgccgaatgtctcgatagtcacgccggagcgctttgaaaaatttgtgtctggtttaaaaaagccgcaacacaatgcgaggtatcctgatctaaagcgtattaagaagagaaataagcttttgctgacgttaaagtataataagcgggagggcgaatttctgcctgccgatctaacgcaaacatcgcacttaaacaagcttgcctttaaagtggtggattcgctttacgtcgattccgaggaaaagccggagctagtccatcttccggggagcgtcacaagtgtactgaggacaaactgggatttaagcgcgtgcatggcgaaagcctgccctgaaattattgttaccgtaaagagcgcggatagcgcaagcggagagcgaggcatgggaggggacggattgccgcaaggcttgaatgggagcgtgacagacactgctgcatgctgcggcggtgaagccgatgcgccgcaaagcggcggaagtagcggaggcgaaaagaaagtactgttgatgaaaggcaagatccgctcaataacgcatcttcaccatgccgtagatgcggttgccataggattggccgcggcagtatttccgcatacaaaccgattttacgagcttgtttcaaagaggaatctaaataggagcgagcgcgaggagctctatagaacgggcctgttcgtcttttccgagagaaattggcgactgaaggaattgccggcgaaacttataaatgagatatccgacagaatagccgaaggcagggtagtgaagtaccttccgcgcaaaatgtccggaatggacgtagaacagaccctctggggagttgtaaaagaagacgtcggcgggcttgtgacgatacgccaatatcactcaaaggcaaattccgccaagaggcgggaaaggaaaattgaaatagaaaagaaaattaagcttttggggtatgagcctgaaaacgttgcagagagcaagcttgcccgcaataaggccgtgattataataaaagggaattttggagttgcgctcacgactccgccaaaaataatcccgcggcacaaggtttggcaacgcctgggcaagttggcggctgaaaatggcggaaagtttccgatagtcttgcgaaagaatcaaataatagatgttgcttgcgggcgctatgcggggcggtggagaataacatctattaagaacaacgccggctatatagggatagacatgataccgcctatatatgcgagcggcgcaaagaacaggttaaaggtaaacgtaaatctaaatacgctcgtaagggacggaatgagcattaaaagcggttgccttaccggagcgtgttagcgcgcaggagataatggatttgggggcgtcataagctgcgggcggcgtgcgcaagtctgggatagtggaagagcgtagggagaatatattttgtcgtgcggcaatagcgcaatgtgcaacgcatgcattgcgtgcggtgcttgcgtgctggcaagatgttcatgtcagccatattttttgcggaaattttaggcgcaatatttgtcaatctgcaaattgcgctgcctgtggggaaagagttttgttgaatttcataaatcatggactggatagaggttattcgatatgctctaaactggtgtaagaattagttttgccgcgggcggcaaagaagagttttggttcagacggttctatacttggagtatcgctttgcatagaaacggcataagaaattgctgcaagggataatgcggtatttatgaggaagaaattatataaaccatggacactaagaaattcaaaatgggctggatgatagtagcgtttgacttgccggtaggaacaaaagaggagagaaaagccgcgggcgactttaggaagtttctcttggaagacgggtatcagatgatgcagtatagcgtgtatgtgcgtccgatggtgacattttcgcgaatgcaaaagcatatgaagcgcctgagagagcatacacctccaaacggggcgctgagggcgatatttgtaacggaaagccaatgggagaggtcttacgtagtctatggcaaaagtaggtcaccgagggctcctgaggagatgccagagcaattgcatctatggtaacttgctaatttgaagcaaattaccaagatgctattttgctctacttatatttggaatcaaggcaaaacttatgtaagacttttgttcaccgcttcggttattttgctctacttatatttggaatcaaggcaaaaccgtacactgttaattgcatggcttaggcgattttgctctacttatatttggaatcaaggcaaaaccgtatacacgggcgggctgtttatgccgcaattttgctctacttatatttggaatcaaggcaaaacgaatgtcgagctttatagcttctactttaaattttgctctacttatatttggaatcaaggcaaaacatatttctttgtgctcttttaccttttgcgattttgctctacttatatttggaatcaaggcaaaactttgaagttgcacgcataaatgcggcgacaattttgctctacttatatttggaatcaaggcaaaaccccatagtatgcgagtgcttgccgctaaaaattttgctctacttatatttggaatcaaggcaaaacaaaaatttaaaatttgtgttccagtatgaaattttgctctacttatatttggaatcaaggcaaaacggtagtggtaaacaagcctggggttgcgctattttgctctacttatatttggaatcaaggcaaaacatagtcttcgcattcagggaaagcgttgaaattttgctctacttatatttggaatcaaggcaaaaccgaggagaaactggcagaaatgcccgctaattttgctctacttatatttggaatcaaggcaaaacttaatgcggatacgattgcgcgtgccataaattttgctctacttatatttggaatcaaggcaaaataggtcctgatattgaattttgcgcggatattttatttttacatcaaaagtcgaataattttatagattactatgaagttttcgcttcctaaaaaatatccccagcttcccgatgcgccctgtgttttgagagcattatgattcctaccaaaatttagcgttgcccttaaaaatattttcgttctacgtcaaagattgtggaatggtggaaaaaaaagagggcaaagagaacga

SEQ ID NO: 4337 - DNA, 23135 bp, synthetic construct
  source 1..23135: mol_type = other DNA
  misc_feature 1..23135: note = Synthetic
atggcccgcggagatgttcctgcgcccgaccggatccaccgagtatcccgcagcgggaatgctgtcgtacctgccggacgctgcatacgcggtaacgccgctaatccttggcctggcgttcatcggcgctgcgaagctgatacggcgcggtgaatggttgattcccgtgctggccagtgcatttttcatgacgcatgtactggtcaaagcgatcggcgtcttcgccagcggcggctacggaagatttctcgtgaccatctccccgctgttggcgatctgcgccctcgccggttggaaccatctgcgcagcgcagccgaagaaagaagccgcggcgccggtggctggctcgcattcaccctgatctggctgctggtctggtgggcgatggaaaatgcttttgacgcaggccgattcgaggtcggtcgtgacgtcctgacggcgacgcgcgtggccgctgtcgtcctgattgcctcctgcgcagccatgatcgttcttcatcgcagcggacgtatgcaatttgcggcgatggggctgctcgttctcacctgcgcggtccagtggtgcatcctggtacgaccgcttggcccgcaggaggatcaactcctggtaagccgcgtggtcacctggcatgaaaagcatcagccgccggatacgccgatcctggcgaccaatccgtggttttcttactacttcaacctggtagaacatccccgcgcccacaagggcgtggccctcctggcatccatgcccgaaggcaccatcttctactgggattcaaagtacagcgaaagtgacttccaccgattgcgctatcgctcaatcaacgaaatcgacggcacagagttgctggaaaccttccgcaccctcgtcggcagacccttgaaggtggcggcatttcggatgaacaagccgcagcaagtcgcttcagaagaacttgacatgcctgtctatccgcgcgacctcgccgcggaagcgcagcccgtacgcggaatctactatctgcgacccgccgtggagtagatatcgaattaccgccagcgagttcgacgccgacggcggaagagtgccgccgctgcgacacccacgtaaacgagcgtcgccggttccggcacattcacggtggctcgatgaaccgtcgcatcgtccggcgcttcgccccgcgcctgcaataccgggagaacgccgatcaggcacgccgccatgagcactatcagccatcgaccacggcgcgcaaagcgcccccctgatgtcatcctgccgcgccctgtcatcctgaaatcccccattcagacggctgtcggcgtacagccgctgatacaagtttacaataccggcgaatctctctgcaaaatcgatttcaaaacgtccgcagacggctgcaagcaccataatccttgcatttatcaccccttatgatcgattttctactacgatgaacgtccgactccgggcgaccgagaaaaaaatctcgagtacaactaaacgccgacacgtgcggcgacattaccccttctgatgacacgttgcgacgcggaccgaaacgatgcccgacggcccgatgaaaccgattacccaagccgattcgggcactggccggatcaaccgcaacgtcacagagatcaacgcgctctgccgccgactcgtcggcctggccgtcaagctgatctggaatcggcacgacgcagaggaaatcgcccaggaagccatgaagctcgccgtgatgcagcgtatcgacatcaatgatgcccgcgccctgccgtggctcttgcgtacgacggcgaacctttgtctgaaccggcggcgcaggcgtcgacccgaaccgctggacccgtgggtcgatcgtcccgctggcgaatcacccctgcaaacggcagagcggatcgaacaactggaacggctgcggaaggcgatcgaaacgctgcctccacagcaacggacggcgctggtgctacgaacaatggagcagatggagtacgaagcgatcgcggaagcaatggaaatcaccgtcgccgctgttcgcacgcacgtgcacgcggcgcggcgaagactcgccgagtggtttgaagcgaacgaatgatacagatgacttgagtaaatcaggcaggatgatgatcggctgcgaaaaaatccgtgtacgactcgacgactggctcgatggccggctcgatgccgacgcgctcggtgaagtaaaagatcacctcgctttctgcgaggactgccgtcgcctcttcgatcgccatctgcgaatcaccatggacctgaccgccctgggccgggtcgcagaccgcatggccgacccagcttcatccgggcttcgacgagaacacacgccgatccggctcggccgcatgatcgccgccgcggccagtctgctgctggcggtcggcacgatctactacgccgcgcgccgcccgacgactctcctcccgcaggataccctcgtcgaagtccagacgcgcccgagcattccctcaatgccgacggattcgcccgccgtcgcgctgggggacctgctgctgcgacgcgtcgattcgcagcagttccgcatcgacaacgcgccgcagtgcgtggccgtaaacgtcgagaccgacaacccgaacgtgcacatcgtctggctgtacgggaagtgtgcaacatcctccggccggaccgtgcaatgataaatcacccacaattacacgtaaggagacttgatccatgttcacgaattaccttatcaccgtcgcccttcaactcacgcttcttgccattccgcttgctcaaacgacaccctcagagccaggcacaacgcgttccggccgcagcgccgcggaaccacagaccggcacgccggccgctcgaagcgatacggcccgcagcatacgcgcatttcgcttcaagcacattgatgcatacgaggcgcgaaacaacttccgggaactgattcacgacgtcttcatgtccgtcgtgccgcacaccaacaccctcctgtgccgctgcgacgatcagcaggcagctgccatcgccggcgcgatcgagctgatcgacgtcgcgggggcatcacagacgaagacctcgctgcacatctttcccatccagcatcgttcggctaccgagatgctcgagcacctgaccccggtcacggatcgcggcactgccgaggtctatgcagatgagagccggtccagtctggtcgtcgtcagccagtcggatgaagacgtcaattccatcaaggacctgctgcgcacgctcgatacgccgatgccaacggtccggcttgagttcgccgtcttcctggcggacttgaacgcgtccgatccggcagcgccgattcccgatgatctccagcccgtggcaaaggaactgtctcgcttcggccgcgtgaagctgctcggccgctgcggcaccgcatcgacccaggggcaggactatcgcgtgcgaggtctcattcagaacgtgctcgaatctgacattcgcggcacgatcctccgtgcagacgccggctcgcccgtgcagattcgtgtcgatgcccgcctgttcacctgggggcaacccgccacgaccaccgacgagaaggcctcccgcaacggctcctttgaaatctcgacgaagctggccctgccgcctggcgagttcgtcgccatcggcgccgccgcagccggtgcggccgaaggacagtcgctgatcctcgtcctccgcgcacagatttgaagccgactggcgacgttcaattggaccgtggagctggcgaatcggatcgtagcgattgaatcacgtggtacggcgcctggatgagcagctcgtctccgacggagagaatcgtgtccggcgtgggaaacaaacacccctgggccttgccccgcacacgatgctcgatgacgcagatgccgtgatcggagattgcctggccgacccgtttacctgccagcagaccgccggaacgcaccttccagcgctgcatgacgatcaactggtcatcgagcacgaagctgccaacgatggatgactcgatcgccgagacggcaaacgccggcgcgctgatcgccgactggctcatcgccgtgtgcatgttgaagccctcgcggatcttgtccgccatgttctgatcgaacatccgcagcaccacgcgaatccccggcacgagcttccgcgcatccagagcgatctccagattcgcaaggtcgtcatccgtcgccaggatgatgctcttggcccgggcgatgttcgcatcactgaggatcgcctcgcgacgggcatcgccgatcagcaccggtgcgccgttccgccgcgcctcttcgaggaattgcccttcggcgttgcgctcgatgatcaccaccggttcaccgagctgatgcagcacgcgataagtgcggaagcccagcttgccgaatccgacgaggatgatgtgctgcgacatcgatgcggccatcatggtgcaccagctcctttcataccggcggcgatcgcccatcatcagggccaggtcaacgattccctcgatgatgaccgtcagccccaggacgggaacaatgaagaacagggcctgcaaaaatctcgactccggaaattcctccggcggttccgcgaagaccaggcaccaggtgtagtacgtcgccttgggaagcgaatgttccttctcaggttccagatattgaaatgcgagtccgccgccaaggagaatcgacgccatgagcagcatgcgtatccgcaggtgcttgaaagcggcgcgaagaaagcaccactctcgccagagacgcgattgatgcagtccacggcgagcggacgagcggaacgatgaaatgtttccgtggttcatttcgccctgacgcgccaacgacaccgccgacttcgatcgaatcctccgacgccggcggcaagatacgtcgccgcgtttccggcaacaagccgagcggccctgccaactcgcccgccgaatgtataacgcattgtattgataagacttacaaccgcaagccacatacctaacattttcctaaaaatacgcttgtcagcccgtcgataacatggcatgatacgctgggcattcgaagggaacggcctttcgagcaccgatcatcgcgaaccctacgccacgcggagatgccatcgatgtcagccaacaccagcgacggcaaacgacagcaggccctcgaccgggcccttcagcagatcgagaagacctacggcaaaggtgccatcatgcagatggatggctcggtcgccgcggccaaggatggtatcagcaccggcgccctctcgctggacctggccctcggcggcttcggcgtgccgcgcggtcgcatcgtcgaaatcttcggccccgagtccagcggcaagacgacccttgccctgaacatcgtggcttccgcccagcgggccgacggcgtcgccgcgtttgtcgacgccgagcacgccctcgaccccgcctggatgaagcgctgcggtgtcaaccctgagaccctgcttgtcagccagcccgactgcggcgaacaggccctggagatcaccgacatgctcgtgcgatccaacgcggtcgacgtcatcgtcgtggactccgtcgccgcgcttacgcccaaaagcgaactcgaaggagagatgggacagtcgtccgtcggcgttcaggcccggcttatgagccagggcatgcgcaagctcacggccgccattgccaagagccgcaccatcgtcatcttcatcaaccagatccgcgagaagatcggcgtcatgttcggcaacccggaaaccactcccggcggccgcgccctgaagttctacagctccctgcgcatcgatgtccgccgcatcgcctccatcaaggagggcgagcgcgtcatcggcagccaggtcaaggcccgcgtggtcaagaacaaggtcgccccccccttccgtgagacaaccttcgacatcatgttcgacagcggcatcagccgcgaaggcgatctgattgacctcgctgtcaagcacacgctcatcgagaagcagggcgcgtggcttcgctacggcgatatccaactcggccagggcaaggaaaacgccaaggtcttcctcaaggacaaccccgacctctgcgacgaaatccgccgcaaggtcctcgaagtcaacggcctgctcaacggacagaaaaccgcggaatcaaaaccggcagccgccaaagacgccgaggagaccagggtaaaaaaagccgaagcagcggtcgtgggtaagggtacgccggccaagggcaagcccccggtcgccggtcgtaagcccgccacggcctcacgctgacgcaccgccggcgcacaatccgcgcgctccgaatctgacgatggaagtatgcaccgcgcacgccggcatgcgccgcgcgccgatcacatcgagcatgcaattcctgccgttgcttacggcttggcgaagatacgaccggtaccgtcgtctggcacgcaacacccgcgaccgtgtatcatgcacgaatcaaggagtatcttggctgcgccccatcatcgaggatcaccatgacacgacgccgaccgtccatgcacacattcatctgcgtcatctcgctggcggccgtcgtcttcgcctcccatccgaccacggtactctgcgccgaagccccgatctgtggtcgcctgagcgagatagacggcgttcgcgtcctgcatctgtgggggtcgtcacacgaacgcggctacgcacacggctatctcctcggcgaagacatcctgcgactcttcgacggctacctgaaggaagtccttcacgaggaggacgcgctgcgagacttcgaacaggcctcacgtactcgcctccgcgcgatgaacattccgcggcgctatgccgacgagctgcgcggcatgctcgccggcattcagacgcgactcggcgacaaggcccggcttgccgcgtttgaccggctcatcgaatacgacgaccttgtcgccatcaactgcatccccgaactgggtcgcgtgtgctgctcttccttcgctgcgtggggcgcgatgaccgccgacggcggcacgatcagcggccgcaatctcgactggcatcgcctgcgcaccctgcgcggcacacatctgatcattgcctactgcgatgacgcgccgaacgaagccaaaatctcagaacaacacggctccctcggatgggtcagcgtcacctggcccggcttcatcggctgcctcaccggaatgaatgccgacggcgtgaccgtcagcatgcacgacgcccccggccctcggcccaccgctccgctcggcttcacaccacgcggcctcgcattgcggctggccattgagtccgcccgcggctcgacagcattcgaagatgtccgcggggtgctcgcttcgcatctcgcagccgtcggaaacaacgtgcccgtcacattcccatcgatcagaggcaaggcagcagccgtcgtattcgaatacgacggagacctgaagaacaacatggggctgaccgtccgcctccccgatcgcgccggcagaaagaagtcggctgccgacgctgcgacggcattcctcacctgcacgaatcattacgtcaagcgcgcggcgccgaccgcctgcgaacggtatgctcgcatcgaccagcgcctcgcttcgctggccggaaacggcaaaccggtcgatctgccggaagcatggtcgattctccgaagcgtcgcctgtcgggtcgcccccggtcagccactcgaaacctaccacagcgtcgtcttcgagccgaaccggcgcgtcatgcatgttgccttctcatcggccgataagcccgccgccgacaatccgccgatccgccttgatgtcgctcaattgctcgaagtgcagaaagtctccgcaagtcgttagcgcggcgcctgcactggcatcgctccgcggccgccgctaatcttcccccatgctctggcagcgccttctcttcggcggtcttatgattgcggctcttctcggcctgctgcatgtcgacgaccgcctgcccgagtggctccgcacgtccgacggcggcccgcaatgggacggcgtgctcgtcgctgccgttgtcatggcactcatcgtcctcgcgacgcgagagctcgccgcgctcttccgcgccgccggtcatcgcccgctggtcgtctggccggccatgatcagcgccctcctcgtgctcgtaccgtttctccaccgcaaccggcttgctggcggcgccctgcccgccgatgcgactgccgatggccagaccgtaaccctgctggtcatcggcctcttcggcactgctgtactgatcgcatctcgaaagcaaacacaacgagccatcgcagacctctccgtctccctctggccgattctctacctcggcctgctcggtcaattcatcgtcgctttgcgcacacacccaaccggcagcgccggcctcgtgctctactatgtcgcgacggtcaaaatctgcgatatcggagcgtacttcaccgggttggccatcggccgccacaagctcatcgtctggctcagtcccaagaagacctgggagggtctcattggtggtatcatcgcctccgtcgccttcgccgtcgccatcgcatggatgatgtcgccagaaacggcaaccatgaccgcacccgcccacggtccatggccgacccccgtgaaagccgccgttttcggactgctcatggccctctgtggtcaggcaggcgacctgctggaatccctcatcaagcgggacgcacagtcaaaagactcggcccacgccataccggcctttggcggcgtgctcgatattctcgattccatcctgatcaccgctcccattgcgtacctggtgctcctaaaataaacacgaaggcggatcggtccgacgaactcctcggaaaggagcgacgcccgacttggaattggtcctcacactcgatcttccgctggatcagcgcattcagctttacggcccgcaggatcgaaacctccgcgccctccgggaggccctcggcgtaaaaatcttcgcccgcgattccaccctcaagctcgtcggcgaaagcgaagccgtcaacaagaccgcctccgtcatcgacgtgctcacggagaaacttcgccacgcctcaaacctgggcgaacacgacctgtccgacgccctcgtcgagatcgccgcacggcacgcccgccacgacagcagcgtcatccacgtcttccggcagtccgcctccatccgcccgaagacccccggtcaggaggaatacgtccgcgccatcgccgaaaacgacctgtgcttctgcctcggccctgcaggcaccggaaaaacctacctcgccgtggccatggccctgtcactgctcaaagtcggccggctcaagcgcatcgtcctcgcacggcccgccgtcgaggccggcgagaagctcggcttcctgccgggcgacatgcaggccaaggtcaacccctacctccgcccgctcttcgacgccatgcacgacatgatggagttcgagcagatcaagcgcttcatggtcaacgacgccatcgaggtcatccccctggccttcatgcgcggccgcaccctcaacaacgccgccgtcatcctcgacgaagcacagaacgccaccatccagcagatgctcatgttcctcacccgactcggtgaacacagcaagatgatcatcaccggtgacgacagccaatccgacctcggccactggtccaagagcggcctggccgacgccgtcaaacgcctccagggcctcgccggcatcagtgtcgtccggctgacacaagccgacatcgtccgtcataaactcgtcacccagatcgtccaggcctacgccgacctccccaccggccccgccaccaggaaacgccccctgtgacacgcttccggcatcccggcgcataaaaaaagcccccatcgagggggcttagcgggcagactctttcgagtttaccctgggcgctcacagggagcgttgccttacgcggacgtttgtccacttactatgaattgcgggacaagcgtcgctcagatacactaatgtcattctagatcgggcaccataattttgtcaaggggccgctcatgaacacgtttaaacacgtgcaaccttttgtattagggctcgatatcggtgtggcgtcgattggatggacgctgatcgggcttgatgattctggtaatcccgtgcgcttgcttcgaaccggtgcacacaccttcgatccaagtgtcgaaggcgacattgaaagcgggagagacgaggcacgcggcgctgcccgtcgaatggctcgaatgccgcgccgcatgttcgagcgtcggcagcgccggcgtaaaaaactcttgcgattgttacagcgatctgccctcttgccacccgggaagatcggttcgccgcaggagattcacgaatacctgcttgcgctcgacacacaacttcgcaatcgattcaatccgaagaacgaacgcgtaacttcacatgtactgccctatcgacttcgcgcagcagcattggacgggaaacttgatccttatgaactgggccgggcaatctaccatctggcccagcgacgaggattcctctccaatcgcaaatccctgaagaaggatgaagacgaaggtgtcgtccagcagggcatcaccgagttacaggcggaaatgaacaccaccggcgctcgtacactgggcgagtatttcgccagtctcgacccggaactcgagcgcatccggcgacgatggacggcgcgatccatgtacgtcgatgagttcaaccaaatatggactgcgcaaggaacgcatcatcctgaaatattgactgacgcgctgcggaagcaagtctatcgagcgatctttttccagcgcccgctcaagtcggcgcggcacctgatcggtcgctgcgaactcgtccccaatgcgcgacgcgcggcgctggcggaccggctcgtgcagcgtttccgcatgttgcagaaggtcaatgatttggaaatcattccgcacgacgccccgaagcgtcggctgaccgatgtcgaacgcgccaagctcctcgatgctctcaacaaaaacggcgacctcactttttccaggatcaagtcgaaggcggtcctcgagttacccaaggcgactacctttaatttcgagcagcgcgacgaggaaaagaagctccccggtcatcgcacggacgaaaaaatgcgcgccgtgttcggcgaccggtgggacgctatggaagacgaggagcgcgatgccgtcgttcttgaagtcctgagcttccagaacccggacgcgctggcccgccgtgccgtcaaggcgtgggggctcgatgaaaaggccgccagattgctggccgatacccgtctcgaacagggctacgcttcgcacagtcggagcgccctgaagaagctcgtcgcgaaaatggaaaacggcacgccgtatgcaacagcacgccgggaattattcccggagagcttcaaggcggtcgagccaacggacagactcccgccggtctacaaggcgatgggagcgattcgcaatccggccgttgagcgcgcattgaccgagttgcgtaaactcgtgaacgagatcatccgtgtccacggtaagcccgagtgcatccgcatcgaactcgctcgcgacctcaagcgcgcccgcaaggaacgcgaacgcaagagcagggaaatcgccgaacagacgaaactgcgcgaccaggccaaggcgaagattctcagggatatgaacatcgctgaaccgagacgctccgacgtggagaaagtcttgcttgccgaggagtgcggctggcagtgcccctacaccggccgtcaaatctccatgcgcgcgctcttcggcgaacatccgcaattcgacatcgagcacatcattcccttcagccgatcgctcgacaacagtttcctgaacaagacgctctgccaccaccaggaaaaccgcgaccacaagcgcaatcgaacacccttcgaggcctacggccgcgatgagaaacgatacgacgaaatcctggcccgtgtccgccgctttcagggaaaggccgccgatgccaagctccgccgctttgaaatgcaggaaatccccgacgatttcgtcaatcgccaattgaatgacacccgttatgcgtcccggctcgccggtgattacttggcagtcctctacggtggccgcagcgatgcgtccggcactctgcgcattcagatcagcaccggcggcatcaccgcccacctgcgaaatgaatggctgctcaacagcatcctcggacagggcgaaaagaaccgagaggaccaccgccaccacgccgtagacgccctcgccgtcgccctggcatcccccggcctcgtagcgcgactccaacgcgcggcggagagagcatccgatgagggccgccgtctcttcgcccgcgtcccggagccgtggcccggctttctggagcaggcgcgagagaaaatcatggcgattaacgtctcccgtcgacaggcgaagaaactcgccggcgacctccatgaagacacaaactacagcaaagagtacacgtggacggacgagaacgggaaaacgaaacccatccgccacgtcaagaaacgcatcgacgccatgaacgagagccaggtcgacgacatcgtagaccccgttgttcgggaaaaagtccgcgtctgggtcaaggcccaggaaggcaagagcaagaaggaaatcggcccgccacccaccatcaagacccgcgatggccgcgaaatccccatcaagtccgtgcgtatccgcaaagtcatcggcgccgtcgcggtcggcaagggtccgcgcacgcgttacgtcaaaccgggagcaaaccaccactccgtcatcgtcgccgtcctcgacaaggatggaaacgaaatcgcttgggaagactacccggtaacccggctcgaggtccaccagcgcaaggccgaagggcggccgatcattcaaaaagactgggatcctggaaaggtgttcaagttcacactgacagcgaatgacttcttactcttgaaacagagagacggagaggacctgctttgtcggctactttcattatctgaaggagcatatgaagggcgtgtccattacgacgcacggatggcgtccgaagcgagaaaaaaaggaagcgacgccagaatccgactaactgctgattccatgcgacagcgtcatgctagaaaagtacgtgtaacctatctcggcgagatcgtccccgccaatgactgatcgaatcctcgacttcgccgacggtgccgcgtacctccgcgtgcgcaacgaccagctcgtcgtcgagcgaaaagaccagcccgatgtgtcgaccccgatggccgaagtcgccgcgatcatcctcgcccacccgcaggcgacgtgctcccagccgaccatcgcccggctcatgacctgcggcggggcactcgtcgtctgcgacgattcgcacctgcccgtcggtgtgatgctgccactcgtcgcccacaccacgcagactgagcggctcgccgcccaggccgccgcgccgctccccatgcgcaagcaactctggaagcagatcgtccgccggaaaatcctcgcccaggccgacctgctccgccagcttcacgacgacgacttcggcctcgccgaactcgcccgttccgtccgatccggcgacccctccaaccgcgaagccgtcgcctcgcgccgctactggcccgccatcttcgacacccgaaacacaagaatgggtggtacctgcgtcccgctcgtcgaaccctttcgccgccgcttcgacgcccccgatgccaaccgcctgctcaattacggctatgccgtcctccgcgctgtcgtcgggcgcgccatctgcgccgccgggctgcacccctcgctgggcctgcaccaccacaatcgctacaacgccttctgcctcgccgatgatctcatggagccctatcggcctctggtcgatgccgccgtcgtggaccatgtccggtgccacggacatgacgccccgctcgaccggtccgcgaaacaggccattctcgaggccgtattgcgacgctacagggccgacggcgaagtccgcaccctcttcgacatcgtcgcacgaacggccgcttcgctggcgcgggcttacctgaagcaaagcaccctgctggattatccgaaaatgatcgaggaatgcgtgtagtccggccgcacccggccggttcgttcgggccgtccacgatgccgcgcgaccgattcgcactttcgggataccgaccggtgtggctcttcgccatgttcgatttgcccgtcaagacccaggcgcagcggaggcggtatgcgcagtttcgcaagttgcttttgaaggacggattctgtcaaatgcagtattcggtctatgcccgctactgcccgagcgaggaggcggcgcaggtccatcgggacttggttcgcgccggcctgccggatgagggacaggtgcggctcctggccgtgacggatcggcagttcgggaagatggagaattacgttggaaaaaggcgcagggaaaccgaggaagccccgaagcaactcatgcttttttgagcgccgctcgcttgctactcgctgttatgtcgccggttacgcgaggacgagtgtatctgagcgacgcttcccggcaaaccacagcgactccggtgaaggtgtcggacgcccagctagtgtatctgagcgacgcttcccggcaaaccacagccgcttctgtgcggtgctcagcttggtcagtagtgtatctgagcgacgcttcccggcaaaccacagcgaggcctcgctggcgccgcacctggatgatagtgtatctgagcgacgcttcccggcaaaccacagcttgtgcggccaatggccgcgcgcacatcgaagtgtatctgagcgacgcttcccggcaaaccacagcttgctgggcccttgaccgctcgcgcgtcgtagtgtatctgagcgacgcttcccggcaaaccacagcttcggcggcgtggcgccgcagattgagagcagtgtatctgagcgacgcttcccggcaaaccacagcgcgcgatctcgcgcttcgcatcatgggtgcagtgtatctgagcgacgcttcccggcaaaccacagcgacccgcacatcgacggcaccagcaggatgagtgtatctgagcgacgcttcccggcaaaccacagcaagaaccacgtacgccagcttggtaatcagagtgtatctgagcgacgcttcccggcaaaccacagccatgattcgcctgggcagcgcgggtgccctagtgtatctgagcgacgcttcccggcaaaccacagctgcccctgcagttcgcccatccgcttgaaaagtgtatctgagcgacgcttcccggcaaaccacagcccgtagttacactagtcgcaaccggagccaagtgtatctgagcgacgcttcccggcaaaccacagctgatccagtgggggccctacgcggtctgggagtgtatctgagcgacgcttcccggcaaaccacagccggcgcgcacgctgtggaatgcgatcaacgagtgtatctgagcgacgcttcccggcaaaccacagctgcaagtacaacccgtgctgtttttcaagtagtgtatctgagcgacgcttcccggcaaaccacagcccgcgcgtcgggctgcgcgaatggtttcggagtgtatctgagcgacgcttcccggcaaaccacagcgtcccgacggcgagctgcgcgagattcggcagtgtatctgagcgacgcttcccggcaaaccacagctcgccgtcgaggcgggcaaaggtctcggggagtgtatctgagcgacgcttcccggcaaaccacagcaaacatttttatttcatctatccctatcaaagtgtatctgagcgacgcttcccggcaaaccacagctcagcgtgagtgaggtcaccatcgaggatagtgtatctgagcgacgcttcccggcaaaccacagcgcaacgtcgacaccatcctcgcgcagtcggagtgtatctgagcgacgcttcccggcaaaccacagccggtcgatgcggacgatgcggacgatccttagtgtatctgagcgacgcttcccggcaaaccacagcaaccgataacacttcatcggcggcgcgcgagtgtatctgagcgacgcttcccggcaaaccacagcccgaatgacgagcgcgccgcattggagggaagtgtatctgagcgacgcttcccggcaaaccacagcctcgcccgcgcacgactcctcgatgccatgagtgtatctgagcgacgcttcccggcaaaccacagcggcggatgacgccgggggcggcgcgcgggcagtgtatctgagcgacgcttcccggcaaaccacagcgtatccgtcgccgagcgcggagaaatcgacagtgtatctgagcgacgcttcccggcaaaccacagcggcgcgcgccgccatcaaacgactgctctcagtgtatctgagcgacgcttcccggcaaaccacagcagataggcggcgcgtcggtcgcgctggcggagtgtatctgagcgacgcttcccggcaaaccacagcttgtgcggccattggccgcgcgcacattgaagtgtatctgagcgacgcttcccggcaaaccacagcaaacctaaaagttaccgaacgcccccccaagtgtatctgagcgacgcttcccggcaaaccacagcaccgccgcgaagagcttgtcggtcatgtcgagtgtatctgagcgacgcttcccggcaaaccacagccttggcgaccgtagcttctgcaagctttccagtgtatctgagcgacgcttcccggcaaaccacagcatcgtcgtattgcggcggtttttcgtatggagtgtatctgagcgacgcttcccggcaaaccacagcaacgaatactgggcccagcttcgatgcgttagtgtatctgagcgacgcttcccggcaaaccacagctgatcttgcggccggaacagacgagcggatagtgtatctgagcgacgcttcccggcaaaccacagcagaaaaacacccacaaccgccgcggaacaaagtgtatctgagcgacgcttcccggcaaaccacagctgggcgtgacaccgtcctccgcgcacctcgagtgtatctgagcgacgcttcccggcaaaccacagctcgagcttcgagggcgcggcaaacggatcgagtgtatctgagcgacgcttcccggcaaaccacagcccgaatgacgagcgtgccgcattggaaggaagtgtatctgagcgacgcttcccggcaaaccacagctggatgccctcattaaagagggtgtcgagtagtgtatctgagcgacgcttcccggcaaaccacagcgtattggctgaaggtaaaagaactgcagccagtgtatctgagcgacgcttcccggcaaaccacagcctggccgagatcaagccctatgagaaaaatagtgtatctgagcgacgcttcccggcaaaccacagcttgtgcggctgttggacgctcgcgcattgagtgtatctgagcgacgcttcccggcaaaccacagcctggccgagatcaagccctatgagaaaaatagtgtatctgagcgacgcttcccggcaaaccacagcagaatccaccgcatcggccagcgaagaaaaagtgtatctgagcgacgcttcccggcaaaccacagctacggccgctcgcgcgtcgtggtgcacgatagtgtatctgagcgacgcttcccggcaaaccacagccgttggatgttctgaatgggaacatccgttagtgtatctgagcgacgcttcccggcaaaccacagcgctttccgctgtcggggttcagcgctctgaagtgtatctgagcgacgcttcccggcaaaccacagcctggagccatgagcggatcgccgaacctgcagtgtatctgagcgacgcttcccggcaaaccacagcgagccgacaacgcagtgtttttcgtgtgaaagtgtatctgagcgacgcttcccggcaaaccacagcaaatggatggcgcgttcatccgtgcaaacaagtgtatctgagcgacgcttcccggcaaaccacagcacgtgcagccgccgacgtggatcaacaggtagtgtatctgagcgacgcttcccggcaaaccacagcctgcgagagttatggtcgctcgcgcgtcgtagtgtatctgagcgacgcttcccggcaaaccacagcgacgtacgcgctggaagcgcacgacgacggagtgtatctgagcgacgcttcccggaaaaatcagaagtcgctagaatcgcagggtggagggtggggcgtaatccaacgccgccctcgcgcgcacagcgagcaagacctcttccgtatgcgaacagcagtgcaatcacgattctcaatcgccgacagcgatcggctcgccgagtttcttaccgaatggtgtcccacgctccgcaggaggtgcgcccgcggagtaagacccgcgaattcccgaaaccccgcacactccagcgcgtaagcgtcctggagttcgcgcgcctcaggatttcgacgtttcgattctttggcgtttacagccgacgggtgatgcgcccgcgggtcaggtcgtacggcgaaagctccacgcggaccttgtcgcccggcaggatgcggatgaagttcttccggagccggccggagatgtgccccagcaccagatgcttcttgcccgcgagctcgaactcgcagcgaaacatcgtgttcggcagggcctgcacgacttcggcttccacttcgatcgtctcagtcttggccatacgttcctgttcggttgtgccgcgggcgcctgcaaatggcccgagcatttctatcggtcggatcgacaatacgggtcgattccggatgtcccgccaggggcgaccgcgacagacagggctgaaaaccgcgagcggctcgtccccggggtgccgggcaggccaatcatcgtacccgaaagggtgtcccccggcaacgcagccgcgccgatcggtccccggcggttgacagcaccggaggcgagacttagctttcgcgcggtcgaacggccgcgcggccgatcgtcgcggaggattcagcatcaggagtgtgtgcgatgttcaggtcagtgtctgtcaaaatggccctctgtttgatcgcggtctgcttcgtgttcggcgggtgcagctcatcgctcgtcggcacctgggagaatccggaaccaaaagccgacgccggcgatttcatcatcaacaacgccaccttcaaggacgacggcacctacgtcgccagcgcccgcaaaggggaggaatccgtccgtctggccggcacctacgaattcaacggattcaaccttaagctcaagacccccggcaagccggagcgcaactacaacgcgacctacctgatgatgggcccgaccctcgaactgcgcgacggcgagatgaagcaatcgctcaagaagaagtaaaccggcgaatgatcgagcaaagcaaaacgacccgggccgcatcggagcgacccgggtcgtgatgaatcagccgatgctgcgacctcgcgcatctccactgcgagaccgtgcggtctaatcccaatcctcctcttcctcctcggcttcgatcgccttggggcggcgctcggcctgaccctcgcaggccagacaacgccgggcaaagggcagcacttcgagccgcttgcggggaatggctcgctcacaatcaacacaaacgccgtatttgccttcgtcgatccggcggatagccgcttcgatgtcctcgagctgggccgcttcgatggcaataagccccacggccagttcatcctcaaaaccctcggacgcccgatcgctgacatccggcaagtcgcctgatttctcggccagggccgcctgcgtgttctgcaccacggagagcaggcgctgccgctggcccgccagggcatcgcgcatgctcgccacccattccggatcgagattgggcttggccggcgccgcggtcttctccggcttcggggcgatcggacgcgccgacgaactcgatcccgaaccgccgacgaccggtcgcgtccgtgccacgggcttggctttcggggcgctcttggcggccggcttcggcttggccgcggccttggaaatggccgcggacttggaggccggcttggccttcggcttcgctccgctgctcttggccggagatgccttcttcgttgcttttcggggtgttgccatcgttgtcaataccgccttgcttgctccgggtgttgtgtggttccggatcagcgccccgccgttggcccgtacaacccggaagaatggtatctccggatggccgcgtcaagcgaccgtcggccaaaagttcagacctgctccacgccgccggaaatcgtcgatgcacacggtcggcgcggccgccagcgtttcgtacaccaatcgcccgcttgttctagcgtttgcctttcttcttcggcgcggcgcccagaatggcatccttcgcggccttggctacgcggaatttcacgaccttcttcgccggaatcttgatcgcctcgcccgtggcgggatttcgacccatgcgggccttgcgattgaccagcacaagcttgcccaggccgggaagcatgaaaccgttcttggcttccttgtaggccgtggagaccagcgtgtccataaattggacgacctgagcacgggtcagttcgttcttttcggccagcagtcgaatcaacgcgctcttgctcattgcagcagccatgttcactccttcgataaaacggacacgatgccgtacaacaaacggtttcgcggccgatttcggccgcatgggcaggacaagttagcaatgtcggaccgttgaatcaatggccgatccgcaggaattcgccacaaaaacgaccgatttccccggaccggggaacggcggcaccaacgaccccatccggctcgaccccaacgcggggcacaacggacggggcggatgctgcggaaaaagacccgctggccgagccggcggatcattcttgacacggccggtaccggccccctagtttcgacggccgggagtgaaccggggtcggccaagataatcacggaaggagaagaagcgatggcgatcgaagcactgcgacagacggaactggcgggttggaaggtacggcgcggcaaggtccgcgatatctacgatctgggcgatgaacttctgatcgtcgcaacggatcggctcagcgcgttcgattgcgtgttgccgagcccgatcccgcacaagggccgggtgctgacgcttctttcgcgattctggtttcactattttgccgaccggtgccggcaccatctgatcgcggtagttgaccgcgacgtgccgcagggttttgagccgatcgccgatcagattcgcggtcgcagcatgcgatgccgcaagactgaagtcgttccgatcgagtgcgttgcgcggggctacctggcgggcagcggctggaaggagtatcagcagcgcggcacggtctgcggcatccaactgccgcccggccttcgacagtgtgatccgctgcccgagccgatcttcacaccggccacgaaggccgagaccggccacgatgagaacatctcctttgaggaggcctgtcgcattgccggccgcgaaacgatgaccgaactacgtgacaagacgttgacactctatcgcgatgcggcgcgctatgcgaagggccggggcattgtgctggcggacaccaagtttgagttcggccggacaccggatgggattctcctgatcgacgaggtgctcaccccggattcgagccggttctggcctgccgatcgctacgaacccggccgtgaccaggagagctacgacaagcagttcgtgcgcaactacttgcaggcgctgtgcgaccgcggcgaatgggacaagacagaccccgccccgtcgctgccgcaggacgtgatccaggcgacgagcggccgctacatcgaggcgtatgaacgcatcaccggcgagcactttgagacgtgacggcccgcgatccagcgcagcgcacaacgcatccttctcgcgcagactccccttcgctgaaacgcctgcttggtccggtcagcgttgcgtgtgtcggcgtcggcggcgcgatcgggtcaggcatcttcgcggcacccggtgaaagcgccaattacctgcatacgccctgggccatcctgagcgtctgggtgctggccggcatcatcacgctgctgcaaagctttgtgacggcggaactggccacgcgctttccacgggcgggtggcgagtaccagtatctcaaggaggcgtacggcgatttcgccgcattcttttttgggtggtcgttcacggtgttcatcgttggcgccggcggtgcgacgatcgcggcggccttcggcgacttcgtcgccgagctactggtcatggatcagccctgggcgccgccgagcttcggctgcggggcgatcctcgccgtttgcatgattaacgcgatcgggctgcggaccggcgcggtcacgctcaacatcctgacgctgctcaagacggcagcgctggtggccatcgcgattggggttgtggcggtggccggccggatcacctttgcaccaccgcggcaacttgccgaaagcgcaccggcggcgcggccgttcctggaggcctatctgctggctctgatgccagcgttctgggcgtacaccggagcgacggactccgccaagctggccgaagaaacgcgcgacgtgaagcgtgccctgccactggcactgatcctgaccgtgaccatcctgacgatcgtctattgtctctacaattatgccctgttgtgcgccgtcagccccgacgagatggccggacatcgcagtgtgccggcgctggtgtttcgcggcgtgacgggctacccgatcaacgacctgatcctgatcgccagcgcgttgatctgcctgggcgcgatcagcagcgtgtttctcgccaatgtccgggtcacctatgccctggcccgcgacggactgacgtttcgctttctctcaaaaatgagtagtcggcaggcgccggtcgcatccatcgccgtcggcggagcgctggcgtgtgcgttcgtgattcagcggcggttcggggagattctgcgcatctattttctcgccagcgcaattctcttcggcctgacctatctgagtctgatcatatttcggcttcgtgaccggcgcgaatgtcgcggctggcccgaaagcgtgttccgcacaccggcgggctacgttgtggctgtcgtgctgatcgtg

SEQ ID NO: 4338 - DNA, 18213 bp, synthetic construct
  source 1..18213: mol_type = other DNA
  misc_feature 1..18213: note = Synthetic
gggtgaaggttcttccgctcacgaccgccttccctgtgcgacgccgcggattctcccgtcaatgtcgcgccgcgccaattcgttcggttaagccggcgctaaggtttcttgtgaacggcgctcaatcacgggggtcgctcaatgctcccgattcctgatgcgtccagcctggattatcccgcggaacgccggtccgatagaatccgcccacatgtcgaacgaccctcaaaccaacgccgcgtccgccgaaccgggcgatccggaatacatggaagcgacccgcatgtccttcggcgaccacctggaggagctgcgcattcgcctgattctgtcgctgatcggcgtggtcgcaggcgccgtgctggggctgatcttcgcgaagtcactgatgagcctgctttgccagcccttgatcgccgtcctgatgcggcatcacctgccctcgcagcttgtgtccttgtcgccggcgtccaccttcagcgtgtacatgaagctggggctcctcagcgggctgatcctggcgatgccctgggtgctcgtgcagatctggcagttcgtcgcgtccggtctgtatccgaaggagcagcgttttgtccaacgcttcctgccggtgtcgatcgggctttttgcgctgggcgtcggcttcgtgtactggatcgtgctgccgatcgtcctgaactttttcgttacgttcaacgagagtttcgccgtcgagtttgaaggattgaccgggattcagcggcttctgatcggcgatccgcacgtcacgggcgacgacgacgcggcgaacccggattcgacggcgccgaatcccttgaatattccgatcctgccgcaggatccgccggcgccgaagcacggagacacctggctgaatcttgagactggcaggttgtgcgtgcgcgtcgggggcgagacgctgacgacacagctgtcgcccggttcaggcgacgggcgcatctcgtcccagttctccgtggatttttacacgtcgttcgtgctgatgctgatgctggcgttcggactggcgtttcagcttccgatcgccgtgttcttcctggtgtgggcggggctggtgacgacggagcaactcggacgctctcggaagatcatcatccttgtcatcttcatcatcgcagcggtgctgaccccacccgacgtcgtcagtcagatcctgctggcgatcccgatgtggggcttgttcgaggccgggctgatcttcgcaaagcgttggaaagcggtccgctgagccgcgtccgccggttcccggatctgccgcggtgcggatattgccggaacaagtttcaacaccgctttcaggcaaggggtgcgaagcggaactcctcggtccgtccggggaatatccagtccaggagcgtcgcctatcccgtcgccgcccggcgctgcgccttgatccgtgcccgcatgttcagcagctccacgacgagtgagaaccccatcgcgaagtagatgtacccgcggttgaagtgtccgcccagcccctcgacgaccagcatcacgccgatcagcagcaggaacgacagggcgagaatcttcagcgtcgggtgacgctcgatgaacgcgctgacccgaccggctgacagcatcatgactcccacggcaataaggacggcgacgatcatcaccaccacgctctgcgccatgccgacggcggtgatgaccgagtcgatcgagaataccaggtcgatcacgatgatctgggcgatcgccgcgcgaaacgacccggcgaacgcggcggcgtgctgctcatgcgtcggcccttcgaccttgtgatgaatctcccacgttgccttgccgatcaggaacaacccacccgccaggagaatcaggtctcgcccggaaaacccgtgctccaggatcgtaaacaggggccggtccagcgtggcgatccacgtaatccccagcagcaggacgatgcgcatgatcatcgcgagcgccagcccgagccgccgcgcccgctccgctatcgccggcgggagcttcccggtcaggatggcgatgaacacgatgttgtcgatcccgagaacgatctccatcgccgtcagcgtcaccagcgccacggcgttcttcgtcgtcagcagttcatccatcctgattcaactccggccccttttcgggagccggaatgaaagcggggaggcacgggtttgtccacccgcgcctcccctcagtcttccgaacttccagcgtcagcgcccgtcgcccgccggacgcatgagcgtcatgccccccgctccgccgcctgagtattcctcaagctgcggcgccagcatccggtcgatgcgcgacttgcacgccgtcaggtgcgccgccgaggcgaagtccagcttgcccgtccccaccaccttgtcgaggtccgccgccgtccgcttcagcgagtactgcaccatcgcgtgcagatccggcgacagcggcgcgcccggctgcgagcgcaccagcggctcgacgatcccgaggtattcgcgctggagcgaccggcggatgttggacaggaagggcttgtcgtccgaccacgtcccatccccggcacgtttgacgctggtcgcgtcgctccagaccgccttctcgaggcgctggatgtactcggcgacggtgaacgtgtcgctgccgttggtcttcagctccgcgtcatgaatgcgctgaagcgtcggcggaaaccagcgatcgaacaactcgctccactgcatgaccgcgatcaggttgtgcaccgggaagtcatgcgtcatgctcgcatccgctccgtcatgccaccaacgcggcggaacgaggtggttcagcaccttctcatcgaagtggaagaacccgtcggagtagatcgtctcctcgaggaactcgatcgcctgccgctgggtctgagcgtccacgacggtcagcggcggcggcgcgttcggatcgttcttgtgcgcccgggcgaagtactgtccgccggcatagcgcccgacgaagctgagaacgttcgcccgtgtgaagacgagtctcatgtacgtctgtccgaggtgataccaggactcgtcgtccttcaccgcccaggtcagcacgtcgctcatccgcttgtcgatgagggcgatctgctctttcgcccagttgatcggatccttcgcgcagtcgaagcggttgacccgcgggtccgcgccgagcatcgtgcagtcctcatcggttgcgtatgccagctccggctctgcggcgcgggacgcaatgctcgcgagcatttcggcttcgctgccgcacgcgcccggacccgtctcctcgtccgaggccttgtcggcggaattcgcgacagcgacgtccgcgggcgccccgggcgactcgccgccgcccggcgatgcgtccgcgcgatccgccttgcgctgtttcttgccgtccggggacgccggcgcggctcccggcgtcggcgcggggttcgccgatgcgccgcccgacgcgacggtggtctggaatgaaccgtcgaagggacggtagccgtattcgatcgcccagtaatcatacggaccgatcgtcggcgtgatgaagcggtggtccttcgtcaggtccgcaaagaagatcgccgggttgtagtccatcacggaccccgtcgtcgcgtcgcccttcttcgcacgctgcttgatttcatccagcgtccagatcgagctggcgataaagttgtgacgcagtccgagcgtgtgcccgacctcatgcatcacgacttccttgatgacttcgtaaaggaactggtccttcacgtcgcgcggagccgccgccagcaccgcaccggcgtactgcatctgatgcttcatgccgtccgcgtagtcgcaggtgtgcagccccagcgcgcgggcacggtgttgcgccacgtcacgcgcgttgcaggtcggctcctccttgaacttcagggtcgtccagtcatccgtcggtcggcgccactgcgggaagcgatccagaaaacgctcgacgccaacgtcggcgagcttcgacgaaaccagcgcgtccggcgtcagcgtggacatctcggtctcgaagaagcgcaccatcgagtcgtcgaaaatgatgtccgcgtcgtaaatctgcccggtgaagggattcgcccggtgcggtcccatcgcgaagcccgcccccgtcacgatccagcggaagaagctgtaacgcatgtcctcggggtcgagatccttccactcattgtcgtccgtctgctggcggacctcgatcgcgttaaggaaaccgcatttctcgtacgccttgttccactccaggatgccgtcccgcaccgcccggcggtactgcacggggaccgtcttctcgatgtagaagatgatcggctgcttcggttcgcacagcggcagcgacggatcgcgcttcaccaggtgccaccggtcgatgaaacggttgaacaagtcgcgcgagtccaccgacttcgaccagtcctggttcgcggtcaggaaatatccgatccggtcatccgccgcgcgcggctggtaatccgacgccggcagcttccagaagctgtaatgcacgcccgtcttggagtacgacccgggcggcgatccggccgaggtcgccagttccacgccgatctctacgttctccgggaacgtcttcttcttgctccacttgctcagcgccgggttgatcccgccgcctccgccgagcccgccgaaaggaccgaacccgcccgtcagccagccgatgtccgcgaagtcgctcttgagcagatcgcccaggtcgatcaccgggtcgcccgagggggacttcgtcacgatcgggaccgccacccggatgcgttccgggtaggtccgggcgaccacgtcgtccacctctttcgaactgttccggacataccgcgtctgcggctcgatcagcagaagctgcttgccttgcaccacccacttcaccacccgctggtccagcggaaacccggtgaagaacccgccgccggagacgctcgtcgatagcatgaactgctcgccgagaaacgccacgggaatctgcgccagaagcttctccggatccttctcgccgtcggagtgcatccagagcgtgaacatgcccttctgcgatgtcatgtcttttgtgatctcgttgaagtcggggtattccccccccttcgacgagccgcttccggaacccttgaccatcatttccgacacgaccgccccgatatccagattctcctcggatttcggagggtcggcccacgcgacggcgcccagtgcggccgtcagaatcaaactcagccctgctctcatgatgtgttctccttcgctgactcgccctgcgttcgggagcgcggcgacgaccgcctcccggtccgtcagatgtaagacgacgcaaccggcttccgcccggcaggacgaaaaaacctgccccgcggccccggcatgtttactccctgatacacgctcgccagcgcgcacgtcgctgcgcccggcgcaaggtctgaatgttacgacgaaccaagggcaattgcgcagcgtccgtcggtcgaaaactgtcgcatccgcgagcctatcggaagcccgtcgtctcgtcagggtcggggcgcggcgattgcgccagattccccacccgccggcggttgtcgagtcgtgacggcgctgtggcaggcttcccgccacccggactcccacccctcaagcgtcatcccctcaaacgcggaccccagcgccgcctccaccggattcccctctttcagcaggaggatgaaccgcatgaacgaccgaggatcccgcgactcaagccaacccaccagactgtgcgccacggggtactgatgcaccaggatcggaccggaaccgcgcatcaggttccgaaccggccagtcatgtcgggcgaaggcctttccgagaagcgcggcgcactccccggtgaagctgtcttcaccgagcacccgctccgtcatgagatccgcgtacccctcattgatccagccggggatcagccggctggcgtgaagacggtgcagaaaggcgtgcgaaccctcgtgaaccagcgtgcaaagaaaacgctcccagtcctcctcggtccgaccctggtagaacagcgcgacatgcacatatccgcgcgcctccaccgaccgggtgtaccccacggcattcgtttcccgataaccgtcgaacgcccgggcgaacgtcaggaaccgtcccttcgaccggaagcagaacacggggcactttcccagaaacacgatcgaagcagggtcaacctcgaattgccggcaaagtgcgtcgtacatccgctccgccgcgtccgccaacgccggccgttgcgacgtcggcaggtcggtccagatcagaaaatgcgaggtctcgacgagcgaaatctcggggctgatgacggacttgagcttcggatcgaagaacgtccggaagcgcgtcgtcaccgcctcgacctgttccggcggcgtcggccgaatgcgaagctcgtcgtccgacggcgccagcgactccagcaggtccgccatcccaagcgcaagcggaatctcggaggggtccggatcggcaggagacgcgggcgacggggcagcagcggcgcgacgatcgcgctgcgcggacatcgcctcgcgggcgcggacgtcgtacgcccgatccaggcgagccgcatcgcggaactcgttcacggcaagctgcgtctcgtcccgctccagcatccggacgccgagacggaaatgatcttccgcggtcagcccgtccgcgccccgcgtcatccgcagcagcgccttgcgaacgcggtattcgctgcctccggtctggtcccgccacgcaaagacgtgcggcgcgccgtcggcgaagacgatgacggcgtactcgtcgtgatcgacgaccttgccggtgaattcgacgccgtcagggagcgtcagggtgacttcgatcgtcgtggagacgtccgaggcgccgcgagtcgtctgaaaggcggatgccgcgccgcacacggcgagagcaaccgccgggatcacgcgtgcggcggcctcaggcggaagcggcctcaccttcagcgacctccttcagccccgcgtgccgccctttgagctgtgcgagctgcgtctgattcgcacgcacgcggaacaacaccgtcgagtcctcgtacgtccgcgacagaacatgcgcgtagcgctcgatctccgcgatcgcccgcccgtcggcgcccggaacgcggagcatcgtctcgacgactttgcccttcatcaccgtgcgcacgcgctccaccagcgcctccagcccctgccccgtcttcgcgctgatcggcagcgactccggcgaccggtgcatcagaatcttcagattcgtgtcgtctacgactgcgtccaccttgttcagcagcagcagcgacggatgctcccggcagcccagctccgccaggaccgcgttgaccgactccacctggtgcagcgcaaaaggcgaggctgcatccaccacgtgcagcagaaggtcggcgtggatcgcctcctcgagcgtggcgcggaacgacgcaacgagacggtgcggcagatcccggatgaacccgacggtgtcggacagcagaatgcgcgagccgtcgccgaggtgccaccgggtcgttttcgtatccagcgtggcgaaaagcatgtccttcgcgaactgctccgccccggtcaggcggttcagcagcgtcgtcttccccgagttggtgtacccgacgagcgagacggtgaactcatccgcacgcgctcgaatctcgcggagcttgcgccggtcgatctcttcgatttcacgcttgagctggagaatgcggtccttcaccagccgacggtcaatttcgatctggcgctcgccgggaccgcgcgttccgatcccgccgacgacgccggcgccccccccgcccgccgcgccggcgatccgctccaggtgcgtccacatcccgcgcagacgcggggcggtgtactcgagctgcgcaagctccacctgaagccgggcctcatgcgtgcgcgcccggctcgcgaaaatgtcgagaatcagctcgctgcgatccaggatcttacgctcgacaatctcctccaacccgcgaatctggcgcggagaaaggtcgttgtcgaagacgatgaccgtcgcctcggctgcgtcggcgcggtccttgatctcccgcgccttccccgtgccgacaaaaagccccggatgcggcgaaagacgcttctgcacgagggagtcaaccacctccgcgcccgccgactccgccagcgccgccagctccgccagcggattcgccggatccacgttcgcatccggcagcaagacgccgaccagcatcgcccgctcccgggtgacggagagacttccgcgcggcgtaacctgcatgctttcggtgactttgctcatgaaatgcgagccgcgagatccgccgcggacaacgctgcattctatcctcacgttcgtcccggcgtcaaacaggcggcttgttcatgaccagtgggggatcccttgcgcagccccctcgatcaacgcacgccacgcacggcctgcacgaccgaaggacccttttgaattcaatcaaggccgccgcaggcccagcgcaggcgccgcgcacgcgccaaccctctccctcagcccgcgtagcgcgcgtactccgcttcgatccgcgcccggtccgccgcgccgtaatgcacgaagacgccgtagcgccacgtcgtcgtcgcgtctttcgcgatggggaactcgctgttatacgttcggttggcgttcatgaacgcgaagggttcgtacaccgcgtaccagcgcgtcggataaccggggttgcccggatgatcgaacatcgtcatgccggcctgctcgggtttcaggaacaccggtgagcgatcgagcttgcccgtgaagtcgcaccacttcgatcgctccgccgtcacgttccagaaatactcaaactccgcgttcatccagtcccccccgtaaagcgagcggatcggccgccagcacagaccggagtaatgcccccaccgcccccaactgttgagtttccgctcctgcccgatcgccttcagctcgatcgtccagtcgatgcggtacgcccggtcgcgcggagcatgaacctcgatcgtccgccgctcttcgaggatcttctccccgtgttcgctgacccagtcgatgcgctgcccgaacgcgacgcacttgtcagagtgcggcttcacgtcgaagaggctcacatggacgcactccccgtaaggcttgctcttctccacgcgcagcgcctcgacctcccagaagttgatctcgtccacgcgcttctgcgcaaaccacaatccgaagtgccagacgtggtcatgcggacagaccagcaccaggttctcccccgcatgctccccgcagtccgccggcagcgccacgtgctcgaaatacggcttcgattgccacgtcttgaagcggtacgacgccagcagcgtctcaccgtcgaagatgcggatgcgttcgtccgtggattcagttcgcaaagtcatcactgatcgtcctgtgttccggccatcgctgcgaccgaagaagcctcgcgcctccccgtcttggttcccaatcctgcgcctccccgtcttggtcccacgcccgcgcctccccctcttggtcccacgcctgcgcctcgcggtgcaggaatgtcaacccgtagccgcacccgacccgatgccgcaggattcaggctgcataggataacagtgggcgcggcggatgcactccccgcgcaccgcgcggcctcattcctcgccgaaccacgcaccgccccgcgcaccaccccgcgcgccgaaccgtgcgccaccccgcgcgccgaaccgcgcgccgaaccgcgcaccgaaccgcgcaccgaaccgcgcggcgccccgcgcaagaaaaaagctcccgacccgaaggtgcgagagcggtgcgggctaacccctgagagtccgccctgggcgctcacctggagcgttgccgtgcgcggccgtttgaccgcttactgtgacttgcggaaaaacgtcgctcagatacactaacgataatcttacgataaagagcctcgtgttgtcaagggggtgcccatgaaatctttagcggatcgaaagccctattccctcggcttggacgtcggcgtcgcttccatcggctgggccgtgatcgaggagcccgagccgaatcgcccggcggcgctcattcgctccggggttcacgcgttcgatgaaggagtcgaaggggacatcgaatcaggccgcgacgaagcccgcggcgccgcccgacgccaggcgcgcctcccccggcggatgttctggcggcgacaaagacgcaagtacaaacttctgcgaatcttacagcgcgcccgattgctccccgacggcgtcatcggccagccccaagccatgcacgattacttgttgaaactggatgccgacctgcgcagggcgcacttggcgagcggcgatcgcatcgccgcccacctgctgccttacaagctccgcgcccgcgcgctcgatcaggctctgacgccgacggagctgggccgcgccttttaccacctcgctcagcgccgcgggttcctctccaaccgcaagtccatgaaaaaggacgaggacgagggtgtcgtcaagcagggtatcctcgaacttgctgcaaagattcaggctgccggcgcgagaacgctcggcgaatacttcgccggcctcgaccccgaggccgaacgcatccgaaagcgctggaccgcccgccagatgtacatcgatgagttcaacgcgatctggcaggcccaggcgccgcaccacccgtcgatcctgaccgaggcgtttcgtagcgagctgtatcgcgccatcttcttccagcgccccctcaaatccgccagtcacctcatcggacgctgcgaactggttccgaacgcccgccgcgccgccgtcgcagaccggctcttccagaagttcaggattctccagaacgtcaacaatcttgaagtcctcccctccgacggtcccgcccgtcctttgagtgcggaggagcgcgccaaagtcatctcggcccttacctcggaaggcgacatgacgttcgccaggctcagggggaagcagatgctcaagcttccgaagggcacagaattgaaggtgtggggccaggacgaggagaagaaactcccgggccaccgcaccgacgagaaattgcgcgaagtcttcggcgagcgatgggactctatgtccgatgacatccgcgacgcgatcgtcatcgaaatcctcagcttcgaaaaaccccaagccctcgaacgccgtgcgatcaaggcgtggaacctcgacccggccaaggccaaagaactctccgagctgcgtctggaacagggttacgccgcgcactcccgtaaggccttgagaatgctgattgatggcgacaaagagcggggtattcctgggatgcaggacggtacgcgctacgggacggctcggcgcgaactcttccccgagagcttcaagtcgtccgaaccggtggatcgcttgccgccgttgaaaaaggcgatgggcgaagtccgcaacccggctgtcgaacgcaccctcactgaactgcggaaacttgtcaacgagatcgtgcgcgtttacggaaaaccccagaccatccgcatcgaactcgcccgcgaactcaagcgtgcccgcaaggagcgtgagcgcctctcgaaagaaaacgccgccagggagaagctccgcgcaaaggctcgcgcgaggattctcgccgaagccggcgttcaggaaccgcgccgctcggacatcgaaaaggcgttgctctgggaagaatgcgaaggccagtgcccctacacgggccagtccatccccttcgcctcgctcttcggaccgtcgccgcagttcgatgttgagcacatccttcccttcagccggtccctcgacaacagcttcctcaacaaaaccctctgcgccgtagccgagaaccgcgaccgcaagcgcaacaacacgccgttcgaggcctactccagggatccgaagcggtacgaggagattctcgcccgcgtccgacggttcaagggcgacgccgccgagaagaaactgacgcgcttcgaaatgcagcagattcccgaagacttcgtctcgcgccagctcaacgacacccgccacgccgccgtcaaagccgccgattacctcgcgatgctttacggcgggcgcaccgacgccaacggacgcctgcgcgtgcaggtctccgccggcggactcaccgcccatgtccgcaacgaacttggtctcaacgccatcctcgacgacggcggccagaaaacccgcgaagaccaccgtcaccacgccgtcgacgccatcgtcgtcgcgatgctcggcccgcgccaggtgcagattctccagaccgccgccgagcgcgcctccgcccagggacgaaggctgttcgcttccgtcgaagagccctggaccggatttctcgacgacgtgcgtaaagccgtggactccatcaacgtttcctggcggcaggatcgaaaactcgccggcggcctccacgaagagaccaactacagcgccaaggaacactcgcatgcggacaagaagggtcaattgaaaccgcaccgccacgtgcgcaaacccgtggacaccatgtccgagtcgcaggtcgacgacatcgtggacccgatcatccgcgaacgcgtccgcgcctggatcgccctccgcgacgccaaaaccgacgaccccaagccgccttaccccgtctcgcacacccatgacgggcgcgaaatccctatcaagaccgtccgtatccgcaagaccatcggcgtcgaacccgtcggcatggatcagaccccggacggcccgaagcccggtccccgcacgcgctacgtcaaacccggcgccaatcaccacaccgtcatcgtcgccaccctcgacaaatacggcaatgaaacccgctgggacgactaccccgtcacacgcctcgaagcccaccgcagacacgccgccggacggcccatcatccgtaaggattggggcgagaatcgcaaggtcaagttcacgctgactcgaaacgaatacttgctggtccgggatcaggagggaggagaccgcctgattcgctgcatcagcgtgtcggagggagcgaacgagttccgactgcacaccgacgcccgatcagctaccgaggcccgaaagccgggcagcggcgcgcggatcggcctcagcggcgagaacatgagaaaacgaaacgcacgcaaggttcgcgtgacgatgctcggcgatgtgattccctgccatgactgagcgcatcatcgaccttgccgagtccgccgcgtacctgcgcgtccgcaaccgccaactcgtcatcgagcgttttccgtaccgcgaccgtcagggagcgggtttgccttcccccctccccccgggagcgggccaggcggacggcgagcctccacccagcgatgcatcgactcacgatcccgaggaggagccacgccctgtttccgcccccctctccgaagtcgccgccctcatcatcgcgcatccccaggttcaatgctcccagcccgtcctcgccggactcatgaacgccggcgccgccttcatcgtctgcgactcccgctccctccccgtcggcatgatgcttccgctcaacgccaacaccctccagtcccagcgtctcatcgcgcaagcctccgcgccgctcccgctgaagaaacagctctggaaacagatcgtccgccgcaagattctcgcccagggtgagcttctcagggagcttcgcggcggcgaccacggcctgtccgaactcgcccgcgccgtccgctccggcgacccggataaccgcgaggcggtcgccgcccgccgctactggcccgtgcttttcgacgatcccggctttcatcgtcgctttgacgcccccgacgccaaccgtctgctcaactacggatacgccgtcctccgcgccgtcatgggccgcgcgatctgcggcgcggggctgcacccgtcgctcggcctgcaccaccaccaccgcgagaatcccttctgtctcgccgacgatctgatggagcctttccgccctctgatcgacgccgccgtcgtcgagcacgtcgccgcaggccggggcacggagctggaccgcatcggcaagcagatcctcctggagacgatcctggcccgatatttcgccgacggcgaggtccgcaccctcttcgacctctgcgcccgcaccgccatttcgctggtcaagtgcctctcgaaggaaagtgaatccctcgattatccgaagaaactgggcgatgccccatcaggaccgcacccgtgagggagcaatctcgggtacgtcctttctctgagagaacgcatccgcttgggtacgccctttctccgagaggacgcatccgcttggatacgccctctctccgagaggacgcatcagagccgcgaccgtgagggagcgaaccgttgtcgcgcaggtatcctcggctcaaacgggtcggcgtgggactacgttcagcaacctcgtgaattgaaccccgcgctgccgtggcagcgggaaccgtgcaacgtctaaaaggatggatcgctcgcgtgccctcgacccaggtcgccttatccggataccgccccgtgtggctttttgcgatgttcgatctgcccgtgaagacccccgccgatcggaggcgctacgcgcagttccgaaaattgcttctcaacgacggattcagtatgatgcaatactcggtctacgcgcggtattgcgcaagcgaggagtccgccgccgtgcatcggcagcttgtccgcgacggcctgcccgatgagggacaggtccggctcctcgctgtcaccgaccgccagttcggaaaaatggagaattacattggaaaaaagcgaaagccggcggaggatcccccccgccagctcatgcttttctgacgctgtttccgccctaaccccttgcctgacagccggttacgcgacgactagtgtatctgagcgacgcttcccggcaagccacagcgcccaaaaaagtcgggctagaattccgccgagtgtatctgagcgacgcttcccggcaagccacagctgggtagagcgtgcacgtgccatgttcagtgtatctgagcgacgcttcccggcaagccacagctgatcgggcgcgaccgcgcggacctgacgcagtgtatctgagcgacgcttcccggcaagccacagccaacattcgcaagagccgtgctataatgggagtgtatctgagcgacgcttcccggcaagccacagctaagcgccgtcagcgtcaagatcatcgataagtgtatctgagcgacgcttcccggcaagccacagccacgtctcccacagacgagaacacaccgaaagtgtatctgagcgacgcttcccggcaagccacagcgcatccgcacgcgcgctgtgcccacgccgtagtgtatctgagcgacgcttcccggcaagccacagccgaaatgatcgtgacgctcaaggcgctgacagtgtatctgagcgacgcttcccggcaagccacagctcagctctcgaccatgcccggcgggaaaaagtgtatctgagcgacgcttcccggcaagccacagccgaacgcttgaagtcttgatttggcttttagtgtatctgagcgacgcttcccggcaagccacagctaaacgccggaacagtgcgctcaggaggttagtgtatctgagcgacgcttcccggcaagccacagccaggcaactccggcggcgcttcgtgatgagtgtatctgagcgacgcttcccggcaagccacagctccggttcgtttgcttcgtttctgggtttagtgtatctgagcgacgcttcccggcaagccacagctgcaatatttatttgaaaaaagctgcggaaagtgtatctgagcgacgcttcccggcaagccacagcagaagatttggtacctgacgcttcaactggagtgtatctgagcgacgcttcccggcaagccacagctccgacacggtggtcgttggcccggcgaggagtgtatctgagcgacgcttcccggcaagccacagctcgggagcgaatctggttctcgccggaatgagtgtatctgagcgacgcttcccggcaagccacagcctcctgttcgagtttcgcacggttcagttagtgtatctgagcgacgcttcccggcaagccacagctgatcttctgcgcctcgcagatggcgcatagtgtatctgagcgacgcttcccggcaagccacagcgcgaggagaagccgtgacggaagagtcttcagtgtatctgagcgacgcttcccggcaagccacagccccgcgcaggtggatgcgtgcatcgcgggcagtgtatctgagcgacgcttcccggcaagccacagctgaatggatgcgcgcgccgttccccgcgttagtgtatctgagcgacgcttcccggcaagccacagcggggcgtacatcgacagcgcccgcaccttgagtgtatctgagcgacgcttcccggcaagccacagcctccggtcgatggagtgtgcccccccgccgagtgtatctgagcgacgcttcccggcaagccacagcgtcgatccatcgctgcgatgcacggggtagtgtatctgagcgacgcttcccggcaagccacagctcatcggactcgctggtcgactcgacgaagagtgtatctgagcgacgcttcccggcaagccacagcgcgcgacctccgacgatatccgggccgtctagtgtatctgagcgacgcttcccggcaagccacagcgaacaggtgtccgcgtttgtcgctgaacggagtgtatctgagcgacgcttcccggcaagccacagcatctacgtgtggagggtttttaagcgcacgagtgtatctgagcgacgcttcccggcaagccacagctgtagagtcttgtcgcgctttccgttaagtgtatctgagcgacgcttcccggcaagccacagcgtgacggctatcatcctgccgtaaggaggtagtgtatctgagcgacgcttcccggcaagccacagccgtgccttgttgacggcccggtcgatggtagtgtatctgagcgacgcttcccggcaagccacagcgttcgggcgacgatcctaggcggactgcgcagtgtatctgagcgacgcttcccggcaagccacagctatccgccctgcgccttccacgcctcgaccagtgtatctgagcgacgcttcccggcaagccacagccgatcgacgcgactggggcgcggatcggtgagtgtatctgagcgacgcttcccggcaagccacagcaagtttgcgtcttcgggtcgcgaaccgatgagtgtatctgagcgacgcttcccggcaagccacagcgcgatcggagacgcaccccccaaggctaaaagtgtatctgagcgacgcttcccggcaagccacagcacagtttccgaactcctgtcgtagccgaaagtgtatctgagcgacgcttcccggcaagccacagcgacgtctatcggtgggcgtcgcggagggatagtgtatctgagcgacgcttcccggcaagccacagcgcgacgcgagccccgtcgccgccgccagcgagtgtatctgagcgacgcttcccggcaagccacagcatgtgcccgaaatcgtgggagatcaccgtaagtgtatctgagcgacgcttcccggcaagccacagcctcgcgatagaggtcgcgcgccgccttcatagtgtatctgagcgacgcttcccggcaagccacagcgctcgcgcggttcctggacaagccgaaagcagtgtatctgagcgacgcttcccggcaagccacagcgtggatggcaaggggacgaagaccgggcgtagtgtatctgagcgacgcttcccggcaagccacagctatccccccagcgcttccggagcctggcagtgtatctgagcgacgcttcccggcaagccacagcagtccgatgtcgtttttgcggaaaggctagagtgtatctgagcgacgcttcccggcaagccacagcgtgacgcagcgcgcgcaacaggtcgttgagagtgtatctgagcgacgcttcccggcaagccacagctcgctcccgccgccgcctgttgcaggacgaaagtgtatctgagcgacgcttcccggcaagccacagcatctccttccgggttacgccgcgtcatactagtccctgatcaagcgtgaaatcaaggccatttttgcaataaaacactcgaaatgccgtattttgcagggtaagaacacccgcgcggcgtcggccgcgctgtcctgcaaggaggcatttcgagt

SEQ ID NO: 4339 - DNA, 13226 bp, synthetic construct
  misc_feature 1..13226: note = Synthetic
  source 1..13226: mol_type = other DNA
ttttttcaagcagaagacggcatacgagatgctcaggagtctcgtgggctcggagatgtgtataagagacagtcacccgcccgcccaggtcggcacagaagtccgtcagcgaccgcaggtagtcggcggtgcggcgccggacggcctcgtccggcgtggtcaggtgcagaccgggcggcgagacgaacagccagtgcagcccgacgatctggacgcccgcgtcggcggcggccgcggcgatctggcggcggcgggccgcggagacctcattcacatcgtcgcacagcgtgaacggcgcgatctcgacgccctcgtaccccagcccggcggcgatgcggaaggtttcctcgatcgaggcgaatcccttccagggctcgttgcaggtcgccagcttcacggcggtggtctcctgccccccccgcaggccggcgaccgacgggccgacgtcgctggaccggagggcggctcgagaatgcccggcgggttcaccggtcggcagtcgggcccggcggaggcggggggctggccacggccgccgttccgggcgagggctcgccggcgggaacgacgtcgccggccacgatatcgggcggcgcgtggcgggtcttctcgctggtcagctggcggatgcggacgttggcgaaatcgacgttggacttgttgaacgtctctttctccagcacctcctggtacatcgccagggccttgtcgcgctcgtgcatgcggtaatccaggatcaccgccatctggaaccgcgccgggtacggcaggttcgggttccagtccagggcccgctggtaccactggaccgcgatgctgttgtcggtctcctcgaagtattccttgtggatctcggcgatcatgaaggccgcgtcgtcgatcttgtcgctgttggggaagcggtcgaccagctccttgaacttcgccaaagccagcttcatggtctgctggttgtacagcgccggcacgccgtggccgcccttcttcatcagcgccagaccctcctcgtagagccggtcggcctcggagaccgagtccgacgggcgcagcgtggccgcgggaacctcggcgtcggtgatgtagcggtagggcttgacgtacttgaggtcgttgagttcgcgtcgggcccagttggccttctcctcgtagccgttttcgctgtagtaggtcaccagggcccgcaggtagcgggcgtacatcgcccggtgcagcatcatctcctcgaccaggtccacctcgctgcggtccacgatccggatcggcggcaggtccacgccggtggggttctccaggtcggcggtcggaccgggtggggcttcacgcgtggggttgaccacggcgtcggtcttgcagccggcggcggcgagcagggatgccaggaccataacggtcatggcaccggtcggatggacgattcgcttcatggatgcgcctcctgcgcggggcttgacggttacctggccggaaacacgcgaccaaggtacgcaaagcccctgcgggcgtcaagacgcccccggacggaaacccgctgcggggacacgccgccgtcgccggtcgccctccccccgggagtgggccggcgcatagcgggtgcaggctgccgccttcccgtccgaccggccgggcctggccgatcgaccggctgccggccgggccgcccctttcaccactgggcctcctcgaaggggttcatcggccccttgggcagcggtttggggcgtgaccggatgatcgccgcggccaggggaacatcggcccgggtggtgatcttcaggttggtcggatccgactccaccaccgccaccgggtgccccagaccctccaccagccgggcatcgtcggtgacgtcctcctcctcgagctcgccgcgccggtcgaacgcctgcatcagcaggtcgcggcggaagacctgcggcgtctgggcctcccacagcccctggcggtccacggtccggtcgatgatcccggctccgctgacacgcttgatcgtgccgcggaggggcgccgccaggatggccgccccggtcctggccgcctcggcgaacaccgcgtcgatcatggcgtcgctgacgcacgggcgggcggcgtcatgcaccgcgaccagttcggcctcgtcccgcacggccgccagaccggcggccacggagtccacgcggcgcgcgccgccggtcacccgctgcacgcccagaagcccgaggttggccccgaacttctccttgacgtgttcctcgtcctccggagcgatgaccaggatggtctgactgacgtccggacggtggatgaacagctcgacggatcgcaggaagatcggtcgtccctcgacccgggcgaagaccttcttctcgttgccgccgaagcgctctccctttccggcggccaccacgatgaccgcgaccctgggcatggaaacctcctcccggacccgccgccgggcggtcgtgcagccgggcgccggctcagacctccgccgggaccacgaacggcggccgatacgcccggctcagcagcccggaggcctcctcgtcgtcgaggatccgctcagcctgcggatcgaagcggatcgtccggccgacccgccaggcgatgttggccaggtggcacatcgccgaggtcagatggccttcctcgatgtccgggccgagatcctcgatccggcggctgtgcatcgcgtcgatgaacaccttccagttgtcgccgtctctggcctgggcgtgcggccccggttcgcggttcttgccgaaaaagacgtcgtaaccgtcgtaacgcagcgacatgtagccttccgagccgaaaaacagcgtgccggtggcgttgtgcggcggcgatccgaagccctcgtagttcgagatccagtgccggacctcgaaggtgatcatcaggttctcccgggggtagaaaaaggcgctgatctgcgagttgggcacctgcttgtcgtcgtcgaacaggaaacgcccgcccatcgactggatctgcccgggcagccccacgcccagtccccagcgggccagatccatctcgtgcacgccctgattgccgatgtcgccgttgccgtagtcccagtgccagtgccagttgtagtggaagcggttgcgcgaaaagggccgctgcggggccgggcccagccacagatcatagtgcacccccggcggcaccggctcgtccggcgtccgcccgatggtctcgcgccatttgaagcacacgccccgggccatgtagagctttccgatcaccccgtcccgcagcatccggatcgcttcctggatggtgggcgagcatcgggcctgcgtgccgtgctggcacatccgcccgtacttgcgcgccgccttcaccagctggcggccctcccacacgttgtgcgagcagggcttctcgacgagcacgtccttgccggcctgcatcgcccagatcgccgccagcgtgtgccagtggttgggcgtggcgatgctgacggcgtcgatggacctgtcttccagcagccggcggatgtcggtgaagcgggcgaccttgcggcccgtagactcctccagctcgtcgcccctgcggttcagccagctttcgtccacgtcgcacagggccgccacctccacgccgtccagggcctcgaaaccccggatgtggctgaccccgcggcccttgacccccacgacggccacgcggacggtctgggaggcccccagccgcccggacgccggcgcggaagcctggcccgcgaccacacgcccggcgacggcactgccggccgctgccccggtaacggccagaaacctgcggcggttcatcggattcatgccagaccctcgctgcggccggtcgcggccccggcggattcggagcgggcccggcacaccgaacccccccgatgaccgccggaccggccggaactcagttataagccgcgctggatgaccgatcaagcgacatgtatcccccggcaggcatcctgcacgctgccgccgggcaggcacctgcagcgccggcccgcatccgtccggccgccatcggtgcttcaggaccccggccggcgacgggtggcccggtcgatctcccgctgatgttcgcgcttgcggagatcctcccgtttgtcgtgaagcttcttgccggtgaccagggccagctcgaccttggccagcccgcgggcgttgaagaaaatgctcagcgggatcagcgtggtgccggtctgctggagctgctgggcgagcttgcggatctcgcggctgtgcaacagcagccggcgtttgcgtcgcggctcgtggttgcggtccgcggccggggggtagcggtcgatctgacagtcgtaaagcaccacttcagccccgtggatgcggacataagcctccgagaggtcggcctgaccggcccgcaggctcttgacttcggtccccagcaggaccagcccggcctcgacggtggcgtggatgtggtaggcgtgccgggccttgcggttgaggatgcgtcggggctcaggcggtttgcggacggccataactctagagttcccagaggattgggccgatacgggacgttggacggcggtcgcatccggcccggtcggcaggcggattctatcccggtcggcgggaactgccaatcgggctgcaacctccgaaagcagcggcaggtataatcaggcgagaacatgatcagcaggcaggtcgaggccggcagcgtgcggctgacccgcaggatggaaaagcgcctggttcgccaggcgtgccgcgggtgccaggagtccgcgcgccggctggtggacgcccacaaggatcgcctgttcgccttcgtctggcgcgtgctgcgcgatcagcacgagtccgaagaggtctgccaggaggcgttcctgcgggcgttcagcgccctggagtcgttctcggcggagtatcggttcagcacatggctgttcaccatcgcctaccgcttgtgcctcaatcacatccgtcggcgcaagccctgcaccggcgaggtggacttcagcgccatctgcaccgatcagcaggacgcctccgagcgcctggccgagagcgaggaagcccgcatgctcaaggacaaggtctgggaggcggtcgaccgcctttcgaccgcgcagcgggcggcggtgatcctgttctatcgtgaggggatgagttgcgaggcgatcgcccggacgctggagatcccgatggccacggccaagagccatctgcatcgggcccgggcgcgtctgcgcgaggaactgtccggcctggtcgaggactggacgcaggtgaaggcgctcagagaggcggcctcatgatcacatgtcgacacgcacatcagctttttgaccgctacctggacggggagctctcatcgtcccttcaggcggagcttcacgcccaccagctggcctgcagctcctgccgaagcgacctggcgctgctggaggcctgcggagacgtcgtggccggcgaccggcgcgagccggttctcggcgaggcgttcaccgaacgggtcatgcaggcctaccggatgcagcagcggccggtccggcgttcctggggccgcgtgctggtgctgttcggctcgccggccgcggcggccgccagcatcgtgctggccgtgaccatgatcgccccgacggcgccccccaggaccggccgcgagggcatcaccgccggccgggaggtcgcggtttcggccgccgtacagggcatgcagattcccacgcggcagctcactgcccgcgaccgcgaggccctggcccgcacgcccaagatggaggccgccggcatcgtcgagaagctggtcggcccgctggtggagcagacctggaagtccatcgagcagacccgccgcggcgcgcggcagctggagtacctcgtccgcctcggcccgggcgccggcacggagaggctcgcggccggctcgcctccggcagaagccgggcagcccgccggcggcggcaggagcgacctgccctggtaccaggagtggaacctgctggtgccgccgctggatttcgacgcaccgcccgttccccccgcgcactccgacgtcgacgcggagttggaaaccctgtaatctgagcattcccgggacgcccgtcccgccgaagtctctgccggcagcggcgactgcaatcgcggctgccggtttggtttgcgccgccaccggtgcggggccggccagtccggcgcgaccgcccggcggcaaggggcatgccttggtgtccattcgctggaccgcccttgtgatcgcggcggccttgtcgatgccttcgacggccgattcgcagcctgccgccggcgagccggccccttcccgcacgcccgtcccggcctcgacggcggcggcggagaccaccgcggccaccgcgatcgagacgccggcgacagaagtgcccacgacgacggcgacagaggcgcccaccacggcgggcgcgacggagacggtggagacggtggagacggcgcagacggcggagacccggacggcggagacccggacggcggaagcgacgcagacgccgtgctccacctttcccggcgggctggccgcaagagtccccgccgacacgcgggtctatctggaggtccggggcttagacaggctgctggacagccgtgccggaggtctgctggccaggtttttgtacctggcggacgcggaggggtcccggacaccgccggcgtcccagccggcctggcagacgctgctggcccgcagcgtggggctgggcgaggacatcccgccgggccggttgttcaccggcgacctggccctggcggccgacagctggagcggcatcggcgacgcgatcctgctgcttcttcccgcccggccggaggcgctgaccgccgagctggaggcctggtcgccgcagggcggggggggaacgctccggcgctacgggctgcgcgacgggcaggagctggcgaccgacggcgtggccgcggtcatcggccgcaggagcagccggcaggggctctacgcccgggcgaccgccttgtgggagggcgcggcgggggaggcgctgggcgacaagccgtcctttcgcgaacgcacctccgggctcccgccggatgcgaccgctctgctgtacatcgagggcaccgagagcgtttcggccggggagctggtttcgcggcggtggccggcggactggatccggcttgccggcgtggccatcggcctgcgggccacgtccgaggcggtggacgtggacgtgaactgccggctgcaggaggccctgccgcggacgtccagggggtttcgagccgagccgttcctgagcctgccggccaccacgatcgcggccttcaactggccttgggatccgatcggggcccaccgcaggaccctgggcgatcgtgggggcgggatgctccgggctctgctggagacgctggaggccggtctggcaccgcaggacgtcgagtcggagctgctcgggcagttcctggacgatccggtggtggtgctggacgagctggcgctgccggccggcgcggggggcggcggcggtccgcagctgacgccgggcctgacgatggtcgtgcgggtgcgggaccccggggtggtcgacggcttcatgcgccggatgctgcagcacctggtcgagcggctcgacgcggcggggggcagcgcggcggtgctgcgggtgcagccggtgctcggcgaggcgcttgggctgatccgctcggtgcccgtggcgggcctgctgaccggagcggcgccgcgtgatctcctggagccgctggagctgagctacacggtccacgggcggcggctggtggtggggacgcatccgcaggcggtccgccagctggtcctggcggcggtgggccggctgccgacgatgccgccggagacggtccaggcgagcctggcccgggcggcggccgggggcacctgtcgcatgctggcggtctgccggccgtggatgctggcccaggtgctggacgcccagctggcttacatcgccacgacgcacccggaaatgttcgaggccggctggtggcggcgggtgcgggcccgccgggaggcctcgcgcgagcagctgggggttcgcggccggtcggcggaccgtgccgtcgaggtggtgcaggtgttgccggacgggccggcggccgggcggttgcagccgaaggaccggatcctggccgtggacggcatttcgctggacccctcgcggccgacgggctcgcttcgcgagctgctggccatgcgcgagagccccgacgtggtccgcctgctggtgcaacgcgaggggcgacgcacgaccgtcgaggtgcccatgccctctgccggcggggtggaggtcgccaatccgctgcagcagctgcgttctgcctcgcggctgctgcggcaggtccgctgggccggctgggtgagctggcaatcctccgagcgggaactgggcatccactgccggctggtcccggcagggggccccggggatcgacctcatccgcagaccgaccggtcggaatgatcgccttgaaccggacggcggcggctcctcctctgcgaaatgcccggcataccgggtcattctgcgccacttcacattgtttattgtcaagtaaagacttacgtgaagaactggccgaaaaggagaccaaaaaaaagacctcgctgggaggtctggggtcgctcaatgagcgttgccctgcgcgacgtaagtcacttactgtgatttgtgcggcaaacgtcgctcggatacactgaagctaagaatagcaccaattccggttttgtcaaggggagattctcatgcccgagcagccaaagatgacctacgttctgggccttgacctgggggccgagtccctcggctgggcgattctggagaccagggacggcgagccggtgcgcatcgagcggaccggcgtgcacacgttcgaggccggcgtcgagggggacatcgagtcgggcaaggatgaatcccgggcgaaggcccggcgcgacgcccgactgccgcgccgccagctctggcgacgtgcagcccgtcgccgaaaggtcctgcacatcctgcagcgtcacggcctgcttccgccgggcgaggcgcgcacgcccgaacagatccacgacctgctgttgaaactggatgccgacctgcgggcggcgtatctgccggccggagacgaggtcgccgcgcatctgctgccttatcgcctccgcgccaaagccctggacgaaaaactggagccctgggcgctggggcgggtgttctatcatctggcccagcgtcgcggttttctctccaaccgccgctcgcccgagcgcaaggacgaggacgaaggcaaggtcaaggcggcgatcggcgagctggccgcggacatgaaagcccgcggcgcgcggacgctgggggagtatctggccggactggaccccaggtgccagcgcgttcgtcgccgctggacggcccggacgatgttcctggaggagttcgatcgcatctgggccgcccaggcgcctcatcatccatgcctgacggaggagctccgcgggcaacttcgtcgcgccctgttcttccagcgccctttgaagtctcagaaggccctggtcgggcgctgcgagctgatccccgacaggaggcgcgtggccctggccctgccgatcgcccagcgcttccggctgctgcagaaggtcaacgatctgaaggtccgcgagcccgagggcacggagcgctttctgacgcctcaggagcgtgagaaactggccagggagctggacgacaaaggcgacctgaagttcgacaaagtcggcaagtgcctcggcctgccgcagggcgtcaccttcaacctccaggagggcggggaggaaaagctccccggcaaccggacctacgccaaactcaaggcggtgctgggggcccgatggggcggtctttcggccgcggaccgggagcaaatcgtcgtggagctgctcagttttcagaagcccgaggccctggcccggcgcctgatgaaggtctggaacctcgatgagccttcggccacgaagctggccgaggtccggctcgagcagggttacgcccggcactgccgcaaggccatcgcgcgtctgcttccgctgatggagtccggcgttccgtacgccaccgcccgcaaggaggtcttccccgagagcttcgccgccggcacccccgtggaccggctcccgccggtgaccgacgtgctgaaggacctgcgcaacccggccgtctgccgggcgctgaccgagctgcgcaaggtggtcaacgccatcgtccgccgatacggcaagccggagtgtatccgcatcgagctggccaacgacctcaagcgaccccgtaagcagcgcgaggaaatcagcaaacgcaaccgcggccgccagaaggaccgcgaaaaagccgccgaagccattcgaagcgccctgcccggcctggagccgcggcgggcggatatcgaaaaatggctgctggccgaagagtgcaactggcgttgcccctataccggccggtccatcaacgccgcggcgctgctgggatcgactccgcagttcgacgtcgagcacatctggccgatgagccggtcgctggacaacaccttcgccaacaagacgctctgctaccacgaggagaaccgggcccgcaagggcaaccgcacgccgctggaggcttacggctccgatccgcagcggtgggaggagattctccagagtgtgcgccgcttcaacggccccctggcctgggaaaagctccggcggttcatggccagggagatcccccaggatttcaccgaccgtcagctgcaggatacccgctacgcctgccggctggccgccgattacctcggtcggctctacggcggccgggtcgatgcacaagggaagatgcgcatcgaggtccggcccggcgggctcaccgcccacgtccgcaacgagctgatgctgcacgccattctcgacgacggcggcgccaagacccgcgccgatcaccgccaccacgccgtcgatgccctggccgtcggcctgaccagccagtcgatggttcaacagcttcagaccgccgcaggccgagccctccaggccggccgcaggctctttgccccggtcccggaaccctggaccggctttctggaggacgcccgccggtcgatcgggcagatcatcgtctcccggcgcccggaccgcaaggtggccggcaagctgcacgccgagaccttctacagcaagccgatccccggggccgacggggacgttcgccacgtccgcaaggagctgcgaaagctcacgctcggtgagatccagggcgaccggatcgtcgatccggtcatccggcggctggtccaggaaaggcaccgccagctgggcggcggcaagcccgacagcgttttcgccgacccggccagccacccggtgctgagaacccgcgacggccgggaggtgccgattcacaaggtgcgtattcgcagcaaggaaaagccctggccgatcgcttcagggtcgcgccttcgttacgtggttgccggcggcgggaccaaccaccaccttgccatagttgctcgacctggccggcgcggtcggggtgaatactgggaagaccacatcgtcagccgctatacagcccagcagcgcctggctcgcggcgagccggtgattcagaaagattggggtcctggcaggcgtctggtcatggtcctgatgcccaacgacttcatcgtcatgccggatgatcggggtgtgcaacaggtgtatcgggtgctgagcatctccgagggcgataccgaactgcgcctgcattgcgatgccaggcgcgctgaagacctgaagaaagcccgggagcgggttcgtgtgtccggcgaaaaactgagaaagctcggcggccggcgcgtggaagtgagcctgctgggggagttgatcggcgcccatgattgaccacgtgatcgacctttcggatgctccggcggcgcttcgtgtgcgcctggaacaactcgtgatcgagcgcgaaggtcagccggcggtcaccgtcccgctggcggacatcgcggtggtgatcctggcccatccgcagctgagctgcacccaggcggtgctggcgggtctggcggcccggggcgcggccctgatcgtctgcgacgatcgccgcctgccggccgggctgatgctgccgctggcgacccatttcgcccagaccgagcgcatcgccgcccaggcccgggccgcccggccggtgggcaagcgctgctggcagcaggtcgtgcgggccaagatccgggctcaggccgacctgctgatgcggctgcggggcgacgactacggcctgaccggcctggtcggggcggtgcggtccggcgatccggccaacgtcgaggctcaggcggcccggcgctactggccggcgctgttcgccgacgacaacttccgccgccggcacgaagccgaggaccagaaccggctgctgaactacgggtatgccgtgcttcgggcgatcgtgggccgggcggtctgcgccgccggcctgcatccgtcgctggggatccaccaccacaaccgctatgacgcgttctgcctggccgacgatctcatggagccctaccggacggtggtcgatgaagccgtggtggagtacaccgccgggctggggtccgacgctccgctggaccgggccgccaaacaggctctgctgggggcgctgaccgggcgctatgcttccgccggggaatcgcgcagcctgttcgactgggccgggcggacggccgcgtccctggcacggatcttcatgaaacaggacgatcggctgttttatccggggggcctgaggggtgtctcgacgtgaagtggatctctcggagtaccggccggtgtggctgtttgcgatgttcgatcttccggtggatacaccgtcggcccgcagggcctacgcccagttccgcaagcttctgttgtcggagggcttctgcatgcttcagtactccgtctacgcccggtactgccccagcgaggaagccagcgtggcctaccgcaaccgcatccgggccggactgccggaacacgggcaggtccggctgctggccgtcaccgaccggcagttcgggaagatggaggttttctttggcgcaaaacgcaaaccgaccgaggatccgccgactcaactcatgcttttctgatctccgggcgagcgcaacccctttgtgtggccgggtttacgaaacgtctagtgtatccgagcgacgcttcccggcaaaccacagccgctcctgcaggtcaaggagacgatcgaaagtgtatccgagcgacgcttcccggca

SEQ ID NO: 4340 - DNA, 12477 bp, synthetic construct
  misc_feature 1..12477: note = Synthetic
  source 1..12477: mol_type = other DNA
cccagttgtagtgcgagcggaagcgcgagtagagcgactcgcgcgagcagctcgcgagcatcgcgtgccagagcggttcgtcctcgggcttgatcggccgcagcgtcaccggcgtgccgtcgcgcagcaccgcccgccggaccagccgctcggggtaggggcggaggacgaggtgcgggtacgcctcgtcgagcgcgccgtcgggggcgcgatcgagcaccacccgggcgtcgagcgcgatcacctcgccggggctcacgagcagcgggttgatgtcgagctcggcgatctccgggtagtcggcggcgaggtaggagaggcggatgagcaccgcgacgagccggtcgagatcgaccggcggccggccccggtagccggcgaggagcggccagagccggagcttctcgagcatccggcgcgcgagccgctcgttgaggggcgggaagccgaggctgcgctcgccgagcagctcggcgccgatcccgcccatgccggccatcatcaccgtgccgaagaccgcgtcgcgcttcacgccgaggatcagctccaccccgtcgcgcgcctgcaccatccgctgcacggtcactcccgcgaggcgcgcctccggccgccgctcgcgggcgttgcgcacgatctgatcgaaggcggcggtgaccatctccgcgctgcccaggtcgagggcgacgccgccgacgtcggtcttgtgggtgatgtcgggggagtggatcttgagcaccaccgggtagccgagctcctcggcgagcgccaccgccgccgcggcgtcggccgccggccgcgcgcgcacgaccgggatcccgtaggcgtggaggagctctttcgagctctcctcggagagggtgccggcgccggcgatcgcgcgggcgacgaaggcgcgcttcgcctcggcgcggtcgaacgggagctcgatcgccacgtccttcggcgtctcgtagaggatctcgaggttgcgggcgtaggcgacgagggtcatgaaggcgcgcaccgcctgctcgggggtctggtaggcggccaccccggcctcggcgaggatgccggccccctcgcgcatcgcctggccgccgagccaggcggcgagcaccggcttcgggctcttctccgccagccgcgcgagcaccttcgcggcgccggtggggttggtcatcgcctggggggtgaggatcacgagcagcgcgtccacgccggggtcggcgagcaccgcctcgaccgccttctcgagccgccgcgagccggcgtcgccgaggacgtccaccgggttgccgtgcgaccaggcgggcgggaggcagtcgtcgagcgcggcgagcgtggcgggcgcgagcgtggcgagctcgccgccggccgcgacgagggcgtcggtcgccaccacgccggggccgccggcgttggtcacgatgccgaggcgggggccgtgcggcatccggctgcggcctaccagcgcggcgcagtcgaagacgtcgccgagatcgaagacgcgggcgatcccggtccgttcgaaggcggcgtcgtagaccgcgtcctccgaggccatcgcgccggtgtgcgaggcggcgaccgcggccgacgtcgggaagcgcccggccttgaaggcgaggatcggcttggtgcgggcgaaggcgcgtgcggcggtcatgaacgcccgcgcccggctgaccgactcgatgtagagcaggatcgagcgggtcttctcgtcctcgccgaagtagtcgatgagatcgccgaagccgacgtcgagggcgttgccgagcgagacgaagtgggagaagccgacacgctcgtcgcgcgcccagtcgagcaccgaggtgcagagcgctccggactgcgagaggaaggcgatctggccgtcgcgcggcatcgcggggccgaagctggcgttgaggttgcggcgcgggacgatcaccccgaggcagttcggcccgaggatccgcatcccggggaagcgggcgtgcgcggcgcgcacctcctgttcgagcgcccgccccgcctcgcccgtctcgcgaaagccggcggacatcacgatcaggccgaggatcccggcctcgccgcaggcggtgacggcggccggcacctgttcggccggggtgcagacgatcgcgagctcgggcacccgcggcaggctcgcgacgtcggggaagcaggggatcccgagcaccgcctcctgggtcggatggacggggtagacgacgccgggaaagccgccggtgacgaggttcgagagcaccttgccgctgacgctgttcgggttgggcgaggcgcccacgagggcgatccgcttcggatcgaagatccggccgaggttgtggacgctcatggcgcctccggtcactccgccggcggcggagcgaggtcgagggcggcggcgaggcgcggcaggagcgccgtcgcggagccctgcaggaagaggtcggtgaggggttcggtgtaggccgacggaaccgtgttgatctcgatgacggtggccccctgctcggcggcggtccaggggaggagaccggccggcagcacctcccccgaggtgccgacgacgaggatcgcatcgcagcccgcggccgcggcgaaggcgtcgctgcgcgccggctcggcgagcccttcgtcgaagaagacgatctccgggcggaggatcccgccgcagaggcggcaggtcggcggcagctcgccgagaccggagtcggcgagggcggagaccgcctcgcaggcgaggcagcggagccgccggagggtgccgtggagctcgtggacccggcggctgccggcggcgcggtggaggccgtccacgttctgggtcgcgaccgccgcgaggcgcccggcccgctcgagcgacgcgagcgcccggtgggccgggttcggcgccgctcccgcgagcgggaggtagaagatctcgttcaggaaccgccaggcggcggcggggtcgtcgaggaaggtgtccagcgcgagcgacgacgggtcgaagcgcgtccagaggccgtcttcgccgcggaacggcgggatcccgctcgccaccgagatccccgcgccggtgaacgcgagcacgcgccgcgcggtgcgcagaacggccgcggcgccggtgatcccgggttcgtccgccatcgccgccgagtctatcgccggtcgccgcgggatcggagacggctgccggatggccgcgccgcgagcgtcgtccggagcccgggagcgagcgcgaacggctatgatccgaggaccgaaaggaggtcgccgatggccaacatgaagatcgaagcgatcgaggggatcggagcggtgtacggagagaagctgcgcgcggcgggagtcagcgataccgacgcgctcctcgcggcctgcaggacgccgaagcagcggacggagctcgcggcgaaggccgggctctcggccgcgcggctgctgaagtgggcgaacatggccgacctcttccggatccacgggatcggcccggagtactccgagctgctggaggccgccggggtcgacacggtccccgagctcgcgcagcgcaaccccgcgaacctcgccgccgcgatggccgaggtgcagcaggcgaagcggctcacccgccgcgtgccccccgtcgccgaggtcacgaagtgggtggccgaggcgaagcagctgccgcgcgcgctcgagtactgagacgcagccgggggcgcgcccgcgtccgccccggcacgatgacggacgaggcccccggtcagacgggggcctcgctcgcgtgaggacggagcgtcagtcgcggtggagcagggcggcgagccgctgcagccacgactccgggcgggggcaggtgcagcgccgctcgggagggacgccggcgagagcgttctcgatatgacggccgcagcccgcccaggtgggcttgccgcagcgggaacaacgaacctgatggcacatggccgcggattctcgcacggcggaggcgccgccgtcagggccccacttcgccgagcgcccggtagtagacgacccggaagcgcggccccgccgcttcgcggaggcgctcggcgagccgctcgtggagcgcttcgtcccagttcgtccagcgggtgaagaacgcctcggcggcggccggatcgccgcgccgctggagggcgaggacctcgccgagcatcgccgccacggtctccgggtaccgctcgtagcggatcgcgaggcgggcgtcggcgtcggccgtgagcaggccgcggtcgaggaagtagttcatctgggcgagcatcatcgtctggtacggctggtcgcgccgcggcgggtgctcgagcagggtgcggaggatgccgtcggcctccaccgcccggcgctccgcggcgctcatcgtgccggcggcggcgaagcgctgcaccgcgaagagggagacgaggtcggccttgagctcctcgagcgcgtcggtccaggcgccgagcgcctggtcgagcgggcggccgtcggcggtggcgtcgaccccgaggtaatgccccacctcgtgccagagggtgcgctggtagccgcccgcgagcgcgagctcgccggcgtgcggcggggcgaccgccgcccgccaccgccgctcggcgatcgcgaacagctccgggtcggtcatgatgttgccgcgcagcaggatcagccgcccgtagcgccgggcgtagagcggatcgttcggaaggatcgaggcggtgttcgtgccgcgcgcctgcccgaagtcggcgatcacctcgtaggcccccaccgggatgtcggagcgcacccgcttgtgcggctcgtacggaagggcgtcctcgatctcctgcagcgccgccatcccgcgcgcgagccccgccgaggcctccgggtcgcgcagcagcagggagaacgaggggaacgccttgaccccgaagagggcgtcgtcgtacgtctcgtaggcgccgatctgggcgttgaggtgccggaagcgaccggtcacccaggcggcgtcgccgctctcgtagtcgttcgagaggaagtcccgcccccggttgcgcaggtagcgcgcgagctccggatcgtccgtcgcgacgaggtcggcggcgcggaagaggtggcgctgcagcgcgacgtgctcgtcggcccaggcgacggcgtacggcacggcgtagaggcgcgccgggtcgggcgcggcggcgagcgcgcggagacggtcggcgaggccggggtggagggcgtcgagaaccggatggcggccgagcgccgcgaggtcacgggcgagcgccgcggtggtcgcccggcggacggcggtccgctcgccgaggatcgcctcccgctcctccgggtgggcggcgaggaacgcctccacttcggcggcggtgatccccggcgggtagacgttcttgcccggcgtttcgggggcgacggcgaggaacggctcgcgccggttgtcgagggtcgtcgcgatcggcccctggaagagccggtagaggccgacctgacaggcgggcagctcctcgtggacgggcgcttcggcgagccacgcccgcaccgcggccgcctgcggatggcgggcgtcctcgtagaggttctggaggatctcgccggcggcgaggagctcctcgaccgccgccttctcgcccggcgtgaggcccgagaggtcgggggtgagggcgacggtcagcgtcttctcgaaaatcgcctggcacctttcgagcggccagggttccggcgggcggtcggcgccggctgccgtaccggcggcgacgataaggagcgcggcgaacggaaggaggatgacggcgttgggaagcgacatcggcgcacctcacggcccgcccgcgaccgttgccggagggagaccggccggcggggtggcggctgtccgccggagactgtctcgccgcggcggcgatccgtcaaggggaggattccgcagcggcccgcggcggcgctgtggtaaatagtcgaaccgccccggttccggtggcaaggagggttcatgaacctgttcgcctcgcgctcccgccgtctcggcctcatcccgctccttctcttgctcatcggcgcgctgccgctcttcgcggccgagccggtcgaccatgcgatggtcacccggatccggcaggaggggctccgtcgctcgcaggtgatggagaccctcaccgcgctcaccgaggaggtcgggccgcggctgaccggctcgcccggctacatcgcggcgaccgcctgggccgaggagcggttccgcggctgggggttcgagcgggtctatcaggaggagatcccgttcggagagggctggtcgttctcccgcacgagcgtccacgcgctcgcaccgttcgccgcgccgctccacgccctgccgctcgcctggtcggtcggcaccgacggccccgtgcgcggtcccgccatccgcggccggctcgcgagcgaggcggacttcgaggcgctgcgcgggaagctgcgcgggaaggtgctcttcatcgacccggagccggaggaggttcgcggcccggcggcgccgcgcgatcccgccgaggagcgcccgtatcgccgctacgacgagaaggggctcgccgacctggagacctaccggatctccggctgggggttcggcggcgactgggcaacccgggcgcgcaagcggtgggatttctccgaggcgcgcaaccggtttctcgtcgaagagggcgcgctcgcgacggtggagaagtcgacccggccgcacggcatcctctacgtggtcggcggcgggggcggcggcgtccccgggcgcagccgcggggtgccggggctggtgatggccgaagcgccgtacgggcgcgtcacccgtgccctcgacgccgggcgggaggtggagatcgagatcgacgtcgcggccaccttccaccccgaccgcgctcccgtcggcaacgtgttcgccgagatccccggcaccgaccgccgggaggagatcgtgatggcgggcgcccacctcgactcgtggcacgccggcaccggcgcgaccgacaacggcgcgggcgtcgctatcgtcatggaggcggcgcggatcctcgaggcgatcggcgtgaagccccggcgcacgatccgcttcgcgctctgggccgccgaggagcaggggctgctcggctcgcgcgcctacgcaaaggcccacctcgcctcgcggccggcgccggcggatccggaggaggcggcgctgcccgaccagctctggcgcgagacctggccgctccagctgaagcccgggcacgcgaagcactccgtctacttcaacctcgacaccggcagcggccggatccgcggcatctccgcgatggacaacgtcgccgccgccgagatcttccgggcctggctcgcgccgttcgccgacctcggcgcgacggcggtgagcctgcgcggcggcgccggcaccgaccacgcctcgttcgacggcgtcggcgtccccgctttcggcttcatccaggacggcctcgagtacatgagccgcacctggcactccgacctcgacaccctcgaacgcgcctcgcgcgaggacctgatgcaggcggccaccgtgatggcctccttcctctaccacgccgcgatgcgcgacgaaccgttcccccgcaaacccctcccggaggcgccggccaaggccaactgaaaccccggggcctcttcggccctcaggccgctgcctcttcggcgaacaacaccagctctcgcccacgcgtcactgtcaggatctgacagtggccagggcgagagttgcgtcgtcctgtgcgttcgatacgcttcaactctgatttgtgagagcggaccggagtcggcggtggatctttcaaggcttgcggaaatgcgaagcgccccgattgctcggggcgcctcggagggggcgctgggttccagcgttgcccgcgcaaaggttgcttactggaagcagtcggacaaccctcgctcagatacgcaagccggaggatagcggcacggttccggccttgtcaaccggtgagaggaggcatcatggagaccccgacacgaaggccgttcgtcctcggactcgacctgggagcgcgctccgtcggctgggcggtagttgacctccaggaaggtgagcccaccgggctccgcgccgccgggagccgatgtttcgaggcgggggtgagcgggagcatcgacgagggtcgcgacgaggcgcgtggccagcagcggcggcaggcccggcaggttcgccgccagctcgcccggcggcagctccgccgcacccagctcctgcggacgctcgtcgcgaacggtctgcttcctccactcgagggattcgactccctcgcgatccaccggtacctggcggcgttcgaccagggcctgcgaagccggcatctgtccgcggacgatcgggtgggacatcaggtcctcttctaccgcctccggacgcgggctctcgacgaggtcctcgagctgcacgacttcgggcgcgtgctctaccagttcggccagcgccgggggtttctgtccgggcgcaagaggcggatgaaggagggcgaagaggaggggctggtccggaagtcgatcgcggcgctcgctgaggagatgcaagcagcgggagcccgcacgctcggtgagtaccttgcggggctcgatccgttcacacagcgcctgagggcgagatggacggcgcgttcgatgtacgagcaggagttcgcagcgctctgggcgtcgcaggcacggttccacgacgccctgaccgacggccttcggaagaagctcgccgaggtcttcttcttccagcggccgctgaaatcccagaaaggaagggtgggcgagtgcgacctcgtgcccggccgcaagcgggcgccgctcgcctgccgggaagcgcaaaggttccgcatcctgcaggcggtgaacaaccttcgcgtcgcgcgacccggcgagagtgaggtcgagctgtctcccgacgaacgtaagcgccttctcgaagcgctcacggcgaaaggagatctcaccttcgccagggtgcggaaggtgctcggtctgccgaaagagacggagatcaacctcgagcgcggcggcgagaagcgcctcgtcggtcaccgcacggacgccaagatggcggctgcattcggtgcccgctgggaagccctcggcgagccggagcgggaccggatcgtggacgaggtcctctcgatggaagatcccgaagcgctcggccggaaagcggaaaaggtgtgggggctcgatccggccgcagccgcggtgttgcgagagaccaccttcgaaccgggctacgcggccttctcgcgcaaggcgctccgccagctcctgccggcgatggaggccggcgaggcggtcgaaaccgcgcgccgccgcctcttccccgaagccgtggccgccaggccggcgatcggctccctgccgagggtcgaagaggcactcccggcgctccggaacccggcggtcgcccgcgccctcaccgagctccgcaaggtggtcaacgcgatcgttcgcaagtggggcgtgcccgaagtcgtgcgcatcgagctggcgcgggatctgcggaactcgcgggagcggcgctaccggatggcgcgcgagaaccgggagcgggagacgagccgcgagaaggcgcgagaggagatccggcggagcaccgggatcgccgcgccgtcccgctccgatatcgagaaataccttctggcggaggagtgcggatgggagtgtccgtacacgggccgccggatcgggatgaccgagctcttcggcgagcaccccgcgttcgacatcgagcacatctggcccctctcccgcagtctcgacaacagcttcctaaacaagaccctctgcttccacgaggagaaccgcgagcgcaagcgcaaccggacgccgatggaggcctacggcaacgatacggcgaggttcgagcagatccttgcgcgggtcggtcagtttcgtggctcggcccggttcgtgaagctggcgcgtttcgccgctgacgagatcccgtcggatttcaccgagcggcagctccaggacacgagatacgccacccggatggcgatgcgctacctgggcaccctctacggcgggacggtggatgccgatggccggcgccgggtacaggccggggccggcgggctgaccgcgatcgttcgcaacgagctcgggctgaactccattctcggcgacggggggctgaagtcgcgggacgatcaccggcaccatgcggtcgacgcgctcgcgatcgccctcctcgatcccggtctggtgcagcgtctgcagcgggccgccgagcgggcgcccagccaccgccgtcgccacttcgcgccgctggatccgccctgggaaggcttcctcccggaagtccagcgggtggtggacgaggtcgtggtttcacaccgaaccggccggaagatctcgggcgccctgcacaaggagacgaactacagccgtgagatccggaccctcgacgagaacggcggcatacgctgggtacgccggcttcgccgcccggtccacctgctcaccgccaggcaggtcgagaagatcgccgaccacgcggtccgcgaggcggtgcggcggaagctcgaagaagtgggcgggaaagccgatcgcctcgaagaggatcctccggttctcgagcagcctgacggccggcgcatcccgatccggcgggtgcgggtggaggagagcgtgaacccgcggcgggtggggtccgagggccgtgagcggcacgtggaaaccgacgccaaccaccacatggcgatcttcgcccggctcgacgccgacggcgcggaggtcgcctgggaggccgaggtggtgagccagctcgaagcgcagcgccgcctgcgaagcggggagcccgtgatccggtgggagacggagcccggacggagcttcaagttcagcctcagcccgggagacacgatcgagctcgaattgaatggggttcgtcgcctcctccatgtacggtcggtctggatggaaggggagacgggccgcattgcgtgtgtgaaccttgccgacgcgcggcagatcgctgatctccgtaaagcctcttcatggttccgacccatgttgagtgggctgaggagcggtggctgccggaaggtcgaggtctcgccgctcggggaggtgttcccggccggtggctgaacggatcgtcgaggtcgccgagaccgcgtgccggatctccgtgcgcggtggactcctccggctcgacgacgaggaggggcgcgagctcgaccgggtggtcctctccgagctcgcctgcctcgtgctcggccatccgcggcttgtggtgagccatgccgcgctcggctcgatctgcgcggcgggtggaagcgtcgtggtcaccgatgagaagcgttgccccgtggcctgggtcctgccgctcggcaggcactcgacgatgggggagcggtttagggcccaggccgcggcttcggcgccgctccggaagcggctctggcaggcgatcgtgaaggcgaagatcggagcccagggacggctgctccaggagctgacgcgggacgacgccggcctacccgcactggcggccagggttcgctccggcgatcccgagaacctggaggcgcgtgcctcccagcggtactggccgcggctcttcggcgacgcccggttccgccgccggcgggacggtgaggatcagaaccggctcctgaactacggctacacggtgctccgggcgctcgtggcgcgggcgatctgcggcgcggggctccacccggggctcggcgtgcaccaccacggccggtacgacgcgatgccgctcgccgacgacctcatggagccgctgcggccgctcgtggaccgtgcggtggcgaagctggtcgcggcgcggggtccggcggtgccgatggaccgcgagacccggggcgcgctcctcgcgatcttccttgagcggtacgagagcggcggcgagagccggacgctcttcgacctgatggcccggagcgccgcgtcgctcgcgcagtcgttcgaaacggggcggccgggcctctggctgccggagctctgagcggccgatgccccggctgcgacacgccctgtccgggtaccgccacatgtggctcttcgtcatgttcgacctgccggtgaagaccagggcgcagaggcgggagtacacccgcttccgaaaccgcctggtcgcgcgggggttcgtgatgctccagctctccgtctacgcccgccactgcccgagcgacgccgccgccgccagcgagtcgcggttcgtccgggccgggctgccgccggaagggcaggtccgtctgatgtcggtcaccgaccggcagttcgcgcgaatggaggtcgcgttcggtgggaaacgcaggccggtcgaagatccgccggcccaactggccatcttctaggagggcgacgggctgcaagcgcctcgaacgaaagcgcttgcagcccgtctagcgtatctgagcgaaggttcccgaccgactccagccgaccgggtggccgtccacccggttccactagcgtatctgagcgaaggttcccgaccgactccagctgctggccatgctggtcgacgcgcggatggagcgtatc

SEQ ID NO: 4341 - DNA, 7575 bp, synthetic construct
  misc_feature 1..7575: note = Synthetic
  source 1..7575: mol_type = other DNA
agggctgcgtggccggcatgttccgcgtggccaaggacatcgaggttccgcggccgttccggcggatcagctactcggaggcaatggaccggttcggcatcgaccggccggacatgcggttcgggctggagctgcgcgacatcacggacgtcgtccgcgcctgcgacttccaggtgttttcgagcgccgtgcagtccggcggcgtcgtgaagtgcctggtggtcaaaccagcggagggggccgaccggctgactcgcaagatcaccgacggcctgacggaggaactcaaaggcatcggcgccggcgggatgccggtgacgaaggtcgtctcgggcaaccgcggcctggagttctccacgggcgtggccaagttcctccagccggtgtgcgagcccctgtgccggcaagcgggcgcgggtcccggtgattttctgttcttcggagcgggcaaacacggcgacgtctgcaaatacctgcaccacgcccgaacgcggctgatcgagatcctggagctcaagccgtccacggaatgggacctgctctgggtggtcgacttcccgatgttcgagtgggatgacacggataagcgctacttcagcacgcaccacccgttcaccgccccgcgcgacgaggacgtggcccggctgagcacggagcccgacaaggtccgggccaaggcgtacgacctggtgctcaacggcacggagatggccggcggcagcattcgtatccaccgccgcgacgtgcagcagacggtgttcaagctgctgggcatcagcgaggaagaggccaaggtcaagttccagtttctgatggaggcgctgcggttcggcgcgccgccgcacggcgggatcgcattcgggctcgaccgctgggtgatgctgtttaccggcaaggagagcctgcgcgacgtgatcgcgtatcccaagacgcagcgggcggtctgtccgctgacggaggcgcccggcccggtggctgacgagcagttgcgggatctcggcatcgatctgcgtccggaggtgcgggcccggctcgaggagaaggccgcctccgccaaacagaccgtgcatcgggcacacgatgaggaaggctagccgtcccgggcgccggcagagccgcggcgccggttgcacgactcgcccgagcatggcacaatcggtccatgcgcgtgagcatcaacggcaacgaagagacgatcaccgatggtctgactctgatcgacctgctgagacagcgcgggacggatccgcgccgcgtcgcggtcgaagtgaacaaagagctggtggttcgcgcggaatacgccgcgacccgaatcaacgagggggaccggatcgagatcgtcacttttgtgggaggcggatgatgaaggaagacggattccgggtgggaccgttcacgtttgaatcccgcctgttcgtaggcacgggcaagtatgccacccacgagctgatggctgaagctctggatgcctccggatgccaggtggtgaccgtggccatccgccgcgatgtcgtggacgaagcgggcaagccccgcaaggagaatatcctcgattttctcgatatgaagcgatatacggtgctgcccaacacggccggctgtttcaacgcggacgacgcgatccgatcggcccggctcagtcgagagctgctggagggcctggacaacccgggcgccaagtgggtgaagctggaagtgctggccgacaggaaaaccctgttgccggaccccgtcggaaccctgcaggccaccgaaaaactcgtatcgatggggttcaccgtgctggtctacaccaacgacgacccgatcctggcccgcaagctcaaagaagccggcgccgccagcgtcatgccggccggcgccccgatcggcagcggtcagggtattctcaatcccaacaacatccgcatctgcctggaatacctcaaggaaggcgatccggactacccggtgatcgtggacgccggcgtggggaccgcctccgacgtgaccatcgccctggaactgggctcggacggcgtgctgcttaataccgggatcgccggcgcgaaagacccgctgcgcatggcccgggcgatgaaagccgccgccgaggccggccgcctggcgtaccgctccggccggattcccaagagactctacgcttcggcctcgtccccgatggaaggggtgattgggaagtagggatcgagggatcaagggattgagggattgagggatcgagggaccgagggattaagggattgagggagcgaggggggagggcgcggggaagatgccgtgctcaagacccacaaggagttggtggtctggcagaaggcgtacgcactgagcctgctgatgtaccgaatcacccgtcagtttcccgaagcagaaaagttcggactgacggggcaactgcggcgggcggcggtctcggtggtgtcgaacattgcggagggatacaatcgcggctccagacgcgactacgtgcgttttcttctggtcacggctggttccctggccgagctggacacccagctcatgctggccagggatcttgaatacggaagccgtgagagagtggatgaggcactgcaactgacggtggaggtcgagcgcatgctcaaggcgttgatccgatccctccgccgcgctccgggagacgagccagaatgctgaaaccgagttcacaacccacggtggccattccgactccagaagctccgcccccccatcaccctcgccccctcgctccctcgctccctcgctcccttgatcccttggtcccttgctccctggatccctcaatccctcggtccctggatccctcaatccctcggtccctggatccctccccccttacccccctctactccaatgcctcgtcgaacccgtaacaaactgcttctgtggatcatcgtgatcgggctggcgaacttcgcggcctacaccctgatttactggtacctccagggcgacgcgagcaacggcaagttcgaggcgggagaatactacctgcgtggccacttcatccacggcagcaaaggccagctttccgagccggtctcccgggcgacctggatatacagtttcgtgcattcgatttcgatctggcccacgatcgcggccgtgttgatttcgatggccatcctcgcccggccgcacatcatcgccaccatgcgcagcgattccatgttgcgcggcagcacgtttgtcaccattttcatcacggtggtcgtgttcctgaccggggccagcacgctgtatttcatcatcaacttcgttcacgccctgctcatcatcagccgcggcgaacccttcggcgtctgacccggggcgccgccgggatcgtatgcacacgcagcgtggagcctcgtcaacccggttggccgaccgccgttcactgtgacatgcgggagaatcggcacgaagcctccgtgccgcaggtttggcgcaaaaaaacgcctcccgagggaagcgttacgtcgggcaaacccatgagagttcaccctgggcgctcacgagggagcgttgccttgcgcggacgaaagtcccttactatgggttgcgggacaagcgtcgctcagatacactattggccaagatacatcaaatcggcacccttgtcaaggaaaaaaaacatggcagcgggcaagcacgcagaacaccactctgactacatactgggccttgatttgggaaccgaatcgatcggctgggcgctcgtcgggacccagggcggtcggccgaccggcatcgtggccattggatcacacaccttcgacgcaggtgttctaggggacatcgagaagtcgccgagcgcggccaggcggagcgcccgacaggcccggcgacagatctggcgccgacaatggcggcgcaacaagctcctgcggctcctgcagcggaacgggctgttgcctccgggcgacatcagcacgcccgaggcaattcaccagtatcttcttgaatacgaccgccatctgcgggcgaaattcaaccccgagggggatcgtgtcacgttgcacgtgctcctctaccgcctgcgggcaagggccctggaccaccgattggaactcttcgaactcggtcgggcgctctatcacctggcacaacgacgaggctttctttccaaccggaagtcgcaacgatccgacgaggatgagggcaaagtcgcagcgggaatcagtgatctttcccgccgcatggcggactgccaagcacgaacgctgggggaatacttctcacggctgaaccccgaacaggaacgcgtcaggcgcctttggacctcacgccagatgtacctggacgaatttgagggcgtgtggaacgaacaggcgaaacaccattccaacgtcctggttcccgagttgaaaaggcaagtgcaccgcgcaatcttttttcagcgtcctctgaaatcccaacgtggcctgctcgggcgctgtgacttgttcccgctactgagaagggtgccggtcgcggaccggacttcccagcgattccggctgctacagaaggtcaacgatcttctcgtgctctttccggacgcgacgtcccgtccgctgggcgaagatgaacgacacacgctcctcgagcgcctggagcttgacggtgatctgaagttcagcacgatccgaggcagaaaatgtctcaacctgggagccggggtgagattcaactttgagcagggcggcgagaaatcgcttcccggccaccggaccgatgtcaaaatgcgtggcgtgttcggcgacgcatgggacaggcgttccgaagcggagagggacgcgatcgtcaacgagatcctgagctttgagcggcccgaggcgctcaagaagcgcgccatgaaggcgtggggcctggacgagtcatccgcggatcggctggccaccctgaagctggaatcgggatacgccgctcacagccgcaaggccatgcgcatcctgatcgaccggatgaaggacggaaaaccgtacgcgaccgcccggcgggaggcgtttcccgagcaattcacgtcatccgaaccctgtgacgcattgccgccgctgcgaaggaagatgggagacgttcgcaacccggcggtcgagcgatcgctgacggagctgcgcaagctggtcaacgcgatcctccgccggttcggcaagccggcgaccatccgggtggaacttgcccgagacctcaaacgggctcgtaaggaacgagagaggatcagcaaggagaacgacgcgcagcgatcgcggcgtgagcaggcgaaggctgcgatcttgaagaaggcgggaatcacggatccgtcacgaccggacatcaccaagtggttgctggccgaggagtgtgggtggcaatgcccgtatacgggcaaaccgatcgactgggcgagtctgttcggctccaatctgcagtttgacgtggagcacatcctcccgctgtcgcgatcgctggatgacagcttcatgaacaagacgctgtgctaccacgaggagaaccgcagccgcaagagaaaccacacgccgtgggaggcttatggcgctgacgaaacccgctttcgggagattcttgagcgagtcggtcggtttcaagggcgcgcggcccggctcaagcgggaacgctttgagatgaaggaaatccccgaagatttcccgagtcggaagctgaatgacacgcgctatgcgtcgcgacttgcggccagatacctgagcctgctctacggcgggcgagtggacagcgccgggactcagcgcattcaggtcagtacgggcggattgacacaccacctccgcaacgagtggatgctcaacggtattctcgacgatggaggcgagaagacgcgagaggaccatcgccaccacgccgtggacgccctcgtgattgcgctgaccgaccccgcgtccgtccagcagcttcagcgggcggccgagcgcgcgtcggccgagggaaggagactgttcgggcgcgtggacgaaccctggcgagggtttctggatcaggcgcgcgacgcaattctgcgcgtgaatgtgtcacgccgactcaccaagaaaatcgccggaacgctccatgcggagtcgctgtacagcaagccgcgccgggcgcatggcggggaacccgccgttcatctccgcaaagaactgcacaagctgtcggtggatgatctcaaacaagaacgcattgtcgaccctgtcatccgttccatcgtccggaagaagtggcaggagctcgggggcggcgatccgaagaaggtgttcgccgatccgtcgtctcacccggcgatcacgacgcgggacggacgcaggataccgatccacaaggtccggattcgagtcagcgtggtgcatcgaccggtcgcacagggcgcccgcagacggcttgtcgcacccgccccgcattggaaccaccacgccgtgatcgtcgcaaccctcgacgaccagggcaatgaaacccggtgggacgattatcccgtgacgaggctggaggtgcatgagcggaaggccagaaacatcccgatcattcagaaggagtgggaggctggacgtcggttcaaattctctctggctgccggtgaatacgtcatgatgcacgatcaggccgactcgccgcagctctgtcggttgttgagtgtctcgaagggaaggtacgaattccgcgttcattacgacgccagaaagacgcccgaggcgcgcaaacgcggaagtggcgcgcggatctttgccagcgcagaccggatgagaattcgaaaagctcgcaaagtccgtgtaacttacctgggtgagattgtgcccgccaatgactgatcgcatcatcgatttgtcagaatcgggggcgtatctgcgcgtgcggaaccgccagttgatcatcgagcgccgcgccagcggtggcgacagcggcgccggcgaacaggtgagcattcctctccgtgacgtttcctgcgtcattgtcgcgcatccgcaggttgcctgctcacagcccgttctggccgacctcatggcctgtggcggaaccttcatcgtctgcgacgactgccaccaacccatcgggctgatgctcccgctgcagaccaacaccctccaggcggaacgaatgtccgcccaggcggccgcccccgttccgctgcgcaagcggctctggaaacagatcgtgaagcggaaaatcatggggcaggcgcagttgcttcgacagttgcgcggcggggaccacggcctgtcggccatcgcccgaaccgtccgatccggcgacacggacaatcgtgaggccgttgctgcccgacgatactggcaagcgctgtttgacgaccccgcgttccgccggcgtttcgacgctccggatcgcaatcggctgctcaactacggctacgcggtgctccgggcggtcatgggccgggccgtctgcggggcgggtctgcatccgtccctgggcatacatcaccatcatcggaacaacgcgttctgcctggccgacgacctgatggagccttttcgcccgttgatcgacgccgccgtggtagcccatgtcgaggaacacgacggaagcaccgacctggaccgcccggcgaagcaggcgttgctcggagccattctcggacgttatcgagcggatggggaaacc

SEQ ID NO: 4342 - DNA, 24512 bp, synthetic construct
  misc_feature 1..24512: note = Synthetic
  source 1..24512: mol_type = other DNA
cgccatgagcaatactgcctccacctcttccctccagaccccattccacgacgcccacctcgctgccgatgcgcacatggtcgattttgccggctggcacatgccggtcaattacggctcgcaaatcgacgaacaccatgccgtgcggcgcgatgcgggcatgttcgacgtctcgcacatgcttgcgctcgatctcgaagggttcgactccaccacctggctgcgcgccctgctcgccaacgacgttgcccggctcgcccgcgcgaacgtccccggcaaggcgctctactcctgcatgctgcgcgaagacggtggcgtgatcgacgatctcatcgtctaccggttcgacgacgaacgctaccggatcgtggtcaacgcgggcactgccgtgaaagacgtggcctggatgcgcaaacacattgccagtcacggtttcaacgtgagcctcaccgagcggcgcgaccttgccatgatcgccgtgcaggggccgaaggcgcgcgaaaaaacctggctggcgctgcccggcctgaaaaccggcagtgaaacgctgcccccgttctccggcgcgcaaatcggtgacattttcattggccgcaccggctataccggcgaagacggcttcgagttgactctgcccgccgcgcaggccacgactctctggcaggcgctactgggcgccggggtgaaaccctgcggcctgggcgcgcgcgataccctgcgcctcgaagccggaatgaatctctacgggcaggacatggacgagaccgtctcgcccctcgactcgggcctcgcctggaccgtcgacacgaccgatccgtctcgcgccttcagcggacgcaccgccctcgaagcccatcctgccacccgccagttgctcgggatcgtgctcgaagaacgcggcgtgctgcgcgcccacatgccggtgtttaccgccgctggcgagggagagactaccagtggcagcttctcgcccacgctcgaaaaatccattgccttcgctcggctacccctctccaccctcgtgggcgaaaaagtcgaagtcgaaatccggggcaaacgcctgcttgcgcgcacggtcaagatgcctttcgtgcgccacggcaaaatactcatctgaaacacgcttttgacatatcactccctgcacgctgcctttttcctctttcctgccggagattcccatgagtaatgttccatccgaactgaaatacaccgacacccatgagtggatacgtttcgaagacgacggctccgtgacgatcggcatcaccgaccatgcccagaaggcgctgggcgacatcgttttcctcgaactacccgaggcgggccgcaaactggcaacaggggaaagctgcgccgtcatcgaatcggtcaaggccgcttccgacatctacgccccgctcgcgggcgaagtcgtcgccatcaaccaaggcgctgtcgacgcccccgagagcatcaatgccgatgcctacgctgcctggctcttcaagctgcgccccgctgccgatgccgacacggcaaccctgctggacgccgccgcctaccaatccacgcttgccgaagaataatcccatgtttcaatccacatccggcgcagccggatgacacggaagaggtcacacctctcccatgcccgaaatcccctcgaaaggggaggtttcaaaccggagattgttttagatgaccaccctggcagaactcattcgtcatgacgatttcgcttcccgccatctgggttcctccccggatgaaatcgcccgcctctgcgccgcaatcggcgttgccgatatcgacgagttgatcagtcaggccatgccgcaggccattcgcctgcccaggccgctggaactcgattccccccttggtgagcaacaggcgcttgcgcgactgcgcggcatcgcctcgaaggacgccccgagaaaaccgatgatcggtctcggttaccacggcacgcacaccccggcagtcatcctgcgaaatgtgctggagaatcccggctggtacaccgcctacacaccctaccagaccgaaattgcccagggccggctcgaagccctgctcaccttccagcaattggtcgtcgatctcaccgggctggatgttgccaacgcctcgctgctcgacgaagcgactgccgccgccgaggcgatgacaatggcgcgacggatatcgaaatccgcctcgaacatgttcttcgtcgacgccgattgcctgccgcaaacactcgacgtgctgcgcacccgcgcacagggcttcggcttcgagattctcaccggcaaaacggaagatgccacccggcgcgaagtcttcggcgcgctgctgcaataccccggtatggacggcgaagtgaaagacctgagcctgatcatcgccgaactcagggcaagcggagcgatcgtcgccgtcgctgccgacccgatggcgctcgtgctgctcaagagtcccggcgcgctcggcgccgacatcgccctgggttcgatgcagcgtttcggcgtcccgatgggcttcggcggcccgcatgcggcctatttcgccgcccgcttcgcccatgtccggtcgatgccgggccgcatcatcggagtctccagagactcgcgcggcaagcgcgcctaccgcatgagtctgcaaacacgcgaacagcacatccggcgcgaaaaagccaactccaacatctgcacctcgcaggcgctgctcgccaacatggccgcgttttacgccgtctggcacggcccgagcggcctgcgcgccattgccgggcgcatccaccgtctggccgccatcctgaccctggcgctgcgcgcctcggggcgtcaggtacgcgaacaggcgtttttcgacaccgtggccgtcactttgcccactgccagtctggcgaaaaacgccttcaccgcagccgccgagatgggctacgacctgcgttggctcgacgaagtcaccctcggcatcacgctggacgagaccaccacccgcgccgatctcatcgcgctgatccgcgccttcggaaccttcatcgacgaagccaaactcgacgcgctcgaccgccgcgccgaaaccctcgagttcatccccgctgcgctgttgcgcaacgacgacattctcgcccaccccgtgttcaacacccaccacaccgaacacgcgatgctgcgctacctcaagcgcctgcaaaaccgggatctcgcgctcgatcactcgatgatcccgctcggctcctgcacgatgaaactcaacgctacggcagccatgatgccgatcacctggccggaattcgccacgctccatccgttcgcaccgtctgccgaaaccgctggcataatggaaatgattcgcggactggctgcctggctttgcaagatcacgggttttcccgccgtctgcatgcagccgaattccggcgcgcagggcgaatacgccggactggccgtcatcgcgcgctaccacgccaaccgtgggcaggcgtaccgccgcatctgcctgatcccccaatcggcgcacggaaccaatccggcctccgcccagatggcaggcatgaaggtcatcacggtcgactgcaacagcgacggcgacgtcgacctcggcgatctgaaagccaaggccgccatgcacacccacgagcttgcggcgctgatgattacctacccctccacccacggcgtttttgagcaaggcatccgcgaaatctgccagatcgtccacgatcacggcgggcaggtttacctggacggcgcaaacctcaacgccctggtcggtctctcctcccccggtttcgtcggcgcggatgtcacgcacatgaatctgcacaagaccttcgccatcccgcacggcggcggagggccgggcatgggaccgatcgcgctggccgcgcatctcgtgccctttgcccccgaccacgtcttcatgccggaagacgcctcgagccgccaacgtcccaatcgcggacagggcgcggtcagcgccgccccgttcggctccgctggcatcctgccgatttcatggatgtacattgccatgatgggcggcgaaggactcagacgggcaaccgaacttgccattctcaacgccaactacatcgcccaccgtctcaagcctcattacccggtgctctacaccggcaagcacgggcgcgtggcgcacgaatgcctcctggacattcgtccgatcaaggctgccaccggcgtgagcgaaatcgacatcgccaaacggctcatggactatggctttcacgcccccaccgtctccttccccgtcgcgggcacgatgatggtcgagccgaccgaatcggaaacgctggccgagctggatcgtttcatcgaggccatgctgtccatccgcgatgaaatccgccgcgtcgaactcggcgaatggagtgcgaccgacaacccgctcaagaacgcgccccacacccaggccgacctcgtggatgactggaagcgcgcctacagccgcgaacaagcggttttcccgctcccctggattgcggaaaacaaattctggccgagtgtgaaccggatcgacgaggtctggggcgaccgcaatctgtgttgcgtattggaggaagccgacccccgctgacgtggcgttttccctttcatgtccatcaggctttcgatctggacggcgcttgcgctcgtccatctcgtcgttcttgccgcgctcctgggttggctcgtcacgaaaacccggcccgtgcagatgcccggtcttgaactggctcagggcgaaaaattgcgttgcctctcctacgctccctttcatcgtccagggcagacgccgttcgatgagaacttgcacatcccgcgccaacagatcgaagaagatttgcgcgcgctctccgcgattaccgactgtgtgcgaacctactcgaccgacaagggactggatcaagtgcccgaaatcgcccatgaactgggactcaaggtgctgctcggcgcatggatcggctacgaccaggcgcagaatgccctcgaactcgaacgcgccatcgcgcttgcctacgcataccgcgacactatacgagcgatcatcgtcggcaacgaagttctgcttcgccgcgaactcccccccaaggagatgcacgccctgctcgaatcggtacgcgcgaaaagccccgtacccatcacttatgccgacgtgtgggaattctggctcgagaacggcgatctggccgcgcatgtcgatttcgtcaccgtgcacatcctgcccttctgggaagacgatccggtcgacatcgagcgcgcgctggcccacgttgacgaagtccacgcaaaggtcggcccgatttttgccggaaaacccatcctgatcggcgaaaccggctggccgagcgccggtcggcagcgcggaaaatcgctgccctcgaaggtcaatcaagcgcgctacatccgggaattcgtgcgtcgggcgcatgactcgggctgggactacaacctcatcgaagccatcgaccagccgtggaaacggtcgctcgaaggcactgtcggcggctactggggcatgctcgacgccgataccctgcaaacaaaattttccctctccggccccgtttccgagcgcgaaaacatcaccgcgccgttgattggagtcgctgcgggcgcgctcctcgccctgctcctggccctcgtcggccgatcctcccggacagccctccggcaacagccgatgcgtcttgccgccctcgccctcacgggcgcgacgaccggcctgattgccgtcctgcacgccgaacacgcccgtctggcctacgccgacttggcccactggatcgcccttggtgcggtcgccctcgctacgctgaccacatgcgcggtcctgacgcgctggctcggcaacccgctcgcggcagccgacatcgcctggcaacggatacgaaacacagggctgcgcatcgaggccgccgatgcattgtccgcactacgcggctttattcttttcgctgccgccattgcggcattgctgctgctcacctctccgcgctaccgcgactttccaagcctgctctacctgactccggctgcgattcacggcgtcatcggctggctgcgcggcagcgatttttcccgcgccgagcgcatctgcgccaccctcatcgcggtgtgcgcaatcggacgttggttgcccgaacctgccaacccgcaagccatcggctggctatttaccgggttggttctggcgctgcccgctcttttgcgtcgccggtcatcgaaggcttgatttcccgcacgatgaatacccgtttcattgtgatgtaacatccaaggattttatacatacttaaagtgctcacctttgacgcatgcaaggaagccctgcaatgatgaaaacacacgcggaagcaaaagcaccccatgtgtcattccaaaactatgtaacaccgacaccgaacactgcagccccccagcagtatcgtgaggcaatgcagcaggcaggcgtcggcagtctggccgcgcccaaaaaacgatgggaggacacatggaaaccaggtcctatgacaatgatgggaatggcaagcaccctcgtcactgttctcgaaaatgaaaatttctcgtctgcacagcaaagtcaggcactggatgttttcaattcggccggtactaatggccgtatgatgctggtgcgcttggcccaacgccaagtgaatgacaagagcgccttgctggacaccgataaaaacggcaacaccttgctccacagtttgcatcgcattgccacccagcctttgggcgctggaaaagaatcgctggccgctgagtttaaaaaaacaaaaccagaaatcacaaataaggagttgctctacgacatcatgcgagaggcggcaaatcccggaacaatcgtccaaggctccaaaaatacttgcagtatagctgcaatacagtacatgctcgtcaaacaaaatccggccgagtatgttcgaatcatgcagagactcatttccgaagggaaagtcgagttacgaggagtgacactcgaacatgtagatggcataggacataaaagaaacagaacgctcgaaataagccccggaagcgtagagagagacaatgccaatcggccttcttcttcacggatttttcaagctgcggtaatggacttcgccaacgggatagacgattacagcaacaaaaaggatagaagcacaactcgccacaaggtattcagatcaaaatcctaccaaggtgccgataattcccaagctcaacgagcgctgatgggtttgttcggcaactttttctctctttctcgtaactttctagagctgactagtttccctcatccgtcacccatgtacgtttccatgaattgggatcgtagggttcgcagagatcccgattcttttcatgctgttgtttttgagaaagtggaaaatggtcgcgtctatttccgaaactcgtggcgagtccaggctccagacggaactgaacttcaaaaggggcctcctcgccgcctggaagacagctcgactggtttggaatcaatgcccattttagaatttcagaagcgttttataggctactttcatgacacaggtgcaagcatggactatctgctgggcctttaacaggttgctcaaaaactctgccagtacgctttttgaaaagtgacatatgaataattttaaagagcaactctacatccaccgcctgtcatcctgcgcgaagtcgcaggatccatgcggtgggtggattgcagcgacttcgcttcgctacgcactgcaatgacggtggtgcttcgccgatctgtgcgcactcacagagtttttgagcaactcgttaagatacgctacacttatccatagccacaaatatgatatgtagctaaaactaccgttcaaaacccaacgcgcaggaacagcatgtcgcaaccatcctccttcaccccggttttcaatccgatcaccggcgcgcttcgcgcgcttgccatcgacgccatccaaaaagccaactccgggcatcccggcgcgccgctcggcatggcagatatcgccgaagtgctctggcggcgcaccctgaaacataaccctgccaaccccggctggccggatcgtgaccgcttcgtcctctccaacgggcatggctccatgctcatctacgccctgctccacctcacgggctacgacctctcgatcgacgatctcaagaatttccgccagttcggctccaaaaccgccggacacccggaggtcgaccacacgcccggcgtggaaaccaccaccggcccgctcggacaaggcatcgccaacgccgtcggcttcgcgctggcggaaaaactgcttgccgccgaattcaaccgccccggccacgccatcgtcgatcacgccacctacgcattcgtaggcgacggctgcctgatggaaggcgtctcccacgaagcctgctccctcgcgggcacgctcggccttggcaagctgatcgtcttctatgatgacaatggaatttccatcgacggtcatgttgaaggctggttcaccgacgacacccccaaacgctttgaagcctacggctggcaggtcatcccggacgttcccggccacgacccccaggcgatcgagactgcccttgccgttgcgcggaaagaagcccaaagaccctcgctcatctgctgcaaaaccgtcattggcatgggttcccccaacaaggcgggcagccacgattgccacggcgcaccgttgggcgcggatgaagtcgccgccacacgagaggctatcggctggccgcatcctccgtttgaaatccccgccgacgtttacgccgcctggaatgcccaggaaaaaggaaaggcactcgaagccgactggcaacggcagttcgatgcatatcgcgccgttttccccgaacttgccgccgaattcgagcggcgcgtcattcgccgggagcttcccgccgactggtcccggattgcgacgcaggttatcgccgcctgcaaggcggacaacatcgccatccgcaaggccagtcagaacgtgattgcagccctccttccttctctaccggaactgttcggcggctctgccgaccttgccggttccaacctaaccttcgtccagggcagccggggcgtaacggcccgcgagggcggcaactactgttactacggggtgcgcgaattcggcatgaccgccattgccaacgggctggcgctccatggcggcctgattccctacaccgccacctttctcgtcttctccgactacgccaggaacgccatccggatggccgcgctcatgcgtcagcggcagattatggtctacacccacgactccatcggtctcggcgaagacggccccacgcaccaacccatcgaacacatccccagtctgcggctgattcccaacctcgatgtctggcggccgagcgatgccatggagacggcggttgcatgggttgccggtatcgaacgcgcggacggccccaccctgcttgccctctcccgacagaatctacctgctgttacgggcaatattgacgcggacgacatcagaaaaggcggttatatccttgctgatgcggacgttggaaccccccaggtcgtactcatcgccaccggctccgaagtcaaactggcgctcgacgccaaggccgtgctggaaaaggacggcatccccacccgcgtcgtctccatgccctccaccaacgtcttcgaccgccaaagcctggaataccggctcgaagtcctcgatcaacacgcccaccgcgttgccattgaagccgcacagggcgatttctggcgcaaatatgtcgggctggagggcgcagtcatcagcatcgacaccttcggcgcatcggctccggcggggaagctgttcgagcactttgggttcactgttcagcgtgtggtggatgtggtaaagagtgcggtgagcgaataaccgcagcccaaagcaataatccgatggcaaaatgaaacaacccgacaggttgccctgccgggttgctggatacgaattgcgttaaaaacgcatttcttattgtagcaacggctcaccccggttagccacaatgtagggattatgaaggaggaagacatgtctggcaagcccactgatctgctcacctttggtttcgacatcggcatagcttctgtcggctggtgcgtgcttggcaaaaaacacatcgtcgatctcggcgtgcgttgttttgatcccggcgaagacaacgacggaaagccacacaatcaaacacgtcgagcagcacgagttgcccgcaatcgtctccacatgcgccgctggcgtctaaaccaattactacgcctgttctgcgatgtaggaatcatttctcgcccggaggctcggttactcatgacgccgccacgagccaaagacgagcccgaagttggcccttggcaactccgtgcccaagggctggaacgacagcttgatcctgttgaatgggcgcgtgttctgtatcacttggtcaaacatcgaggcttcgagtttttccgcagaagtgaactcaaatcggcacagaaacaagactcatcgaaaggagaagacactagtagagtggagtcaagcgaggccacattggcagaagcggcagcggccaaagaaaaggaaaaactcaacaaggcgcttgaagcctcaagcaagcttctagaaaaatacagaaaacttaaacagaataatcatttgactgttggcgggctggctatctggttagcgcaagacaactacgctcccgatgagccacaaccagatgagcaagaccgcattcagtcattccgaaacaaagcaggaagttatcgtcatgccttccttcgtgccgcgttgcgccatgagcttaaaacgctttttactgcacaagacaagcatcaaaacccatacaccacattagagcttcctgttgatagcgaatatttgcatcagatgcttacctgctttaaagacggggtaattcccgttggcggagaatcccgttccgtagggcgaacgtttcaggaagccatcttcgatttgttcgacatgcaacatccaccgctctacgccgagcaaatacgggaaatggttggcgaatgtgagttgatagaaggccagcctcgtgcctccaaaaattccttttccgcagaacgggccacttggttggaaacactgaacaaattacgcatccgccgaaatgggaaagaggaagatttatcccagttggagcgtaactgtctacttaatctgccatacgagcattcaaaggtaacgctcaaacttgttcgggaaaccttgatggcccacaccggttttcctgcttcatggcaagaagccagtttcaatgccgccacttatcgcgccaaacctgccagcgatggcgcttggattctgattgttcctcgcggtgaagtacccatcagtctcgtcaaatgggcaaacagcaaggagcgaaaggaaaaattaagggaggcaaaaaaactactaaccggcggtttcgtcacctataaacaattacgcgaaaaacttgggctacaggattccgacagttttatttgtcgcatcaaggatacaagtattatcccgcgcagcctggaagcgagaacccaaatccggttctcatccgataacaatacgatcctcgcttctggtcattcctttcgctgcatcacaacggaaggcaaacccaaagctctgcccaaggtgacatggaggctattggcttcccttcgttcgcattccgctgcaaccatggcagactggcgcacactccttatgccattgaaagacatgcctggcgactggcaattcgagcattccatactgagtgaatacactatcaaccccgattctgaagagcgaactcctgtgcccttgcagttcgaggacgctcaagccgttgaagccgaccaaaagcttgtggaactcaaaggctggcatgcgctacggttggcattggctgaacgattcccagacaaatgggaggggatgcaaaccgcctatcaaaagcccaccagtgacgaaggggagcgtgcagcaagcgaaataaacgacatcgctactactctgactgaatgccaaaccgatcgggaaatcgagcaaaagctgagcaatctcggctacaactctgaagaaattacggctctgcaaaccataagctttaataaattccgcaatcttggtttcatggcactacgcaaaatattgccatatctggaagaagggcacgtatatagtaaggcatgtgaattagcgggtcttaagcattccgaaaaagaagctcagcgccgaactcctgaattgagaccactggagacttacgtttatccgcgatatcgccacggcaagctcaccggacatattgaaaaacgctacaaggagttgctcaaccctgtcgtagcgcgttctttcaaccaagcccgccttgttttcaactgtctcgttgccaagtacggctcaccgacatatgttcacgtcgaaacggctcgtgatctggcgcgatctaaaaagctgcgagacaaaatcgaccgagaacagaaaagcaataacaaacgcgccgaagggatcaaggaagacttgcgcaaccggcttggatgcgagccgactccaactcaaattctcaagatgcgcctttatggcgagcaaaatgggcaatgcatgtattcgggcacatcgcttgaaccattcatcgactcaatgctcaaggacaacagcggcgatgttgagattgatcacatctggcctcgctcaaagaccttcgataacagtctcgacaaccgggttctggttaaaacaggagccaaccggaacaaggactccaaaattccatacgaattttttggaggtaccaattgcgacaaacgctggcatgaatttgagcaacgagtactttcctgcaagggcataagcgccgaaaagcagcgccgtttgctggccaaaaacctggaagatgcggatgaatttcttgcaagaaaccttgttgatacgcgctacgctacacgcttgttcgccaatatgctacgggagcggatactctttgccaacgccccttcacccgaagaacttgaggccatttcaccgaatgacgatgcaaaaacccgctggaatcgctaccaacgcgcccgagtgcgtactccacaggggcgattagtagactttctgcgtggcaagtggggcttggctcatgtcaaggacaggaaaaaaagcgatctgcaccatgcgctggacgcttgcattatcgctgcctgtacgccacaggttattcaacgggtcaataactattttgcagaggaagaagcggaaccgcacaggcacatctttcgccgtaatgatgatggaagttacacgcatcgtggcacaggcgatattgtcagcagagccgaggcgcgggagcgtggccttttcttgccagctccatgggatgatgtgcacgatggaaaattccgccgcgacttgttaagtgcgctaggtcaggtctttgtctcacgccaccccaaacgcaaatctgctggtgaacttcacgacgccaatcctaaaggcattcgctacctaccggttccccttgtagatttgaccaaggacatgttgacagacaaatgcttgcagggaataactggtcgccgccgcaggaactacgaaatattgcgtgaggctttacaattagcgaatggtgatgcgcacgttgcgtttgctaatgggtatgaaattcaggaagtgagcgacaaaccaaagtttgtccgttgcattgcattaccagcatggagtctgccagatgaatatttgaaacaaaggaggagtgctctagcgaaaatcaacaaagaaaaacgtaaggagggttccggaaaaattattgaaaatacagcatccgtgagaaagactgtgccactcaccagtcttaagaaagagatgctcaccgaagccaagctaggtagcgcgttctatcaccgaaacagggaattactcgaagccttgcaaaatcagttggataaatttaatggtgaagcaaaaaaagcgttcgccgaacctttcagaccccccaaaggaaaatcaggcaaggagaggccgctcattcgctccatccgactgcctgttaaacaagacggcggcatgttagtgcgcggtggcgttgcgggattaggcgacagcatcgccacagaagtctactggacgagtgccagctactttttccgacctcgctaccaagctgacaaggaggctatgtttggtctggaagaactaccgacgggagctaggcagctattcaatctacgaattgacgaacccatagaagtcgtcttgaccagtggtgaagtaatcccaggaggaggattccccggctatttcgtcatgtacgaaggcgatggtcgtatgacaatccggacacatgatcgaccaggaaaggggcgaaaaaaaacaaagcagaccggagaaaatgccgatgaaaatgatagcgatgaacagtctgaaaaagccaaaacagatactgtcaaagacagttcattgtttcgattctacgtcaaaaatatcaaggaacttcgcaaattcaagatagatattttaggcaaatggaaagaggttaacgtcggtttcaaacatggtctggcgtagcgtaatgatctctcgcccggcgcgtctgcggcggaagcattattcgctggctattgaccaggaagagacagccttcgtgccttttgaggacatcgccgtgattgttctcgatcaccgggaaatcacgttgactcatccggtactttcggcctgtgccgagtacggcatcagtctttatgccaccggtagcaatcaccagcctgctggcgtttttctgccgtttctttcgcattcgcggaccacacgcatgatgcgcaagcagttgagcattacccgtccgacggccaaacgcgcctgggccgacattattcgccgcaagatcgaaaatcaggccacttgcctgcgtctgtgcagcaaaaaaggcgtggaaaagttggaagcttgcgcgcggcgtgtccgttccggcgacccggacaacttggaaggacaggccgctgcgctctattttgcacagttgtacggcacagatttttatcgcaatgacgaggcacgctggacgaatgctgcactcaattacggctatgccgtcttgcgcggagccatcacgcgcggcttggtagcgcacgggttgcatccttccatcgggttgtttcatgacagcgagcagaatgcgttcaatctggccgatgacttgatcgaatctttccgcccattggttgacctgcacgttgccaaacgccctgccctgatggaaggcgacctgataccagaggacaaacgggctctggttgccctgttgaatgtggacgtcggcatgccgcagggaaaaatgtcggtgctctctgccattgagtatgctgtcgagagtctggcgcgtacttacgaatccggccacgctgaacttgaccttccccgtctgatcggtctgcaagcgcacaggctggaatattgacgtgggcacagagacgagacgctacatgcgattggtcgttttttttgacctgcccatggtgaccaaggccgaaaagcgcgcctacgtgcagttccgccgctttctgctgaacgatggttacgacatgattcagtggtcggtttacggacgcctcctgaacggcaaagacgctgaaaccaagcatctcacccgcctgacggataacctccctcccgcaggctccgtgcgctgcatgactgtcacggaaaagcagtacgcaggtatcaggctgctggttggcatgcctctttttcaggaaaaaaaggtatcggcatcccagatgctgctcttttgaactgcaaaattccatgaaaaaactccccgccaagccatgcctggcggggagttgaggcgagtagattgtagctaaccggggtgagagagggagctacaaccgctggcggaaacggatcgcagggaatttgattgtagctaaccggggtgagagagggagctacaacagaaatggcggcgtgtatttccggctccgaattgtagctaaccggggtgagagagggagctacaacggtaaaatcgccatacctgtacatggatgaattgtagctaaccggggtgagagagggagctacaacaggtaatcatggataaaggcaacctccgagattgtagctaaccggggtgagagagggagctacaacaccggaggtagtcgaagagatagcccgcaaattgtagctaaccggggtgagagagggagctacaactgtcgcgtgtggccgacgtactctggtgcgattgtagctaaccggggtgagagagggagctacaacactcagaaacaaataacaaggaaatacaatattgtagctaaccggggtgagagagggagctacaacctcggtgcggcaggggtgtgggcagccatgattgtagctaaccggggtgagagagggagctacaaccgcaagcgtgcgaagcgtgccccgaaggggattgtagctaaccggggtgagagagggagctacaacctcgcctacgggggcaacgaaaacacgattattgtagctaaccggggtgagagagggagctacaacccgtctggcgtgtgctcgacgatgctgccgattgtagctaaccggggtgagagagggagctacaactttgcaagatttcctacgaagacagcatttattgtagctaaccggggtgagagagggagctacaacttaactgatgagttagttgaagatttcatgattgtagctaaccggggtgagagagggagctacaacgattttcctggcggaatcgcccttggaaaaattgtagctaaccggggtgagagagggagctacaacagatggtgataagccggaaggcgcgaacagattgtagctaaccggggtgagagagggagctacaacttgtgcattcgcatggtgaaccttcttcaatggtaatcctgataatcgacgacgtgcgcatcgccttcttcacttctcagacatgctggtgtttcgagcgactagaagcccgatccgaatcacatcacagcgggcacatagtatcgctttacaatactattgccacacgttagtatctttccatgatagcaagtttccgctgctccgacaccgaagcactgttcaatggacgacgtgtggcacggtttgccaacattgccgagagcgcgttgcgcaagctggcgatactgaacagggcggctacgctggaggatctgcgcgttccaccaggcgaccggtttgaaaagctctctggcgaccgcaatggtcaatacagtatccgcgtcaatgaccagtggcgcatctgttttggcttctgttccgggcaggccacaagcgtcgagatcgtggactaccattgaaggagaacaatcatgccgcgcgaaatcccttacccccatcccggcgaaattctgctggaagagtttttgaagccactgggtatcagccagtaccggctagcgaaggaaatcggcgttcctcagcggcgtatcagcgaaatcgttgcagggaagagagccgttactgttgacacaggtttgcgtctgtctgccttttttggcatgagcgacggtttctggagtggtcttcaggccgactacgacaccgcccgcgcacgcgatgcgctcgctgaaacattagcacgcatccagcgttatgcgccaggacatgccactgtgtgacaggaaaacgtgccccccacaccttctgcgtaccggcttcggcagggaaattttttgagcacttcgggttcactgttcagcgtgtggtagatgtgatcagtacactcattagccaagcgcgacgacgctgaagttcggcgcggtatgatccgtcgggcaatagggctatttcgtcgcgcagggcggccagttctcggcgcagcaatacttcccgtggcgtaaaaccggcatttttcagaattttgttcgtcatgcgctgctcaggcgacaaaaaaggttcatcgtcgaaaaccagtggttgtcccatccccggcaaatgcttgaattcgcctcggcgctcggcctcggcaatgcgctgttcggcgagaatatcaaagatggataacatggcgaactcgcatacaccttcagttactgcatacgcccgtaaacatcctcgaaacgaacgatgtcatcctcgcccagatagctgccggactgcacctcgatgatctcaagcggcaggcatcccggattgctcaagcggtgacgaatgcccagcgggatataggtcgattcgttttcaccgagaaggaaagttttttcaccgcactgcacctcggccgtccctcgcaccacgatccagtgctcggcgcgatgatggtgcatttgcagggacaggcttgcgcccggattgaccacgatgcgcttgacctgaaagcgttctccgctatcaatggagtcataccatccccagggacgaaacaccttgcgatggtggtggccgtggctacgcccttctgccttgaggcgctcgaccactttcttgacattctgagcgttgtttttcggggtcaccagcacggcatcggccgtttccaccaccaccatgtcttcacaaccgagagccgccaccagtcgatgactggcgtagacgagcgtatcgtggctatcgtgcaggagtacatccccccgcgtgacgttgccgtcgacatcatgcggcgacaccgcccagagcgcgtcccacgcccccacatccgaccaggcggcagccagcggcacaaccacgccctgccccagttgcggcgcagtccgcagtttttccatcaccgcgtagtcaatggagtcggaaggacacgcctcgaaagcggcgcgttccacgcgcagaaaatcgacatccttcgcacgcccgacatgagcgtcgcggcacgcccgatcaatatcaggccgaaaatgcgcgagcgccgccaaccataccgaggcacgaaacatgaaaataccgctgttccagaaatacgcgccgctggcaacatagcgcgcggcggtatcagcatcgggtttttcgacgaattcagccaactcccgcgccctgctcccggagacggcgtcacccgcgcggatatagccatagccggtttccgcgcgttcgggcacgacgccgaagcataccagcgcgccagcctcggcctgacgcgcgccttcgacaatggcctgctggaaggcgacgcgatcgttgatgatatggtcggccggcatgaccagcaacacgggatcttcgccggtagcgcctgcctccagcgccgccagggtgacggcaggcgcggtattgcgtccaatgggttcaagcaggatgcacgcctctttcacaccgatctggcgaagctgttcggcaatgatgaagcgatatttctcgttgctcaccaccagcaggcgtggatcaatttcgcccgcgccgccaaaaccttcgagccttgccatcgtctcctgcaacagggaacgttcgccggtcaacggcaagagttgcttgggataagcctcgcgtgaagccggccatagtcgggttcccgaaccgccggaaagaataaccgttctaattgtcaatttatcatttctcctcattcacccggacacgaaccctacagatcgcaaacctcggcatctttcagcaaccgccctaccctgtctttttcagataacaagggttcgcccaatcccgccagcggccactcgatggcgatgtccggatcgttccagagaatgcagcgttcatgttccggcgcgtagtaatcggtggctttatacatgaaatcgacgctttcgctcaaaacaacgaacgcatgcgcaaaaccgggcggaatccagaacatgcgatgtgagtccccgtcaagctcgacgcccgtccagcggccaaaatgcggggaatcccggcgcacatccaccgccacatcgaacacccgcccatgagtcactctgacgagcttgccctgtggttgccgaacttgatagtgtagcccccgcaacacgccgcgcatcgaatgcgaatgattgtcctgcacgaaaaccggatcgagtccagttgcttcgcggaatacgcgcgcgttgtaactctcaaggaaaaaaccgcgcgcatcgccaaacactttcggttcgagaatcaacacaccaggcaatgcagcgggaatgacattcatgtttcaatccacgtccggttcagccggacgacatagcacggaagaggttacacccctcccgtgtctgattatcccctaaaagggaaggtttcaaaccggagattgttttggatcaaaacacccggtcttcaagcaggcgttgcaggtagcggccatagtcgttcttcgccaacggagctgccagacgcatgagatcttcatcgccgatccaactcgcccgccaggcaatctcttccggacaggacaccatgagtccctggcgcttctcgatggtctggatgaaaagacccgcctccagcaagctttcgtgcgttccggtatcgagccaggcatggccgcgtcccatgacctgcacgtcgagttcgccccaggccaggtattgtgagttgacgtcagtaatttccaactccccgcgcgcgctgggcttcaacccggcggcaatatcaaccaccctgttgtcgtagaaatagagtcccgtcaccgcgtaacgactcttggggcgagccggtttctcttccaggctcacggcacgaccgtcagaatcgaactccaccacgccgtagcgttcgggatcgtttaccggataggcgaacaccgttgcgcccaatgatcgcgcattagcccggatcaaatcggtcgccaaatcgtgaccataaaaaagattgtcacccagcaccagcgccgatggcgcatcaccgacaaagtccctgccgatgatgaaagcctgcgccaacccgtccgggctcggttgtaccgcgtaggagagattcaccccccactgttcaccgccgccgagcaactgctcgaagcgcggggtgtcctgcggcgtggagatcacgagaatatcccggatacccgcgagcatcagcgtcgagagcgggtaataaaccatcggtttatcgtagatcggcagcaactgcttggatacggccagtgtggccggatgcaggcgggttccggaaccgccggcaaggaggatgcctttacgtgctttcatcctattatggtaatacggaatccaggatttcatccagcagccgcatcactccaaattgccaatcaggcaaatggaggccaaaatcggtccgcagccgtgtggtatcgaggcgtgaattcagaggacgcacggcgggcgcagaccaatcgactgaacgaattggcacgatctccttagccttgagttcaatgcttcggcgacgggcttcatcgatgacgaagcaggcgtaagcatgccaactcgtctcccccgctgcggtgagatgatacagaccgccaggatgatccacggtcaggacactacgcacgagatgggccgtcacatcggcaagcaattcggctccggttggcgcgccgatctggtcgctgacgaccgtcaaacgatcacgttcagccgccagtcgcagcatggtgcgagcgaaattgttgccgtgcatggaatagacccatgaagcacgcaaaatcaaatgacggcagtgactcgcccgaatcgcctcttcgcccgcaagcttgctctgaccgtagactgaaagcggcccggtcggatcatcctcacgccacgggcgctcgccgctaccgtcaaacacataatcggtcgaatagtgcacgagccagatgccgcgcgcagcagcttctccggcgagtacgccaagcgcagcagcattgacacgatgtgcaagctcaggttcgctctcggcgcggtcgacggcagtatagccagcggcattgacgatcacatcaggcgaaaccgccgccactgtagcccgcaaacccgcttcatcagtcaaatcgccgacaagcccttccccaccgtcctgatccaacgccaccacctcaccgagcggcgcaagcgtgcgctgtaattcccaaccaacttgaccatccttgccaaaaagcaaaatcttcatttttcccccacggatgccctgcgggctacgctaacgcgcaagacaaagtacccagaggaaagaattccttcgagccattttccgtgcatcactatacgttacatcgcaccatctttcataccgtattgcacagccatccagttacgataagctccgctctgcacatcagccacccagcgcggatgcgcaagataccattgcacggtcttgcgcagaccactctcgaaagtctctgcgggtcgccagccaagctctcgttcgatcttgcgcgtgtcgatcgcgtatcgacggtcatgccccggacggtcggtcacgaacgtaatcagtcgatcacggcggccagccgcttcatcaggccagagctcgtcgagcagattgcagaccatgcgcacgatgtcgatattggttctctcgtttccgcctcctatgttgtaggtttcccccggccgcccctgcgcaagcacggtgcacagcgcgcgacaatggtcgctcacgaagagccagtcgcgtatattcaggccgtcgccgtacaccggcaggggtttgcctgcgaacgcattgacgatggtcagcggaatcagtttttccggaaactggtaggggccgtagttgttcgagcaattcgacgtcaccaccggcaatccgtaggtatggaaccaggcccgcgccagatggtcagacgccgccttgcttgctgcatacgggctgttgggccgatacggattctcctctgtaaacggcgcatcctccgccgcaagggagccaaacacctcgtccgtgctcacatgcagaaagcggaaagcatcccgttccgctccctccagcgtattccagtaggcacgcgccgcttcgagcaggctgaacgtgccttcgatattggtacggatgaactcgccgggcccgtgaatcgaccgatcgacatggctctctgcagcaaagtgcacaatcgcgcggggacgatacttctcaagcaccccgtcaagcaggttacggtcgcagatgtctccctgcacgaacacgtggcgcggatcgtccatcaccgtctccaacgtctccaggttgcctgcgtaagtcaacacatccagattgagcaccggctcaccgtttttcgccaaccagtcgagaacgaagttgccgcctatgaatcccgccccacctgtcaccaaaatcatggaaacacctccatcccaagcacatgcaaacaaggcgcgtgatgctagcgcattgtgcgataccgcgccacgctgttgcataaaggatacgtgtatcgtcccataggacaaaccccaccttgtgacgaaatgtgttttaatcaagacttcacgaggtcacaattctcagagtgcaacttgctgattcgggggaatgtgactccccaaaattttttcgtcaatacgtacattaacagttcgcatgacatccttcacccgtcgcgccgttgtcttagctgtgctcatgctgagtgcttacgcgctatcggttgcactcacaccgacccggtacgtcgtcgtcaaagccgagcaacttaatcttgaagccctcattccccgtcagttcggcgactggcggatgattgaagagggcctccaggctatcgtcaacccgcaggcacagaaaactctggacaagctctactcacaggtactgtcccgcagctatgtcaacggcaacggtcgtcgcatcatgttgtcgctagcctacggcgaaaaccagtcaaatgacagcaggattcatagaccggaggtttgctatccttcacaaggatttcagataaccggcaaatggaaagatgccatttcctttgattcggtggaactcccggtcatgagggtcgtagcacagtacggaagccgttatgagccggtaacttactggatacgagtaggggattcactggtgcggggggcagttgagcagacttttgcacgagtcagttacggactcacaggacgcattcctgatggcattctttttcgtgtatccgaaataaatcaaaatacagaagattcgatttctcttcagaatcaatttattcaagcgttaatatcatcgctaactcctgctgccaaaaaaacattaatcggttctatcggatcacaaagtgtagaaatcgcagataaatcctcagaattatagacaacgtaattattacttccttattgaaacgttctgctatggaaaataaattttctaacaaagagcactcatcaggaagcgatataaaaacacgcagtatattacctataaaagcatttcttgcatttttaatcatcacatctgtaactcttcctagtgctaattttttgggcgttccagtaaagcatcttgcgtttgcatcatttctcttcctgatgttaattcaatggataagaggctcaaaaataaatatagtgataattatgttacttatcatatcgagtatatttgttgtgtttttcctacttctaggaacttttgaggattttacccatccttactatgtactgtctgaaggcttaatattctttactacaatggctgtagcattttctctgctcatggcaaggtc

SEQ ID NO: 4343 - DNA, 24488 bp, synthetic construct
  misc_feature 1..24488: note = Synthetic
  source 1..24488: mol_type = other DNA
ggaacatccgttcgaaggcatcatccccaacttcgaacgccgttaccgcgagacggattccaccgtcgtgcgcgaagagttggccaagtatcgcggccatcaagcctgtccgaattgcggcggcgcgcggctgcgcaaagaagcccgctacgtctatatcggcgacaaaaccctgcccgaaatcagccatctgccgctcgccgaatgccgcagatttttcgacgccttgcagttggacggcgcccgtgcgcagatcgccgacaagatcgtcaaagagatcgccgcgcggctgcaatttctgatcgatgtcggcctcgaatacctgatgctcgaacgctcggccgatacgctttccggcggcgaggcgcagcgcatccgcctcgcgagccagatcggatcgggcctgaccggcgtgatgtatgtgctcgacgagccgtcgatcggcctgcaccagcgcgacaacgacaggctgcttggcacactggcgcggctgcgcgatctcggcaatacggtcatcgttgtcgagcacgatgaggacgcgatccgcgctgccgatttcgtcgtcgacatgggacccggcgccggggtgcacggcggcgaggtcatcgcccagggcgccccaaaggatatcgaaaccagccctgattcgctgaccggcgcgtatctttcaggccggcgcaagatcgccctgccaagcaagcgcaagccacccgacccgcaacgtaagctcgcgttgcgcggcgcacatggcaacaacctcaaacaggtcacgctcgaaatcccggtcggcttgttcacctgcatcaccggcgtttccggctcgggtaaaagcacgctgatcaacgacacgctctacgccatcgcggcaaaacacctctacggctcggttgccgagcccgcgccttatgacgaaatcgaggggctcgaatttttcgacaaagttatcagcgtcgaccaggccccaatcggccgcacgccgcgctcaaacccggccacctacactggcctgctgacaccgatccgcgaactttacgccggcgtgcccgaagcgcgtgcgcgcggctacggaccggggcgcttttccttcaatgtgaagggcggacgctgcgaagcctgtcagggcgacggcatgattaaggtcgagatgcacttcctgcccgatgtgttcgtgccctgcgacgtgtgccacggccagcgctacaaccgcgaaacgcttgagatccgctatcgcggcaaaaccattgccgaggtgctaacgatgacggtggaagaggcgcatcgtttcttcgacgccgtgccgacgctggcgcgcaagctcgaaacgctgctcgacgtcggccttggctacatccagctcggccagagcgccacgacgctttcgggcggcgaagcgcagcgcgtgaagctcgcgctggaactatccaagcgcgacaccggccgcacgctttacatcctcgacgaaccgaccaccggcctgcattttcaggacatcgaaatgctgctcaaggtgctcgcgcgcctgcgcgaccacggcaacacgatcatcgtcatcgaacacaatctggatgtcatcaagaccgccgattggcttgtcgacctcggccccgaaggcggcgccggcggcgggcggattctcgtcgtgggcccaccggaagccgtggcgaaacataaactcagctacaccggcaaatatctcaaacgcctgattgcttgaataggtttagagcatttttgattgattcaaatgtatacgctttgctttccctctcccgccccttcggggcgccctctcccacaagtgggagaggggaagacgctcccctcgcccgctcgcggggagagcgcagcgaggggggcggagccggttgggggagagggaatgtccacacataaaccaaaaccgctctagtgggattgggacacgcgcacatcgttcaacgatcggctggccttggcgatggcgcgggacaagcgggccacctcgttgagatgttcgatcatgtcgttggcgagacggaaattgagggcgtcctcctggctgcgcaattgcacgacggacatgatgaaacgccgcgcgatgccggcctgcgcctcgatctcgggtttggcgttaacgatacgcgtcacaatatccgcggacggatgcgagatcgtctccagcgccagcgtgaaatgctcaatgaccgccatcgcgaattgcacggtttcggggctgcgcaactgggccacgtccgcgccttgcgcgagtcgccgctggcttaatgcgagcatgctggtggtggcaacctcccgaatcgcatcaagacaggtaacgatacgcgcgaggtccaccaattgccggccttcctcatcggaatggacggcctccgagagctggccgatataagtcaggatggccgtgctcagggtatcggcggcccgatcccgatccgtcagcgtggcgagcgcctgctcgctgccttcgacaaccgacacggcaccgttcttgaccagactctggacctgtttgccgagctcgaccaattcgagctgcacccgggtgatcgctagcgccggcatttccaccaacgctgcatcgagatagcgcggcacgcctgggtcctgccagccctccttgctcgtttgcggggcaagccgttcggcgagcctaccgatggggccggtaaaccagatcaacacgacggtaccgaacacgctgaataccgtatgcgcgttagcgacctgacgcggcatctcggccgccaggcgagccgtgccggtcaattcgggcgaggacggagagaggtagcgaatgaaatcggcgaactgcggaatcacaaaaacgaggaataacacgccaagcacgttgaagagcaggtgcacgataccgacctgaagcgcttgcgccgacttgccaatcgacgcaagcagcgccgtgccgcaggtgcccacgttggcgcccagaatcagcgcgatgcccgattcgagcggaatcaacccctggctaccgagcgcgatgacgatcgccagcgtggccgccgagctttgcacgatggcggtgaacaccgcgccgatcacgatcccaagcaagggatgatgcatatcctgcatcgcctcgatgaacggctcgtaatcgcgcaggggacgcgtggcatcgcccatgaattggataccgaggaacagcaggccaagcccgaacgtcacgccgccgagctggcgcagcagttcacgcggggaaaaaccgtaaaacagaaagccgccagccagcataaacggcgtaatcgcggagatatcgaaggcgatgatctgcgccgtcagcgtcgaaccgatattggcgcccatgatgaccgggatcgactgctggagcgtcatcagtcctgcggatacgaagccgaccagcagcacggtggtaatcgtcgaggaattcagcagcgcggtgatgccagcgccggcaaacacgccacggatccggctagcggttagcgtgcccaacagcccctgcaagcgggcgcccgcgatggccttgagccctctggtcataagttccagcccgaacagaaacagggccagaccgccgatcagcgtgccaacgatttcgatcaggttcagattggcgaattgcatggcaatgctcgtctcaagccagcgatcattttattatccgacaccctcgatagcgtcgaggacagactttaaaaccggcacgcgcgagccacccaaagcctagggcttgcgctcaaccagtgctaaagctacagcaccgagagaaattcatccttatcgaaaccagccttcaacacacgcccgcgcactacaacatacggcacaccgacaccccccaacgactgcaacgcctgcgcacagaccagcgtcgtttcgacgttgcactcgtgatagggaaaaccgtaggtggccaaccacgacttcgcttcaatgcaatagggacattcggccgtcgtatagatcacgacatctccaggtttcaccgtggacgccaagcggcgaatttcctcttcgctcaccctcgaaccaaaccacgccttcatgctcaacgtagcgagaggggatttcttgccgaaatccgtctgcaacgcccaccccatggcacagactatcagaatcgcaacggccagcttcatttcatatccgatgtatcagcacaattaaattgaagacagacaactgaacatccgcatcaaacacgaactttttatagcggcacaaacctcgttcgctcttaggatttattcctccgcaacatcgcagagtaaaaccacccaatgcgcgttctcatctatagcacgtagcgcgcaagatcctcgctgccggccaaggtttcaagctttccatcgacgtaggcggcatcgatacgcaaagcttcaacccccggccgaccggcctcgaagctgatttcttcgagcagcttttccatcacggtatacagccgacgcgcgccgatattctcggtcttttcgttgacctggaatgcgatctcggcaaggcggcgaataccatcggccatgaaatcgagcttgacgccatcggttgcgagcagtgcttcgtactgacgcgtcaggcaagcgtcggtcgccgtcaggatgcgttcgaaatcatcgaccgaaagcgagtcgagttcaacgcgaatcgggaagcgaccctgcaattcggggatcagatccgaaggcttggcaagatgaaaggccccgctcgcgatgaagaggatatggtccgtcttgaccatgccgtacttcgtcgtcaccgtcgtcccttcgacgagcggcagcaagtcgcgctgcacgccttgacgcgaaacgtctgcgccgccgatttcggaacgcgaggcgatcttgtcgatctcgtcgaggaagacgatgccattctgctcgacgctgtgcacggcgtcgagtttgacttcctcatcgttgaccatgcgcgcggcttcctcatcggcgagcagcttgagcgcctccttgatcttgagcttgcggaccttcttgcgctgattgccaaggttctgaaacatgccctgaatctgcgaagtcagctcctccatgccgggcggagcaaagatttcagccgtcggcgtcggcacggcagcctcgatctcgatttccttatcgtcgaggtcaccctcgcgcagttttttgcggaatttctggcgcgtggcgctatcttcgggcgtcgccggctcgctctggaaaccgactggccgcgcgggcggcaggagcacatcgagcacgcggtcctccgcggcatcgagcgcgcggtcgcgcactcggcgcatcgccgcaatgcggctgtccttgaccgcggtctcgacgagatcgcgaatgatcgtatcgacatcgcggccgacgtagcccacctcggtgaacttcgttgcctcgaccttgatgaacggcgcgttcgcaagccgcgccaggcgccgcgcgatttcggttttacccacgccggtcgggccgatcatgaggatgttcttcggcgtaatctcgtgccgcagcggctcatccacctgcgcacggcgccagcggttgcgcagcgcaatggcaaccgcgcgcttggcgcggccttgtccgacgatgtgtttgtcgagttcggagacgatttccgggggcgtcatttgggtcatagcgggagtacagcctaaaaatcaagcgtttcgatcgtatggttttgattggtgtagatacagatatcgcccgcaattgcgagcgctttcttgacgatctccccagccggctgctcggtgttttcccacaatgcccgcgcggcggcctgcgcgtaggcgccgccggagccgatcgcggcgatgccctgttcgggatcgagtacatccccgttgccggtcaggatcaaggtcgattcgcggtcggcaacgatcagcatcgcttcgagccggcgcagcatgcggtcggtccgccaatccttggacaaatcgacggccgagcgcagcagatggccctggtgcttttcgagtttggcctcaaagcgctcgaacagggtaaacgcatcggccgtgccacccgcgaaacccgctaagactttgccgtgatagagccggcgcactttgcgcgcactgcccttgacaacgacgttgcccaaggtgacctggccgtccccgccgagcgcgacctgattggcgcgacggaccgaaacgatggttgtgccgtggtattgctccatgagaatttcccgcaagtgtggatcggcgcggcgcaccgacaatggccttaacatgaggctggaagattagatcgcaagagtaacgccgaaagcaaaaacgcgcagatgaaactgcgcgctttacgaaatttagaaaactgtagtgttcaggtacgaggcatttcctccatctgagcgacatgatgtacgcccatcacgcgcagcaaggcggcaaccatggcattgagcccgcgaatcacgcagtgtttgccttgcgtttgaaattgcgtcagaacgttgaacagattaccggccgaaacaaaatcgatgcgtaacaaacgcgaggcatcgacctcgaccgtactgcgctcagcgccatacgttgccagcttccgaatcgcttcagcctgcgcactggacagcgttccctcaaatgtatagttgttcgcctcggtttcgagcggcaccaattccagttcaccggacacatccgaagcggtcggactggtggccgtcaatttttgcgaaagcgtggtggcgcccaatgatggagcggaggtttcataggatggcggcgactcctcgaacgtgatcgcataatcgagcgccacttcctcaaaacgttcctgctcctgcaaaacctgcaacagctccagcacaatcagccaaatcgactggccctccctgcgccccggctgaacatggccttcgaccatcggtagcatggtgcgcgcattggcgatctgtaccttgaccttggcttggcgcaaatcccgcaacaggcccaccagcagcgtacagccggcttcatcgatgccacgcacgcgcgccagatcgatcttcaacttgcccgccttcagggcgactttgcgcacctgttcgaactgcgacgcggcctgcgcgcccaaattgccggtcagaccaacggagggcatcgcatcgcggacctgcgctttaacgggtttcttctccgccaattcattccagatcggcggagagcggttgaattgcgtcgcgtataacaagccgcgctgctcaaacaaatccttgtcaccggttacacggcataaatcgaacagcatctgccacaaagtttcgttactcgacgcaccggaatcaagcgcggcctcaagtacgacaatcgcggcatcatcactattgttcgcaaacagaattgccgcttcctcaatcgccggatgatcgatatcggacccctcgtcgacccggatcttgcccgccgcaaccgccaaccctcttgcatcgccgccggtgaaatccaaagcggaaacctgatagggatcgaccgcttgagcaacacctgccttacgacctgactgcttcgggggtgccgacggctcactaccacttttgcgaaagaatggaagtaccatttttcagcgcctttcaaaaaaccaatttcgccccaacacaaacaaaaatatgccaaccgccagcgccaatacgaactaaaccctgcttcgcgcgtgtaatccagagtgggtagtaattactctaatcactgcaatgtttccgggtgtgcaatgcaaaccctcccgtgacgtttttcaccgtcgcgcacccaaaatcgtcccgcacccccactccggtaaaatatcggctcgattgcctgcaaactttaaatgctctcctccctcaactccgcccaacgcgaagcggcaaagtatcttgacggcccttgcatggtgctggcgggggccggcagcggcaaaacacgcgtcatcacggccaagatcgggtacttagttaaaacatgtggcatgaatccgcacaacatcgcggcaatcacgttcaccaacaaggctgcaaaagaaatgcaggagcgcgttggtcacctggtcgaaagccgcgcggccaaggcgctcacgatctgcaccttccacgcgctcggcgtgcgcatcgtgcggcacgaggccaagcttgtcgggctcaaaccgcagttctcgattctcgacagctcagatatttttcaaattgttaacgagctggccggcaatgctgacaaaggcatggtcaaagcgctgcaatgggcaatctccgcgtggaagaacgcgctcatcccgccgcatgaagcggccaagctcgcgcatgacgaaatcaccgcggccgcggccaagctctaccccgcctacgaacaaacgctgcgcgcttatcaagcggtggacttcgacgatctgatccggctgcccgttgaaattttcgacacccacccggaagcgcacgaacgctggcaaaacaagctgcgctatctgctcatcgacgaataccaggacaccaaccgcgcccaatacacgctcctgcgccagatcgccggcgcgcgcggcgctttcactgcggtcggcgacgacgatcaggcgatctacgcctggcgcggcgcggacgtcgaaaacctgcgccagctccaacgcgactacccgcagctcaaagtcatcaagctcgaacaaaactaccgctcgaccaaccgcatcctgaccgccgccaacacactgatcgcgaacaacgccaaactgttcgagaaaaagctctggtccgagcacggtcacggcgacccgatccgcgtcgtcatgcaacgcgacgccgaagccgaggccgactgggtggcgggccgcatctcggcgcaccgcttcgaattcaaaacgcactaccgcgactatgcgatcctctatcgcggcaaccaccaggcgcgcctcctcgaacaagcgctgcgcaaccacaaaatcccttacgtgatttcaggcggccaaagtttcttcgaccgtgccgagatcaaagacatcacctgctacctgcgtttgctgctcaacagcgacgacgacctcgccttcatccgcgcgatcaccacgcccaagcgcggcatcggcgcggcgacgctcgaagcgctcggcagttatgccggccggcggcacaccagcctcttcgctgcggcgtgcgaagaaggcgcggccgaacatgtcagcgcccggcatctcgaagccgtgcgcgagttctgcgccttcatcaaccaatccgaatatcgcgcccagcgcgaaccggccgggcaagcactcgacgacctcgtgcgcgccatcggctacgaaacctggctctacgaaacctgcgaaacgcgcgaagccgaaaccaaatggggcaacgtttccgacttcgcggactggattcggcgcaagggcgaagaagacggcaagaacctcatcgacgtcgcacaaacggttgcgctgattacgatgctcgacaaggaagccgaagatttcgacggcgtgcagctcgccaccttgcatgcctcgaagggcctcgaatggccgcacgtattcctcatcggcgtcgaagaaggactgctcccgcatcaagcgagcatcgacaacggccagatcgaggaagagcggcgactgatgtatgtgggcgtcacgcgcgcccagcgcagcctgacgatcaccgcctgcgaacggcgcaagactggcggcgaaatgcgccaagtcgaaccctcgcgcttcattgaagaactcggcggcgaaggcatccaccgccccgaccgcaacgcacccacctcacgcgaggacgcgcgcgcgaagctggcaaatctgcgcgcgatgctggggcacaaggccggctgagcagcggccccatgatggccgatacgcttggaatgtcatcgaaaaagcggtccgagcatgcggccgctactacattgggcggcattatccgcttgaatccagtggcaaaataaaacagcccggtcaggtttccctgccgggctgctttggatacagaatcttttgattctttattgtagcaacggctctcaccccggttagccacaacggttaagactataaaggacaaaaacatgtctagcaaacccaccgatccgctcacctttggttttgacatcggcatcgcctcggtcggctggtgcgtgcttggcgaaagccatatcgttgatcttggcgtgcgttgcttcgactcaggtgaggatagcgacgggaagccccacaaccaaacgcgacgggaaaagcgggtagcccgcaaccgcctccacatgcgccgctggcgtttagatcaactactgcgattgttctgcgatgtaggcatcatctcccgtcctgacccccggttgcttatgtcgccaccgcagatcagaggcgaaccagacacatcaagtccgtggcaattacgcgctcaagggctgaaggagaagcttgagccaatcgaatgggcgcgcgttctttactacttcgtcaagcatcgaagttttgaattctttcgcaagagcgaaatcaattcgaccacagacaaggatgtcgaagcagacaaagcaggagcaaccgacgaaactcagggcgcacaaggcgaagccgcaacggaaaaagacaagaaaaaactcaaggcagcgttaagcggcactaccaccttattggaaaagtaccggaagcgcactcagaaccccaatctgacagtcggcgctttggctgtctggctttcaaaagataaatacgaagctgacgcaccacaacctgacgaagaagatcgtaaatcattccgtgaatcgttgagaaacaaggggggaaactatcgtcactctttcttccgcgcagcacttcggcaggagctacaagagttatttgccgcgcaagccgaatatggaaatccatgcaccatactggatttgcctgccgatagtgagtacctgcggtacatgctcgacaatacaaaactaacacctgagaggaatattccagttggcggagaatcgcgtccggtaggacgaacattccagcaagctgttttcgacttattcgatctccaacacccgccactttacggcgatcaaattcgcgaaatggtcggcgaatgtgaattaatagagggagaaccacgcgcccccaagaatgccttctcatcggagcgtgccacttggcttgaaaagctgaaccatttacgtgttcgccgaaacgggaaagaagagccgctttcgcaggatgaacgcaaggttctggtgaacttaccctatgagcacaccaaggtaacactcaaactcgtgcgcgagaccttgatggcgaacgcgggtttttcggcttcatggcgggaagccagcttcaacgttgccagctatcaggccaagcctgctaatgacggagcttggatactcattgtccagcacggagaagagcctgtcagccttgccaaatgggctgataccgagaaacgcaaaaagaacctgaaggaagccaagaagcaactcacgggtggttccatgactttcgcagtcttgcgtgagcaactcgaattagctgattcagatcgcttcatctatcgcatcaaagaaaccagcatcgtcccccgcgagcaggaaccacaagcgcgtattccattctcccaacaaggcgacggaattcttgcttcgggacagtcgtaccgctatatccaatcagatggtaaacccaaagcgttatccaaagcagcctggaaagcagttgccacgctgtcacatagcactgcaacattggccgactggcgcacgcttattgccaaattcaaagacatggaaggcgcttggcaatttgagcactccgcgacaaaagaagatgcggtagaggccagtgccgaatctcaaaccctggttcccttacagtttgaagacgcgcaagccgtggaagcagaccacaagcttgtcgaactcaaaggctggcacgccatgcggttggcactggccgaaaaatttcctgatagatgggcgtcactgcaagtagcctacaaaaagcctatcaaccctgagggtttgagcgcagctaaacatatagatgacattgcgaccatcctgacagtaagccagacggatcatgaagtcgaagaaaaactgagcgccctgaattacgtgaaggcagaaatcgaggcgctgcaaaccatcggttttagcaagttccgtaatttgagcttctgcgctctgcgcaagatacttccgtaccttgaagatcgacacgtctatagcgaagcctgcaagctggcgggcctctcacactctgaaaaaaaccaccagcgggatcgttacttaccaccgctggaaacctttgtgtatcaacgctatcggcacgggaaacttaccggccatgtcgagaaacgctataaagaattacgcaatcctgtagtggcgcgttcattcaaccaggctcgcctcgtctttaatgccttggtcgccaagcacggctcgcctgcttatgtacatgttgagacggctcgcgatttggctcgctcaaaaaaattacgtgatgaaatcaaacgccaacaggaaaccaacggcaagcgaatagagagcattcgcaatgatttgaaaaataggcttggctgtgagccaacccccactcagattctcaaaatgcgcttttatggcgagcaaaagggacaatgcctgtataccggcaaatcacttgagccattcattgactcgatgcttacagaggattcgaaggacgttgaaattgaccatatctggccgcgatcaaagactttcgacaatagcctcgataatcgcgtgttggtgatagctggggcaaaccagaacaaacgaaatcaaattccctatgagtttttcatcaatggccctggcggcgagcagggctggcgagaatacgaaaaacgggtgcttgactgtaaaggcataagcgccgagaagcaacgtcgcctgctctccaaaacgctggaggatgccgacgaatttcgtgcccggaatctcgtcgatacgcgctatgcaacgcgcatgtttgccaacatgttgcgcgagcggattctttttgctggaagcgtaacgcccgaagaactggaaaccatctcgccggacgatgatggcaaaacccgctggaatcgctatcaacgtgttcgggttcgcacaccacaaggacgattagtcgactttctgcgcggcaagtggggactggctcgtctcaaagacagagagaaaagcgaccttcaccatgcgctggacgcttgcatcattgcagcctgttctccagcagttatccaacgggtcaataactactttgccgaagaggaaaaagagccagggcgacacagtttcaaacgcaactctgatggcacttatacgcaccgcactacaaaaaagactttcagcgaggaagaagcgcgagcgcaagggctttatctgcctgctccgtgggaccgctttcatcgtgatgtgcggaatgcgttagggaaagtttttatctcgcgccgtccaaaacggaaatctgctggcgaggtccatgacgccaaccctaaaggcattcgctacttacccgtccccctcgtcgaactgacagaagaaatgctgacggatgaatgcctacgagaagtcgcgggacgacggcgagaaaactacgaagcgctgcgcatggcattacaagctaccaatggcgatgcacaaatggcgtttgctgacggttatgaaatccagggaaagcacggcaaactaaaacgcatttacggcatcgccatgccgctgtggagtctgcctgacgactacctcaagcaacaaaacaaggctctgacgaaagagaatgcgaggaggcgcaaggaagaagatgcgaaacctctcagcgaaaatctgtcaaaaaccgctcgcaagactgttccactgaccagccttacgcaaaaaatgcttacagaagcagaattgggcagcactttctatcatcgcaacagagaactgatcgaagcattgaaagcgcaattgggtgacaaaaaagcaaaagtcgcgtttgctcaaccttttcaaccgctgcccggcaagaaaggaaagaaacggccggttatccgctccatacgccttcccgactcgcacggcagcggaattctggtgcgtggcggcattgcgggcatgggcgacagcatctgtactgaggtttactggacggggtcaagctatttctttcgccctcgctaccaggcggacaaggaagccacctttggggtagaagactcacctaagggcgcaagccacctattcaacctgcggattgatgagccgatagaggtagtcttggaagatggcgagatcatcccagacaacaaccttcccggctattttgttggctatgaaggagatggacgcatcaccatacgcactcacgatcgaccgggcaaaggtcgtcgtaaaaaagaaaaagcacccgatgagtccgaaagcgaggaaatagcggataagccagataaggaagatacaaaagacaattcgctctggcgattcagtgtgagcggtatcaagcaattaagaaagttccgagtgaatgccctcggtaatcgcaaagaaattcacgcacatctaaaacatggcttggcgtagcgtgatgatctcccgcccggcgcgtctgcggcgggaacatttttcgctggccatcgaccagaaagaaacggccttcgtgcctttcgaggacatcgccgtaattgttctcaatcatcgggaaatcacgctgactcatccggtgctttcggcctgcgctgaatacggcatcagtctttttgctaccggcgacaatcaccaacctgccggcgtttttctcccgtttctttcgcattcgcgcaccactcgtatgatgcgcaaacagttgagcatgactcgcccgacagccaaacgcacttgggccgacatcgtgcgccgcaagatcgaaaatcaggctgcctgcctcgctctgtgcaacaaaaaaggcgtggaaaaactggaagcctgcgcacggcgcgtccgttccggcgacccggacaatctggaaggacaggccgccgcgctttattttgcgcagttgttcggcgcggatttttaccgcaacgacgaagcgcgttggacaaacgctgcgctcaactatggctatgccgtcctgcggggcaccatcgcacgcggtctggtggcgcatggcttgcatcctaccatcgggttgtttcacgacagcgagcagaacgcattcaatctagccgacgacctgatcgaacctttccgcccactggtcgacctgcacgttgccaaacgtcctgccctgacggaaggcgacctgatcccggaagacaaacaagccctgattgccttgctgaatgtagacgtcggcatggcgcagggaaacatgtcagtactctcagccatcgagtatgccgtcgagagcttggcgcgcacctatgaatccggccatgctgaacttgaccttccccgtctgatcggtctgcaagcacacagactggagtattgacgtgggcatagagacgaggcgttatatgcgattgatcgtcttttttgacctgcccacgataactaaagccgataagcgcgcctacgtacaattccgtcgttttctgctgaacgacgggttcgacatgatccaatggtcggtctacggacgcatcctgaatggcaaggatgctgaaatcaagcatcttgcccgcttggcggataaccttccccccgcaggctccgtgcgctgcatgaccgtcacggagaagcaatacgcgggtatcaggttactggtcggcatgcccctttttcaggaaaaaagggtctcggcatcccagatgctgctcttctaagctgcgaatttttacgaaaaaaatcccgccaagctacgcctggcgggattttgaggtaggacattgtagccaaccggggtgagagagggagctacaacgtcgtgcaggccggagatttgcgcctcaacattgtagccaaccggggtgagagagggagctacaaccacctgccagtacgtgcgcgaggacggcgtattgtagccaaccggggtgagagagggagctacaacaagtcgcaggcggcatcgcgccgcgcgcgtattgtagccaaccggggtgagagagggagctacaacggccaaccgtggatcgggcatcgcctctcgattgtagccaaccggggtgagagagggagctacaacgctgaaagtgaccgtgacgatcgattcggcattgtagccaaccggggtgagagagggagctacaacggcacggcgcacgggcggatttttctcgggattgtagccaaccggggtgagagagggagctacaacaagttgtcaatgatctccgaccaagcacccattgtagccaaccggggtgagagagggagctacaactatgagtaagcgttatctctcgcaagatgtattgtagccaaccggggtgagagagggagctacaacgaactcgactatagtcacggcgacggcggtgctggcggcgttgcggctgattctgggctgggctcagccggtgccgttgcgtccgcgtccggcagatcaggcagttccacccactcgtgacgcgacttgaattgcgccagcatgctggccgccagggtggcgtagagcgggcggctgatcatgcgcgagatggccgccgccagcatcgccaccgccatcagcgagaacaccagcgggcggccgttgatcatctccatcacgatcagaaatgaggtgatcggcgcctgcgtcaccgccgccagaaagcccgtcatgccaatggcgatcagcgccgtgttgccgccgtcgccccatagccaggcaatgtcgtagccgatgcccgcgcccgtggccagcgacggcgcaaagatgccgccgggcacgccgctccatgccgtcagccaggtggtcaaaaatttcagcgggccgaacgccagcgccgcaggcggcgcttcgccacgcagcagttgcgcggcgggggcgatgccggagccgaaggtggaaccctccgccgccagcccgatcagcgccaccgccaaccccatgcccgccgcaaagcgcaccggccagcgatagcgccaagccgacaaccggcgcagcggcacggcccagcgcggcgggcgtccgcgcaccgcgcccacggccagggtggcgatcatcagccgggcgaacagcccgcccaacaggccggtggccactgtcaccgtcagccccggcagcagcaagtgccagcccgggggcgcgatggcgatggcgccgaaatacgccttgtcaccaaagactgacaccccgaccagcccggccagcacgatggccgcaatcaccacgccgctgtagcgcgcctccatgcggcgcgagagttcctcaaacgcgaacaccgcgcccgccagcgcgccgtaggccagcacgatggcgcggtcgagccacagccgggcgtcgaacacctcggttttcaactcgcggtaaaaatctggatcggcgcggccatgggcgtgcggcgcggcggaaccggaatcagagctttgagtcatggtgactttaacggcccgcagcgcagatcgtgcacagcgtgtctgaatctttttcccgatccctcacacaacacgtcatggcctccgtcaacaaagccatcctcgtcggcaatcctgggcgcgaccccgaaatgcgctccttccccaacggcgaccagatcgtcaacgtgacgccggccaccaccgacaagaggaaggacaagcagagcaacgcaacgcgcgagcacacccaatggcagcgactggtgttcaatgatcggccggccgaaaattgtagctaaccggggtgagagagggagcaagccacgtcagcggctcaggcagcatcatgtccttgtccgcagcgtgctgaacaccgccgccacggctgcgcagcaggcggccaccgccaacgcaatcatctgccccttgccgtcatgtggcggccaggcgctgaaaatccccgcgagaatcaccgcgcccagcgtctgccccgtgagccgcgcggtgcccagcatcccgctggccgcgccgctgcggtgcggcgccggcgtggtcacgatggtatggttgttgggcgactgaaacagcccgaagcccaggccacatagcaccatgcgccacgcgatatccgcattgcccggatgtgccggcaaagcggctagcagcgccaacccaactgccagcaaactcaggccgatgccacccagcagcccgtcggggtagcggccaatcagccgtcccgccatcggcgccatgaagatggtggcgatcggccaggcggtaatcagcagccccgcctcgaacggcgagcgcccgtaagcgtcgagcagcagaaacggcagtgcgatgaaggctagcgtctgcgcgcaaaaggcgctgatcgacgtgcccattgacagcgcgaacaccggaatgcgcatcaggtctaccggaaacagcggcagcgccagcgagagctgccgccgcaggtacaccacgcccacggccacgccggccagcaacagcgcccacgcgtcctgcccggcatggccgcgcacgccgagccgatccacgccgatgaaaaacagcgcgaacatcagcatattcagcagcacgtccaacgccgtgaagcgcgagccagaaaccggcgccggttgattgaacggcagcgagcgccagcccagcgccagcaccagcgcgcccagcggcacgttgagcgcgaacagccacggccacgaggccaccgatagaatcgccgccgacaccgacgggccggccaccgaagccgtggccaccaccattgaattgatcgccatgccgcgccccagcagcgaacgcggataaatgcgccgcaccagcgccgcgttgacgctcatcacccccgccgcgcccagcccctgcaacgcgcgcgccgcgatcagtacgctcagcgaatgggcgaacaccgccagcagcgaagacgcggtaaacagcgtcatccctaccaaatagacgcgtcggtggccgatcaagtcgcccaccgaggccagcggcagcagcatgaccagggtagcgatctggtaggcgttgaccacccagatggcatgcgccgcgtcggaatgcagttcgcgcgcgatgctcggtagcgcaagattgacaatggtgccgtccagcactgacaccccgatgccgaggatgatgaccaacatcgcgtgccagcgttgcggcgtcggcaagccgtcgtgttcggcagtggaggaggcgaggtgtatcgacatcgtttcagcccgccagatttgcgggaatgcgtctgttcttattgtaactaaccggggtgaaagagggagcgacaagcacggcgctcagctaaccagttgagcgccgtgaaatggaccagcgtggaacccgcgaatagctccgatattcgaacgcagcttagagaccgagctgcttggcggataaaaagttgtcgtcaaccaagatcctgacgttgtcttttgttattgcggtcggcgtcagcagaatcgagtcgacttttttgatgccgttgtcaagtcttgcggtgaatttgaccggattgcctttgaccagatcgatcgcgagtctggcggcttccgaagcgaggagcttgagcggtttgtagaccgtcatcgtttgtgtgcctgcgataacccgtttaacggcagccagttcgctgtcctgtcccgagaccgcaaccttaccgaccaagccttgcgccgacagcgcctggatcgcgccgcccgcggtgccatcgttggacgccacgatcgcatcgatcttattgttgtgctgcaccagcgcgttttcgatgatcgacaatgcttcggacggattccagtctttcacccactgttgaccgataatcttgatgtcacctctgtctacatagggtttgagcaccctcatctgaccttggcgcaataatttggcattgttgtcggttggggcgccgccaagcaggaagtagctgcctttaggtctgaccttgatgagcccttcagcttgcatctctccgacgcgttcgttatcgaacgaaatataggcatctatctcggcattcagaatcaggcggtcataggaaacaatcttgatgccggccttcttggcttctttgatcgcatacgtcagcaccttggaattgaaaggcacgattacgatcgcatcgactttctgcgcgatcagattttcaatttgggagacctggcgctgctcattcgcatcggccgattgcacactcactgtcgcgccgagctttttcgccgcctcgacaaaataatcgcgatcccgcgcccaccgttcgacgcgcaaatcgtctattgaaaaaccgagcttggggtttgctttatcggcaaaggctggagcggtcacaagcgccattccacaagccagcgcagcaacgagcacccggcgcatcaaattggtttgcattacacgcatccttaatgtcagacggccaaattcaagaggccaagatcttctcttcctctattacagaatagaagaaggctagctctcttcacgaaaccttattggttttcttaataaggggttaaccttagacaaaggatgtatttttgccaatggaccgcttattcctaatgcccggcaagctgtaaaacttcgcaaagttcggatttttcagcggccagcccaactcacacactgccaccttcattgttctgcatcgcttgaagcaaatccgaatttgcgcgacgctccaccaaagcacgcagaatcgcacgacgcaatagctcactcgcattcgaccaagcctcgatttcctccaccgtgcgcaggcagccgatacacagtccactctttggatcaagctgacatacaccaatgcaaggtgatggcaccgcactcatgccgcgttccgtttagccaacaacgcacgcgccacacggcctgccggtgcacggccgagcgcggcataaatgtaatcggcggcatcgacgagcttgtcaagctgcacgcccgtctcgatgccgagcccgttcaacaggtagattacgtcttcagtggccacattgcccgtcgcaccctttgcataggggcaaccgcctaaaccgccaaccgaggtatcgaaggtcgcgatgccatattcaagtgcggtcagtacattcgccaaagcctggccataggtatcgtgaaagtgccccgccaatcgccgcgccggaatatgcgccagcaatacatcgaacaaacgcgctgtagaggcggccgttcccacaccgatcgtgtcgcccaggctcacctcgtagcaacccaattcgagcaagcgctcgctcaccccacgcaccgcctcgggcgcgatctcgccttcatacggacaacccagcacgcaggagacatagccccgcacggcgacgcccgcagtttgcgcagcggacatcaccggcacaaagcgttccaggctctccgcaaccgaacagttgatattgcgttgcgaaaagctttccgaggccgccgcgaaaaccgccacctcgcgcgcgccggcggccaacgccgcctcaaaccctttcaggttcggcacgagaaccgggaagcgcacatcaccgcgcgccggcaggcccgccatcaccgcgggcgcgtcggccatctgcggcacccatttcggcgcgacaaaggctgtcgcttcgatcgtgcgcaaaccggcggccataagtctttcgatcagaccaagcttgatttccgtcgcgacctgcgcagcttcgttttgcaagccatcgcgcgggccgacctcaatgatgcgcacttcgcgcggatagttctttgtcatatgtttcgtcctcaactcaatcgatgcacgccacaggcagaacaataacgcgttccgatcgcctgctcattcgtgccggcgacgatcttgaaactccgcgcaataaacgaacgcgcgaataggctgacattccgatttttcatatccgtttcgccgcagataaacgcgggttctcatacggaaaatcatccgcccaactgatttaacaactggagaaaatcaccatgataaagtgggggatatagtagccgccaatattattgagccgcgattgctgcttgcgcgggccagataaattaaacctgtcagggctcatcatttaccgccatgcataacaaagcctccacccgtgtcgcagcgctcgaaaaatacgcggcattactattgcttgcgttatttgcactgatcgctactgcggcggcccgggcggaacaaccggcgcgcgtgatcgtgaagtaccgcgccgactcgttgcaactcgcaagcgctccagcgcaacgcgcacagacgcagggggcgcgtacccagtcgacaatcacaacggtcagggagcttcatcctcgcgtctatcttgtgcaagcggccgggatcagcgcggaacaactcgccagccggcttgccgcccaagcggatgtcgaatacgcggtgccggatcgcatcaagcgcattcgggctgtacccaacgatcctctctacggctcccaatggaacctgcaagcggtgcagcctgccgcgatcaacgcggaaagcgcctgggacatcacgcagggaagcgatgccatcatcgtcgccgtcatcgacaccggcatccgcccggaacatcccgactttgccggcaaactcgtgggcggttacgacttcatttcgagtcccatcatctctggcaacggcgatcgcaacagcgacccttccgatcccggcgatttcgtatcggccgcggattttcagcaaccggcattcaaagaccaggactgcggcgcaggcaagaacgtccctgttccgagttcgtggcacggcacgcaagtcgcgggcgtcgtcggcgcggcgactcataatgcgacggggatagcaagcgttggctggaatacgaaaatcgcgccgattcgcgtgctcggcaaatgcggcggctacgattcggacatcatcgatggcatgcgctgggccgcggggctgcccgtcagcggcgtacccgcgaatccaaacccggcgcgcattctgaacctgagcctaggcagcagtaatgcctgcacgcaggcgtatcaggatgccatcaatgaaatcaccgcgaacggcgtgctcgtcgtcgttgccgccggtaattccacctccgtggaagagcccggcaattgccgtggcgtgctgaccgttgccgggctacggcacaacggcgcaaaagtcggctatagcagtttcggcccggaagcgggtatcgccgcgccagccggtaattgcgtcaacacaacgggcggctgccttttcccgatcatcacgacgacgaatagcggaacgacaacgcccgcagacagcacttataccgacgcgacgaatttttcaatcggcacgagcttcgccgcgccacaagcagccggcgtcgcggcgctcatgctgtcgatccattcgggactcatgcctacgcaattgatccagtacatccaggcgagcgcgagtccattcccggtcacccctttgtttccgacctgtccgcaaacggactcaagcggccaatgcaactgcacggcaacaacctgcggggcgggaatgctcaacgcgttccgcgcagtcagcagcgcgttgcagcctgccgcgcttatcgtcgcgccaagcagtagcgagcccggcgaaacgcttacgctggatggcagcggcagttccgcggcagatggatacacgctcacgagctacgcatggaaaatcattagcgacggcggcaccgtcagcaacctcggcaatgcagaccaggccgtcgcaaccctggccacgagcaaagcgggaagcgtaacactgagcctgacggtgacggacgacgcgggccgcgccaatacgacgaatgtcaccatcgccgttggcggcccgacgccgccaagcggaaatgggggcgggggcggagcagtagacccgatcggcttgctggcggtcgcgctgctcgcggggcttgggtacgcggtccggcgtgagcggaaatcctgaccacgggtcaagcgcaagcctcgccatgaataacggggtttgcgctcgatgtatggtcattctcgcgaagtcgcagaatccattttccctccgatttgtggcgaagaggcccccggcaagctccgcttcaaaaccaacacaaagcgcccacagacaagaaaaacctacactctgcgcgttacatgccgatacatgcagtcgatagcccgttatatgaatgcagacctccacaggctcaaaactcatgattcttaccgctgcgcagacaagtcaaaaccgttccacgcgcctcacgcgccttaaaaagcatgccattgccttggtggcttgcttacccgcgctgattggcacgaacacggcctgggcggacccgcccgcccgtgtcatcgtcaaataccgtaccggctcgacgctgctcgccaacacacccgacaaacgcgcccacgcgctcggcgcgcgcgtgcaatcggacatatccagcatccgggaactgcggccacgcgttcagcttgtccaggctaggggcttaagcgccgaggcgctggccgagcggcttgccgcgcaaacggacgttgaatacgcggtgccggatcgtatcaagcgcatccggacgatacccaacgacctgcactatgcctcgcagtggta

SEQ ID NO: 4344 - DNA, 24464 bp, synthetic construct
  misc_feature 1..24464: note = Synthetic
  source 1..24464: mol_type = other DNA
tttttcaacccatttatttcatcgtgataacccgttggtttctttacctttcttccgtcatcctgggattagccttggtggcggcgctgctgggcggtttcgtcatcgccctgctctacccgacgctgcccgatctggacgcgatcaccgactatcagcccaaaatcccgctgcgggtcgtctccagagaaggcgtcctgctgggagagttcggcgaagaacggcgttccgtcgtccacatcaacgaagttccgcaagtcctcaaaagcgccattctggccgctgaggacgaaagattctattcgcatggcggcgtggattacctttccatcctgcgcgccgtcatcgccaatctgacctcagacaagcttcaaggcggcggcaccatcaccatgcaggtcgcccgcaatttttacctgtcccgggaaaaaaagctgacgcgaaaactgcgcgaagcgttgctggcgtggaagatcgaagccaacctgtcgaaagaccagatctttgagctgtacattaaccagatctttttagggcagcgcgcctacggcttcgcctccgccacccagatctacttcggcaaaaacctcgccgatatcaccccggcggaagctgcgatgctggccgggctgccggcggcgccctccaagtacaatcctctggtcaacctgccccttgccaaagggcgacaggcttacgtgctgcgtcggatgcacgagctgaagtttctggacgacgccgcttacaacaccgccctgaatcaaccgctggacatccgcgtgcattcgatcagttctcaggaacgctcggggctgcacgccgaatacatcgctgaaatggcgcgtcaaaaagcgttcgagggttacggcaaggacgcttacaccagcgggctgaccgtctggacgacgatctccgccgaaatgcaggctgccgcttatcaagctgttcggcaaggcgtgctggactacgaccgccgccacggttaccgcggcccagaaagctacatcaacctgcccgagccgctcgtcgaaaacgatccggatctcgtcgatcaagcatttcaaaacctcacggatcacgacaacctgctcgctgccatcgtcatcgacgccagcgccgagcaagttcgcgtcctgatttccaacggtaccatcaccaccatctccggcgccggtttgcgttttgcccaaacctcgctgccgccgaaagcgccggccagtatccggttgcggcgcggcgccgtcgttcgcgtcgcccaagacaacaaaggccagtgggcgatcagccagttgccgcaggctgagtcttcgttcatcgcccttcagccgcaggacggctcggtgctggcgctggtcggcggcttcgatttcgagcgcaaccagttcaaccatgctactcaggccttgcgtcagccgggctcgtcgttcaaaccgttcatctactcggcggcgctggagaaaggattttcaccggccaccgtggtcaacgacggaccgttcttcgttcccgccgaagaagccggcggccaggattgggaaccgaaaaattacggcggcgagtacgaaggtccgatgtcgctgcgcacagcgctggccaagtcgaagaacctggtggccgttcgcgttttgcaggcgatcacgccgcaatacgctcaagactacatcaccaagttcggctttcaggccaagcaacacccgccctacctgacgatggcgctgggcaccggctcggcgacgccgatgcaaatggcgagcgcctacgccgtttttgccaacggcggtttccgtatcgaccccaacttcatcgaccatatcaccgatgcgcgcggcaacacgatttacacccgccccgatctgccgaagggcgaagcgcggcaagaagcgatcgatccgcgcaacgctttcattatcaccacgatgctgcgcgacgtcgtcgcccgtggcaccgccgcccgagcgatgacgctgaaacgccacgacctcgccggcaaaaccggcaccaccaacgattcggttgacgcctggttctgcggctacaacgccaacctggtcggcgtctcctggatcggctttgaccaaccgaagtccttgggcgcccgcgaaaccggcgcggcggccgcgttgccgatctggattaccttcatgcagaccgcactcaaaaacgtgccggaaaccccgctccccctgccgccgggcgtcgtctccgttcacatcgacccggaaaccgggcaacgcagcgacaaaagtcccgagaccgaatggttctacagcgaattccagccggaggccgcctcgccgctgcaaaacagtcgctcgctcgaccggattttttagagcgaaaatgacgcgccaccaccgtttcggccgttcaggacaagaaacccgaacggaacaacaacaacgcgcccgcatcgctcaggcggcggcggtgttgattctcgaacacgggcttgccgactggcacgacgccaaacgcaaagccgcccgccagttgttgttgccggagaacagcgcgctgcccgacaacgatgaaatcgaagccgcgctctttgaacaccaatcactgttcggtggcgacgcccacgcttcacagttgcgcgcccgccgactgcaagcgctggtttggatggaacgcctcgccgctttttcgccgaaactctacggcgcgctcgccgatggttggggcggcgagcatcaagatattcgtctcgaactgatcgccgaagactccaaagcggtggaactgcgattgatcgacggcggcattcgctacgcgcccgtctccgacaccgttttcgccaaaggcgctgccgaaaacgtcctcctgcgagtcagcgacggcaacagcgaagtcttgctgcgcatccatacgccgaccgctcaacgccaacaacagcgcgccacccaccgctcgctggatcacaaggcgttgaaggcgttgctggtgtcaggggtcagggatcaacaggcgtaggctaggtagagcgaagcgaaatccagcagtattgcgcgcaagcaaaatggatgctgggattgtgctacaccagcgactcaatcaggagcatcttgccgttcatctcgcttcttgctcaacccgaattttgcctcaatgaggtacacggcagcgggaatgccaaacaaaaaacaaaaaaacaaagcgttcacaatggaaggttggctgcgtgaccctttccagaaagagccttcggaaagttcatgacccagataaaacagcgccacgacaagtacgcccgaagcgatcaggctaccgaagaattgggcaacacgccccttcgtaaagcaggcaacagcaatggccaaacacagcaaggcaaaaacacaaaagtgtggcgccttgccttcaggtggcccagtcaatgcaatcaggagcatcacgactccaaacaaacccgtaacgaacgccaaaagcaatctggcgccaaagcccaaagagcgcaactgcgccagcaacctcaatcttgattccagcatctcccacatgatttcagtcctttggcagatacaaactcatcactgtgaagcatcggctcgttggagttcactgcgccatccgcgtgtatgggctaaaagcgggacgccgtgggcggcgtcccctacgattccttacccgttgtattgatttgcgggcgaccacaggtcgcccctacatgatccctgatgcctgacacccggatccctgctactcaagccactccgccgccgccagcgcgtaatacgtcaaaatcgcatcggcgccggcacgcttcatgcccagcaacacttccagcacgcaagcgcgctcattgagccagccgttctgcgtcgccgccttcagcatcgcgtattcgcccgaaacctgatacaccgccgtcggcacgccgaacgtgtccttgacccgccgcacgatgtcgagataaggcatgccgggcttcaccatcaccatgtcggcgccttctttcaaatccgcatagacttcccacagcgcttcgtcgctgttgcccaggtccatttgataagtgtatttgctgccgctgccgaggctggcggcggagccgaccgcctcgcggaacggtccgtaaaaactcgacgcgtatttggccgaatacgccatgatccgcgtgtgaatccgcttcttcgcgtcgagcgcgttgcgaatcgcgccgatccggccatccatcatgtcggacggcgccacgatatccacaccggcttcggcgtgacacagcgcctgcttgataagcacttccaccgtttcgtcgttcatcacataaccgctggcgtcgagcaaaccgtcctggccgtgactggtgtacgggtcgagcgccacgtcggtcatcacccccagcgtcgggaattcctttttgaggcggcgcacgacctccggcaccagcccgtcgggattccaggcttcgcgggcggtttcgtccttgagcttggcgtcgatcaccggaaacagcgccatcaccggcacacccaacttcacgcagcgctcggcttccttcaggagcagatcgaggctcttgcgcgatacccccggcaacgacggtaccgcctcttcacgctgctcgcctgcctgcacaaatacagggtaaataaagtctttcgtgctaagtgagtgctcacgcacaaggtctcgtgagaaagcatcgcggcgcagacgacggggacgacgggtcggaaattttccggtaaaagcaaaagtcatgggcggctccggcaaaggcaaaaaatgaatattaaatcttcggcgccctctttggcaaaccatgcttacgtaatgagtgatgtaaacccgcgtaaaagaatcaactttttctgaaactttcccataaggctcctatcatagaggaggacggtaacgtctcccgcttttctccctgagcgggtgcctgctccctatagcaatagggagcggcttagaccccggatcactccccttggtgccggggtctttctttgcctgaagtttttgttgtttttattttcgttgcagcacgaatccgaaaatgccgtccattttttcgctaaacaccaacaacgcattaccactctgtcgtgcaaacgattgaaagtcgccgacgctgccgggatcggtggcgatgatgcgcagcttctgcccagacaccatttcgttcaaggttcttttcgcgcgcagaatcggcagcgggcatttcaacccgcaagtatcgacttcccgatccactgccatttcaaacgccgagagcgacgaattcatgatgacgcgccgctcgcgcggatgcggtcaaccagcgccgtcgttgagcgttgaaactgaaagggaatggcaacaaaacggccgccgtgcgtgataacttcggcagcgcccgccgtcgtggtcgccgaataatcgccgcctttgaccagcacatccggcatcacccgcacaatcagcgctagcggcgtatcgtcgtcgaacggcacaacaagatcgacacacgccagcgccgccaacaccgccatccggtcttccagtgtattgagcggcctgtcgctacccttgttcaggcgacgcaccgaagcgtcgctgttgaccgccaccaccagcgccgcgcctaattgccgcgcctgctccagatacgtcacgtggccgcgatgcaacacatcaaacacgccgttggtcagcaccagcggacgcggcaagagcgcgatacgcgccgacgcctcgtcggctccaaccatcttggcaggatagcgcggcgccggcaagtcgatcatggggtctcgctgtactcgaaaatgcgaacgacgcgcttgacgccactcgtcttgcgcgcgatttcgatagcctgatcgccttcttccttcttgacgatccccatcagataaacgatgccgcgctcggtgaccaccttgatgtgcgtcggcgaaaactggctgtcaacgaagcgcgtttttaccttcgacgtaatgtagctgtcgttagcgcgcgacgacaattccgataccggcccgatcatcaactcattctgaaccgcacgcacccgatcttcgttgcgggcaatttgcgccgcgccatcggaagtggcctgatcgggcacctcgccggtcaacagaataataccgttatagcttgcgacgccgacgtgcactttgtcgccgtatttgtcgttgatcttcagaaaaaccgacgtgctcatcgtcgtatcgtcgagttgggaaccggtggtacggcgatccgttgccaccaccacgccggtcgtcgccgccgcgcccaccagaagcggcgcgcagcccgacatcggcacaacgaccaacaccgctgccgtcaacgccatgaacggcgtcgcccactgccgggactgagagattttttccatcatccttcttctccaagtaaatgaacatcaatcgcatcgcacaaacaatggagtatgagcaaatgcacttcctgaatccgcgccgtgcgcgtgtgcggcacacacaaatgcacatccgccgccgacaacattccgccgatggcgccgccgcccctgccggtgagcgcgacaatgcgcatctcgcgctcctgcgcggcggcaatcgcgcgaatgacgttgccggaattgccggaggttgacgaggccagcaacacgtcgccgcgaatgccgagcgcgcgcacctgcttttcaaaaatcgcgtcaaaagaataatcgttgccgaccgccgtcagaatcgacgtgtccgtcgtcaacgcaatcgctcgcaactccggccgctcgcgctcaaagcgtccgaccagttcggcggcaaaatgctgcgcgtccgccgccgagccgccgttgccgcacgccagaattttaccgtcggccagcagacactccgtcatcaactgtccggcgcgcgcaatttccggcgccagcagcgccgccgcttcctctttcaggcgggcgctgtccagaaaatgatcaacaatgcgcttttcaaaatcttgttgctcaaaatccattcccgccatccttggttccgtcatcttcaaagtatgtaggctaacgcgaagcgtgcaaaatgtcacgctgccaatgcaaccgtccggcatcgagcgtatccagcagaatcgcatcgaagcggcacggcggctcctgccccaactccgccagataacactgcgccgcccgccacaaccgctgctgcttctgcgccgagatgctggccaccgccccgccatacgtcgatgacccgcgcaacctgacctcaacgaacaccagcgcccctccgtcacgcgcgatgatgtcgatttcgccgtaacggttgcgcacgttgcgcgccactacgatcaaaccttgccgcgccaaaaaatccgccgccaacgcttccgcctcgcgaccccgctgctgaccggccagcgcacgagcgtgcgttccctcagtcatgcggcgaaaccttctccaccggtaacggctctttcaactccgtcggcggcgcttctttcggcggcttttctgctttttctttcccgtctttttcttttttggatttttctttccccaccggctgtaactccaacggctgcaagcggccatccttgaactccgccaactgtccggtacgcatcaagccttccttgcgaccgaagcgcaagctgccggtcgccccttcgagcgacatcgccatcggcaaaccatccgtgaaagcctccgccgtctgaaaagcatcgtaacccagcgcatacagccgcgctaccgccggggctgtcggcaaggtcggcaacgccttgaaccgcgccgcttgcggcgtcaccagccagggaatttcgacaactcgcaatccttcgagcgccgccgcttcaaactgttcctgccgctgataaatgtggccgctggcgtaagtcggccaagcttttgtttgtgtgcgcgccagcgccgcgtcgttgccttccaccgccaacaccaccaccgagggcgacagcgcctccaattgcgccttcaccttcgccacatcgtccgccgagaaaatcacccgctccggcgccttctcgcccaaatgcaaccattcgtcgatgaacgcatcggcgaaacgcttcatcaacggcgtttcgttgctcaacaccaccggcgttccgtcacgcctctcgataaaaatttcgcgcgccagatagcgcgcgtcgctctccaccgtcaatgtcaacgcaaacaagttggacggcaacttcgcatcctccacctcgaactgcgtcagcgaaatcgtccaggccagcgggggcattgccagcaaggttttcagatcgtcgcgcaccagcggccccacgatcaccgacaccccagcgtccgtcgcctgctgaaaagcggcggccacatcgccgtcgccgtgctcgatcaccaggcacgaatccttcgcgtgcgccgcttcggcggcggccatgaaccccacctccaccacctgcgccgcgccgccgtaaagtggcgatttgcccggcaaaatcagcgcaatcgtcgccttcgcgtttgttttcgttgctgccttaggcgacggcgtggtttttgacggtgacgtcgagcgcttcccggccgacggcgctttgccgccgtgctgcgcctccaccgcgtcgagccgttcctgtaccgagggttccggcgaagaccaaccggcgtcgcccgcaggcggctgcggctgcgccaccgcccacgctgcaaacaacgcgaagaacagcgctagaatggcgtttgctcttaacaccttaaccattcttgtcttttttctgtcgtcgccgacgccatactcatgtcccacgattctgctattccctctgatcccgccgcgccgattcattccgccgccgtgtccgcacgtatcttccgcgccgaaaaaagcacattatatgtgctggctacccctcttggaaacttgcgtgacatcaccttgcgcgcgctcgacatcctcggttccgccgacatcattcttgccgaagacacccgcgtctccgccaaactgcttacccactacggcatcaaagcgccgcttcgcgccctgcacgaacacaacgaacgcaaaagcgccgccgccatcattgaccttctgcaacaaggccacagcatcgccctcatcagcgatgccggcacccccgccgtcagcgacccgggcgcaagactggtcgccgccgttcgcgccgccgcgcttccggtcgtgccgatccccggcccgtgcgccttgatcaccgccatctccgccgccggattgaacgccgaacacttctactttgccggatttcttcccgtgcccaccaaagcgcgccgcgcccaattggaaacgttgcgcgcacttgacgccgccttgattttttacgaagcgccgcaccgcatccgccacactttgagcgatctgacgcaagctttccaagaaccgcgcgacctcatcatcgctcgcgaactcaccaaaacctttgaaaccgttcaacgcctcccgctcgccgatgctgtcgcctggctcgacgaacaccccgataccgaacgcggcgaactcgttctcatcgttgataccgccgccaccgcaaaaccgcgcgacaccacccccgacgaagcagccttggcgcgctggctcccggcactgctcgaagaactgccccccgcccgcgccgctcgcgtcgccgcgcaagcaacgggaattccgcgcagcacgatctacgagaaaatcaaggagcgaaaagggtaaaatccccgaatcttgccaactggcagtgctgcaatgtttccccttcttcaaatgaggaaactcacagaggttgtgcagctttcgcttttcgaggtagtaaatttacactttttaaaagtgtatgcctaaaccattaacgggtaagcgtttccgcttatcttggcgttgcattgctttactttatattgagttttcctactgttgcccgttaaactagcaacatagacgacacagaaaagagacagcccgataggtttccctgtcgggctgtggatacagaatctttcgattctttattgtagtaacggctctcacctcggattaccacaacggttgaaattataaaaggatatctcatgaaaagcaatctgtcacccaaaaaccctcttacttttggtttcgacattggtattgcctcggtcggctggtgtgtactcggtgaagatcatatcattgaccttggggtccgctattttgacccaggcgaagacaacgatggaaagcctcacaaccaaacgcggcgatcaaaacgagttgctcgcaaccgcctccacatgcgccgctggcgtttaaaccaacttttgcgtttgttctgtgatgtaggcattatctcccgccctgagcctcagttactcatatcgccaccacgcggcaaaggcaaaccagacacatcgagtccatggcaattgcgcgatcaaggactcaagcgactgctggaacctatcgagtgggcacacgttctttactacatggtcaaacaccgaggttttgaattctttcgcaagagtgaaatcaactcacccgcagacaaggatgccgaagcggataaaacggaggaaatcagcgaaactcaggatgcacaaagcgaagttacaacagaaaaagacaagaaaaaactcaaggcagcattgagtgacaccaccacactgttagaaaaatatcggaagcgcacccaaaaccccaatctgacagttggcgctctggctgcctggctttcaaaagacagatacgaagctagcgagccacaacctgacgaagatgactgcaaattgttccgtgaatcgctgagaaacaaaggtggaagctatcgtcactcctttttccgcgcagtactccggcaagagctgcaagaactgttcgccacgcaaactaatcacggcaatccatacaccacattggaattgcccgccgatggtgaatacctacagcgcatgcttggccaaggcaacacaaaactaacgccagaaaagaccatcccagttggcggcaaatcgcgcctagtagggcaaacatttcagcaagccgttttcgacctgttcgacctccaacacccgccgctttacggcgatcaaattcacgaaatgattggcgaatgcgaattgatagaagggcaaccacgcgcccccaagaatgccttctcatcggagcgtgctacttggcttgaaaagctaaaccaactgcgtatacgtcgaaatggatcagaggagctctctccgaaggaacgcgaatgtctgataaatctgccctacgagcacaccaaggtaacgctcaagctcgtgcgtgaaaccttgatggcgaacacagactttccggcttcgtggcaagaggctaatttcaacgttgcccgctatcaagctaaacctgccaatgacggtgcttggatactcattgttccacgcggggaagaacccatcagccttgtcaaatgggctgataccgagaaacgtaaaaaaaatctaaaggaagtcaaaaaacagcttacgggcggttccatgactttcacggctttacgcgaacaactcgaattagatgattcagaccgcttcgtctatcgcatcaaagaaacccgcatcgtctcccgcgagcacgaacaagagcgcattccattctcttcgcaaggcgaggggattcttgctaagggacaatcgtatcgctacatctgctcggatggcaaaccaaaagtattctctaaggctgcttggaaagcagttaccacgctacgcacgcgcagcactgcaacattagccgactggcgcacactcattgcctcattcaaaggcatggaaggcgcttggcaatttgaacactccgaaacaaaagaagaagcgatagaggtcagtgatgaattgcgaaccgttcccttgcagtttgaagatgcccaagccgtagaaacagaccacaaacttgtcgaactcaaaggttggcacgccatgcggctggcactggccgaaaaatttccggatagatgggcgtcactacaagtagcctacaaagagcctgctagtacgcagggattgcgcacagctaaagatatagatgaaattgctaccatcttgaccctaagccagaccgaccatgaaatagaagacaaattgagaacccttgcctattcggaaacagaaattgaggcattacaaactatcagtttcagtaaattccgaaacattgggtttgaagcattacacaaaatactgccgcacctcgaagaggggcatatttatagcaaaggttgttcgctggctaacctctctcactctgaaaaaaactatcagagatcacgatacctgccgccactggaaaccttcatctaccagcgttatcgacacggaaaactttccggccatatcgaaaaacgttataaggaattacttagtcccgtagtagcgcggtcattcaaccaagctcgactcgtctttaactctcttgtcgccaagtatggatcatccacctatgtacatattgaaacagcacgtgatttagcccgctcaaaaaaattgcgcgatgaaatcagacgccaacaggaaaccaatggcaagcggttagagatcattcgcaatgatttgcgaaacagactaggccgtgaacccaactccactcaggttctcaaaatgcgcctttatctcgaacaaaaagggcaatgtctgtacaccggaaaatcacttgagccgctcattgactcaatgctcaatgaaaacacaaatgatgttgaaattgatcatatctggccgcgctccaagaccttcgataacagcctcgataatcgagttctggtgatagctggagcaaaccaagataaaaggaacctcatcccttatgaatttttcaatggcgctggcggcgatcctcgctggagagaattcgagaaaagggtacttgactgtaagggcataaacgccgaaaagcaacgccgcctcctgtccaaaacactggaagatgccgacgaatttctcgctcgaaatctcgtcgacacacgttatgcgactcgcatgtttgccaacatgttacgagagggggttctttttgctggcggcgcaacgccggaagaattggaagccatttcgccagacgacgacggcaaaacccgctggaatcgctatcaacgtgctcgggttcgtaccccacagggacggctggtggatttcctgcgtggcaagtggggactagctcatctcaaagatcgaaagaaaagcgatcttcaccatgcactggacgcttgcatcatcgctgcctgttctccggcaatcattcaacgagtcaataactactttgccgaagaagaaaatggacacggtttcaagcgtaattctgacggcacttatacaaatcgcagcacaaaaaagaatctcagcaaagcggaagcgcgagaacgcggactttatctgcctgctccgtgggaagattttcatcgtgatgtgcggaatgcgttagggaaagtttttatctcgcgccgtccaaaacggaaatctgctggcgaggtccatgacgccaaccctaaaggcattcgttatttgcccgtccccctcgtcgaactgacagaagaaatgctgacggatgaatgcctacgagaagtcgggagacggcggcgagaaaactacgaagcgctgcgcatggcattacaagttaccaatggcgatgcacaaatggcgtttgctgacggttatgaaatccaagggaaacacggcaagctcaaacgcatttacagcatcgccatgccgctgtggagtttgcctaacgactacctcaagcaacggaacaaagctctgacgatagagaatgccaagagacgcaaggaaggagacgcgaaacttctctacgaaaatctgtcaaaaaccgctcgtaagactgttccattgaccagcctcacacaaaaaatgcttacagaaggagaactgggcagcactttctaccagcgcaacaaagaactgatcgaggcattgaaaacgcacttgggtgacaagaaagcaaaagatgcgtttgctcagccctttcaaccaccgcccggcaagagcggaaaggaacgaccggttattcgctccatccgtcttcctgatacacacggtagcggtgtactggtacgcggtggcatcaccggactaggtgagagcatatcgacagaagtctggtggacaggcagtgcctattttttccgcccccgttaccaagcagacaaggagaccatgttcggtatggaagatctgccagatggggcaaagcatatattcaatcttcgaattgacgaccccatagaagttgtcttgaccaatggtgaaatcattccaggaggagcctttccaggctatttcgtcgtgtacgaaggcgacggtcgtatgcgaattcggacacatgaccgaccggggaaaactccactaaaaacaaaccagactgaagaaaacaatgatgatgagcagtcaaatgctgtcaaagacacctcattacgccgatttaacaccaaggacatcaaaaaactccgcaaattcaaggttgatgttctaggtcgttacaaagaagtaaacggcggttctccgcatggcttggcgtagcgtgatgatttcccgcccggcgcgtctgcggcgggagcattattcgttggccatcgaacaggaagaaacggcctttgttcctttcgaggacatcgctgtgattgttctcgatcaccgggaaatcacgctgactcatccggcgctttcagcctgcgccgaatacggcatcagccttttttctaccggcgataaccatcagccaaacggtgtgttcttgccctatttgcaacattcgcgagccacgcgcgtgttgcggttgcaactcgatatcaccaagccagcagccaagcaagcttgggctgcgataatccgacaaaaaattaccaaccaagcacgcagcctgactcttgccaaacgcgatgacgccgaacgtttggagtcgtacgtgcgtcgcgttcgttcgggcgatccggcaaactgtgaagccttggcatcagcacattattttccgcagttatttggtgtcaatttttcccgcgaccaagggcgctggatcaatgcagcacttgattatggctatgccgtgctgcgcggaacgattgcgcgcgggttggttgcgcatgggctactgccatcgttgggactgtttcatgccagcgagcaaaacgcgttcaaccttgctgacgacattatcgagccgttccgcccaattgttgatttgcatgtcgtcagccaaccgctcatcgaagaacgcgagctattgcccaccgataaagtggctctggtagcgctgctcaatgttgatgtcaccatgccacgcggcacgacgagtgtgctttccgccattgaacaatgcgtcgaaagcttcgttcgtttttacgaaggcgccgctgccgaaactttagagcttcctttacttgccggcttacggcaacacgcccgtgagtattgaaacgaggcgctatatgcgcatacttgtctttttcgacttgcctgtcgtcactcgcgccgaccgtcgagcatatacattattccgtcgttttctcatcaacgatggctacgacatgcttcaattctcggtttatgcccgtatccttaatgggcgcgatgctgaagaaaaacatcatcaacgcttgtcggcaaaccttccgcctgaaggctctatccgtgctttaaccgtcaccgaaaagcaatacgctagcatgaaactactggtcggcctgccgctttttcaggaaaaaaaggtcgattccaaacaaatgctgcttttctgacgcctgtttttaaaaggaaaaatccccgccaagctaggctggacggggatttttcttaggctattgtagcaatccgaggtgagagagggaactacaacgacattactactagtcaagaggttaccgctattgtagcaatccgaggtgagagagggaactacaactcgtaatccgcaaccacactggctgcgaaaattgtagcaatccgaggtgagagagggaactacaacccggagccaagagggttggtgctccttccgattgtagcaatccgaggtgagagagggaactacaacgtagtcggcgacgtagaaacaagaagagagattgtagcaatccgaggtgagagagggaactacaacctgcgcgccaagcgtacaccctagcaccctattgtagcaatccgaggtgagagagggaactacaacagcggggcagggcgggcgagtaaattcgagattgtagcaatccgaggtgagagagggaactacaactataaagttcagacggttactaagtcgaaaattgtagcaatccgaggtgagagagggaactacaaccgaaaaaatgcgtgcgctttacgagagcgaattgtagcaatccgaggtgagagagggaactacaacatataccgtaacacataacagaatagcggtattgtagcaatccgaggtgagagagggaactacaacgtgggggcaggccgttgatggcgcggcgcgattgtagcaatccgaggtgagagagggaactacaactcaattgttggagacattcgcggatcactcattgtagcaatccgaggtgagagagggaactacaacataaattcctggcctgggaacaagataaagattgtagcaatccgaggtgagagagggaactacaacggcgcggctaaaggttgctgcttcccccatattgtagcaatccgaggtgagagagggaactacaacggtttcgataaagccgtcagtcgttttgtgattgtagcaatccgaggtgagagagggaactacaacgccgagcgtttcgtagtggcgcgccgctgtattgtagcaatccgaggtgagagagggaactacaacgcgaattctggaacgcgctccggcttcttgattgtagcaatccgaggtgagagagggaactacaacgcctttcgagatggaaacagcggccgtttcattgtagcaatccgaggtgagagagggaactacaacaagtggataaagcggcaagttacgcggctcattgtagcaatccgaggtgagagagggaactacaacgacgcgatcatcgtggacttcggcatcgagattgtagcaatccgaggtgagagaggaagctacaacacaccaatctgtgtattaggttcttcaatagttgacgttacattaggcactttgccataatgccagaatcgcgtgatggggggaggggaaatgaagacggtgactttcaacattcggatcgagtccgagttgcgcgacgcgttcaaccgcgctgccgccgcctcgcaccgttcggcggcgcaggtgttgcgtgagttgattcgtcattttgtcgaaagcgccccgcagtccaaagtgaagccgcagttgtccgaaaccaagttgcacgaacgccgccgcgcggtggattttgttcgcgccaacacggagatggaaggttttttcactgacgacgatttcaagacgttggaagaaagttacgccaacggcgagagcgagatcgaggacttctggcagtacatcgagaaaaaaatcgggcacctgcgggtgaagcaagatgtcgccggacaatgaagtttccagtagtcccatcgaggtcgaggcgctcgtcacgcgggcgcgtttgtacgaactttcccgacagcccttgcctgatcgcttcgacgcgcagcatctgaaatatgttcacggttatatctttcaggatttgccgctttacggtatcgaagatccgctgcccggaaaatttcgctatgaaatcactcgggacgatgatgattggtacaaatcccgcaagctgaaaagcatcgacacgcgctcagttgtctgttactcgcacatgaacaaagcgacgctcgatgatctgcgtgatacgttgcgcaacgccgctccggcgatcttgcggcaactcaaaacaacagccgagtttgtggaaaaactcagccggatttacgccaagctcgattacatccatcctttttacgaaggcaacagccgcgcgctgtgcgaattcacgcgacaaattgctctggcaagcggctacgaattggcgtgggacaagttcaacctgagcgacacgcggcgcgacttgctcaacattgcgcgcgatcgggcggtaggcgaattggccgttccgaagattcgcaatcacgacataagcaagcgcgtcgttttttacatggacaagttcgaacaaacgccgtcgttacgacaactgttcaagagcgcggtacgtccccgccgcgccgtcgcctttgaaaagttgccgaaaaaaaccgcgctcatcgctcatcccgaattgcaggaagccttcaaggcgctgcatgcgtccgagcagttcttgtatgaaaattcaccggacactgaagacgagcaacagtcggcaatggaaaaaacaaagcaacacattcttgctcgactgaacgcgggcgagaccaaaaattttcagcggaataaaaaatcgtagattggaacgaggcatcaaaccccaacggttcgatgtcacgaaccaacatcactaccacttcctcgcaatgacgccttgctctcccttaaaaattcgccgtatcgggatcagggcctaaacgtcccttcgggttgtcgaggctgttcagcgcggccatgtcttcgctgtcgagccggaaatcaaacacgttaaaattttcgcgggcgcgttccgcgtgaacggttttcggaatcgcgatcagtccgttttcgagatgccagcgcagcacgatttgcactgctgttttgccgtgcttttgcgcgatgcgcagaactttttcgtcgcgcaacaaagcgccgccctgcccgatcgggctccaggattcggtgacgatgccgtgttgcgcgtgaaaggcgcgcattgcccgttgctgaaaatacggatgcagttcgatttgattgaccgccggaacaacgccggtttcatccatcgcctgttgcaaatgcgccttctggaaattggacacgccgatcgaacgcacacgcccttcttttttcagcgtgaccagcgcgcgccagctatcgagatagcgtccccgatgcgccatcggccaatggatcaggtagagatcgacgtgatcgagtttcagccgtcgcaaactttcgtcgtaagcgcgcagtgtttcatcgtagccctgctggctgttccacaatttggtggtcacgaaaatgtcttcgcgcggcacgtccgaagcgcggattccctcgccgacaccgacttcgttgccgtaaatggcggccgtgtcgatcaaacgataacccgctgccagcgcggcggcgactgcggcggcggctttttcttccggcgtttgccaagtgccgaaaccgagttgcggaatcgacgagccgtcgttcagagtaagcatgggttgcgacataggggtctcccgttatccgaaaactcagcgatcgatctgccgctgcatcgacactggataacgcgctccctgaacaaccactttcgcaaacgctttttcgatgtcgcgcagatcggcgggcgtcagttccacggcggtagcaccgatgttttcttcgagacgcgatagcttggtcgtgccggggatcggcgcgatccacggtttttgcgcgagcaaccacgcgagtgaaatctgcgcgggcgtagcgtttttgcgttttgcgatttttgccacttgcgcaacaatcgcgcgattgaccttgcgcgcttcgaccgtgaagcgcggcaagttgctgcgaaaatcttttgcttcaaacgtggttttttcgttgatcgcgccggtgaggaagccgcgccccaacgggctgaacggcacaaagccaatgccgagttcttcgagcgtcggcaggatttccagttccggttcgcgccaccagagtgaatattcgctttgcagcgcggtgacgggttgcacggcgtgcgcgcgacgtatgtttttgacgcccgcttcggagaggccaaagtggcgcactttgccttcgcgaatgaggtctttcaccgttccggccacgtcttccatcggcacggcaggatcgacgcgatgctggtaaaacaagtcgatgtaatcggttttgagacgcttgagcgaagcgtcggccacttcgcggatgtgttcggggcgactgttcgtgccggtttgcgcgccgttcgcgtcgtaagaaaaaccgaatttggtggcgatcaccacttggttgcgaaaaggcgcgagcgcctcgccgacaagctcctcgtttttgaaggggccgtaggcttccgccgtatcgaagaaagtgacgccgcgctcgaaggcggcgcgaatcactctgatggcttcgtgatgatccgtcggcagaccgtaactgtgattgaagcccatgcagccgagaccgagggcggagacttcgagatttccaagttgacgtttttccatgatatgagggtgttatggatttatcatcagcgtattgtagcccttcggaatgaaagagggaacagcgacggtaacaaaaaatgttgttctggattcactcaaccagcgccagcgcctcatgcaacaccgccaccgattgccgctccaactgctgcggatcagaaagacgctgccggaacagccgcgcccgcggctggccgtggtagaggccgagaagatgacgggtgatcgcacgcagcagtacgccctgccgcaactgtgtttcgatgtaaggcatcagcgcttcgagcacggcgcggcgcgtcggcaacggcgcaccgtcaccgaacaatcgcgcttcggcttccgccaaacagtacggttgatggtaggcccagcgccccaccatcacgccgtcgatgcccgtcgccagttgcgtttcgatggtcggccaatcggtcagaccgccgttcaacacgatggtgcatcgcggaaaatcgcgcttcaactgttgcgcgacttcatagcgcagcggcggaatttcgcgattctctttcggcgacagaccagataaaatcgcgttgcgcgcatgcacgatgaacacgccacaacccgcctcgtgcaccgcgccgacgaaatcgcgcacaaaaccataatcctcaacatcatcgacgccgattcgatgtttgaccgtcaccggaatcgacactgcctcgcgcatcgctcgcacgcagtccgccaccagcgtcggctccttcatcaaacaagcgccgaagctgccgctttgcacccgctcgctcgggcaaccgcaattgagattgatttcatcgtagccccaacgcgcgcccagtcgcgccgcgtgcgccaacatcgccggatcactaccgcccagttgcaacgccagcggatgctcggcggcgtcgaaatccagatgtcgcgtcgcatcgccgtaatacaacgcgggcgccgtcaccatctcggtgtacaagcgagcatgcggcgacaacaaccgatgaaaataacgacagtggcgatccgtccagtcgagcatcggcgccacgcaaaaacggtagggcattgtcggagaaagcgttgaggtcatggcggcattgtacggcgaggcttcgcgcttttgtgaacgagccgaaatcggcaaggcggctgtcatcgttcctccttatttttcacgaagttaacgcccgacgcgccattagggtaaacttgtcgcctgactgcttgatgcttctcggagcgccccatgaaaaaaatattctccgccgtttttgtcgtcgtgttgacctcttcggttctggccggttgtgcgacccgttccgccgatactgacaaaacgctatcgttatcgtacagcaccatcgccaccgaagcgctcaacggcgccaacattccgatggaagtcggtcagcaattggatgtgcgtttgcggagcaatcacgccaccggccaccaatgggtacagaccgagccgatgcgtggcgcgctgcgcgacgccagcccgcgctatgaagttctgccgacgccggaaggcgcggaacccaaccccagcgcgggcgggacggaaattttttcattcaccgccgcgcgaccgggcacccaagtgctggtgtttgaatatcggcgctcttgggaaaccgacgagcaacaggaagccatcaagacaatcagttatcagattacggttaactagggtttagcgtgaattctgtagggggcgctttgcgaagcgctcctacaaacttaaagcaccaccctcaccatcggatgcgccgtcagtgcgcggtacaacgcatcgagttgcgctttgtcggtggcgcggatggtcaccgtcagcgacaaatagtgattctctttggaggggcgcatttccatcgttgccggatcgaagtccggcgcatgcgccacgacgatatcggcaacggcttgcgcgaaaccttccacgtttttccccattactttgatcggaaaatcgcagggaaactgcaataacgattcttcagaagaaatgtccgtcatgatttctctcaccgccgcgccgtatgaacgccgccggaaatgcgaagcgtttgcccgattcgcagagcggcgtttttcagcccgttccagcgtttcaattcgtcaacactgacgttgtaacgcgatgcgatgtcgtacagcgtatcgccttcttcaactttgtgataggccgtcttcgatatcgggtgcctcgttgccggggtcttgatcggcgacagtttgggcgacgacgacgcttgcgtcgttgaaacttgaccgtcggcggagacgcgcaagttctgccccacctgcaaggttttggcgctcgtcaagccgttccagcgcatcaggtcttgaacgttgatccgataatgcgaagcaatcttcgcgggcgtgtcgcccttctgcactttgtgatacgttgccgatgtggttggcgctgcaacgatgcgcgtcgctttatccgttgacttatcagtgggtttatccgtgatcttttccgacagcgctcgcggcgccgataccgatgaagcgcgcacgctgtcgtaacgcgccctttcgttatacacgcgaatgtttttgccgacgcgcaaatgtttggcattcttcaagccgttgagccgcatcaactcctcgggcgtcgtgtcgtaacgatgggcgatttgcgccagcgtgtcgccgcgtttgactttgtagcgcgaggtgcgcgccgacggcacggtggtgaacaccgcttgggtaagcgaggtttcggcagtccacgaaggttgttgcgccggcaccagcacattcacgccttcgcgggcgtgagcgcgaaggcccagaccgttgaccgctcgcaatgcttcaagtgacatgccgaatttgttggccacttgtgcgaaggattcgctcttctgcagccgatacgcctgccacgtcaccagcggttgatcttccaattccagcttcgacgcaaacagttccgctttgtcgatcggtaataacagcgtgaattcgtcggcgcccgcaattacaggccgattgtgttgcgggttcagcgccagaaattcttctttcgacatttcggccagcgccaccgctttactgacatccatccgcttcctcgtcttcaccactgtgaagtaaggcgcgtcgggcatgtcggaaagttcgaggttgtatttttcgggatcgcgaatgatgtttttgatcgcctgcaatttcggcacgtagttcatcgtttcgttcgtcagcctcaacgcttcatacgtctccggcaaaccgcgagcgcgattcttcgcctgcgcgcgcgcgacgctgccctcgccgcagttgtacgcagccagcgccagttgccaatcgttgaaatcgccgtacagtttttgcagataatcgagcgctgaatcggtggccgacaacacgtcgcggcgctcatcgacccaccaattttgtttcagtccgtaattcttgccggtggacggaatgaattgccagatgccggaagcgctgctgcgcgacaacgcattcggattgtaaccgctctcgatcatcggcaagagcgcaatctccatcggcatgttgcgcgcctgaacttcgtgaacgatgtgataaagatacaagcggctgcgctcgaaaattcgctccacataatcggggcggttgctgtaccaatcttcccatttctcgacccgcggtccttccacatcggggatgctgtagccgttgacgatcacttcccacaaatcggtttccggcggcggcaacgacaccaactcggcttgttgctccggcgtgaacggcggctcttcggcttcgacaggcggcggtgtttcggcgacgacgctcgcactgacatcgggtgcaactttttctgttgtttcggcagacccttggtcttgcagagaagcgcacgaagacagcgcgacggcaatcagaacaacaagataacagcgaaaaacgataagcagataacgcaaaataaacctcgaaaacaacggttgtcccccgatgctgccttgattttctctacgaaggcaacgacttgccgccaatcgacggccaaagattttcggatagtaggctgactgttgccgggcgtcaacacgttggcgcctcagcgaaacccgtctttccacgcccgcagggcggcgaaggtttccgccgccgtttcacacggcaaaccgctatgggcgcg

SEQ ID NO: 4345 - DNA, 23387 bp, synthetic construct
  source 1..23387: mol_type = other DNA
  misc_feature 1..23387: note = Synthetic
catggcagagacaacatccagagaacagatcgtcttttggcaactcgggtccctgaacggggccacctggcaggccgttggtacagccggtgctgtagtgctctttggcatccttgtgctgactggtttgagtcggaagctggatgtgttggcgctgggtgataaatccgccagacaagcgggcattcacgtagaacgtgtacgtgtcggggcgattcttacgatcgcgctcgtcacagctgctgcggtcagctacgccgggatcatcagctttgtgggactcgttgtgccacatgcattgcgcttgctgattggccccgggcacaagtacttgttgccactatcagcattgggcggagcggtgctgctgatgagcgcagatatttttgcccgaaccttgattccgttcgccgatatgcccattgggatcttcaccgcattggttggcgggccggtcttcttcatcctgctgcgccaaactctcaagaaacagggggttctgtgatggaaaagcttgccctacagtcctgggacatcagcgctacacgcgggggacgaaacatcctgagtggtgttgatatgcaactgaagaaaggtacattgaacgtcatcattggacccaatggtgccggaaaatcaacactgattgatgtcctgagcggagaagaccaaccccgtagcggaaaagtggagattttcggtcgcgatctccgttcgatgacggtgctggaacaggcacaacagcgggcggtgatggcccaagaaaccgccgtttctttcgccttcacggttgaggaaatagtggaaatgggtcggcaatgttgggccaagacaccctgccgggaactggaccagcaaaacgtcacgcaagccatccaattagctcagctcgatcacttggcggaagcacgcatcaccgaagtttccgggggcgaacgtcagcgagccgcgtttgcccgggttctagcccaagacaccccgctcatcattctggatgagccggtggccgcaatggatatcaaacatcaggaacaaaccctgcagacgatcaggcggttgtgcacggaaggacgtaccgcgttggtggttctgcacgacctgtctttcgccgcccattacgcagatcagctgattctgcttgcacagggacaagttgtcagtgccggaaaacctcaggttgtttgcgacccggagatcctttctgcggtgtatgaaactcgacttcatgttcacaccgacatggctgggaaggtcatcagtattgtcccggagcgaagctcttttctatcttttgcctcctagacacacctagacttggcatatgagcgaagatcacacggagcaaccacatcacctgaagcatctcttgggcgacaccgccaaagtgctcgagctcaagaaccggatcgtagaagaatgcctcgatccgaacgtgcagcggatgcacgaaatggcgtacgacctgcacgagtcgaccggggtttccgcgcgcgaagcccagctatacatcgcgcacttgctcaaagaagccgcagcgacagtgctgtattggcaagtagccgaagccgctgcagacgaagtaccggatgagcaaatcgcgctcgcggtcggaatggaacccggcagcagtatccgtgaacgctggccaggtattgataaggctgttgaggctcgtgaacgggtggcggaaaccttagagccggtcagcgtcgacttcggccacgggttcacactgcaaatgcacctgacacatgacccgcgcttcgatgagtattcggacgaggactagtgtgctgggtcagcaaagattaatttttgtgaagagcgtggattaggccacgttcgcggaccgtgtttcaatggaactcgtaaccatccagagtggctgagagacctagctcgctgaagccacagcaaccccggtagttcatactactgagagggtgctaccgctaggaccgatggagaattccattcacacaggtccacaaccttggcgcttttgcggcaaaaccaaggctgcgccacgtcgtgtttggcaaggttccttcggcgagagagaagaaggagctttatgagcaccaacgcacagcaagcgtcccgtcagatccttttcaacgccttcgacatgaactgtgttgctcaccagtccccaggtttgtggcgccacccagaggataaagctcgtgactataacacgatcgggtactggacgcacctagctaaaaccctcgaaaagggcctatttgacggtgtgttcattgcagatgtacttggcacctacgatgtctacggcgggtccaacgaggcgcctctgctgaccggggctcaggtgccggtcaatgatccagccctgctaatttccgctatggctgccgtgaccgagcatcttggtttcggtgtcacagccggtaccgcctacgagcatccgtaccctttcgctcgtcgcctcgctactctcgatcacctgaccaacgggcgtgttggttggaacgtcgtgaccggatacctgccgtcggcagcccagaacatgggcaatgacgatcagatggcacacgatgagcgttacgatcacgcggacgagtacctagaagtcatttacaagctgttggaaggctcctgggaagacgacgctgttcagtacaacaaacagaccggtgtgttcactgatccgaccaaggtgcatccgatcaagcatgaaggcaaatacttcaaagttccgggcattgctatcaccgagccgtcagtacagcgtacccctgttattttccaagctggagcgtcgccgcgaggtaaagcgttcgcaggtaaacacgccgaagccgttttcgtaaacaacaacaccatcgagactttgaaatcgacggtcgcctctatccgtgagaatgcggtcgctgcaggtcgcgatccgtacgatatccggatcttcaccatgcagaccatcatcaccggcgcgaccgatgaggaagctcaagccaagtacgaagaatacgtcaagtccgccgaccccaagggcgcgctagtgcttctctccggttggatgggagtcgatctgtccaagtacgacttggatgatccaatcggtgatgtcgaatccaatgccatccaatctctggtcaccagtcttcagactggaaccgctgacaacgaaccgtggacagtgcgcaagctcagtgaatgggttggggtaggcggcttcggaccgactctcgttggttctggcgccaccgtcgccgaagagctcatccgctggcagcgcgaaaccgatgttgacggcttcaacctggcctacgccatcaccccgggaaccttcgaagacatcgttgaatacgtggttcctgagttgcaggcacgcggagcgtacaagaccgaatatacggacggctctttgcgtaacaagctcttcggtgaaggtgacaaggttaaggacacccaccccgcggcttgttacagcctcgcccgcagcctcgtgtcctaaatccagtacacaaaactaaatatagagaactcaatacgaaagaaatcgaccatctagagcagctgagagatctggctcaatgacgctgcagcaaccggctccaccacagcggggacaaggtgctcctgccaggatcgatggaagtttccttcccacctcttcttctgtgaggtgggtgggcgcttccgcttacccgaccacaaggagaagaacaatgacaagcacactaaccacgcagaccaccgcttattggaaacccgcggctgaaggtgaacttgagtactgggtgccgaaggcccaagcagccgccgcagaactagcacaagacgtactcgctcgggacgctgccaaccaagaaccatttgccgaagttgagatcctgcgcaagcacgacctgatcacggccatcatcccgagtgaatttggtggcggcggcgcagccttctccaccgtcttcgagattgtgcgggagctggccaaagtagacggctcgatcgcccaattgttcgcctaccacagcgtgaacgtcgccggaatcggtgtcttcggagacgaagagacaaccgcacgcctgtggcgcaagattgcagatgaacaggctcttgtcggcgatgccgtcaatccgactgatcctcatctgaacctgcgtcaggtcggcgagaatttactgctcaacgggactaagcgttttgctaccggggctggagttggagaatacatctttgtcttaggtgtacttgctgacggaccgaacaccggaatcggccaggcagctttggtcggtcgagaacaagccggtgtcaaacaccacggggactggaacgcattgggccagcggctctcgtcttcaggctcagtgaccttcgaggatgttgaacttggtgccgacgctctagtcggtctagacaaggggaccgcgtggcaggctctgatcgcgccactgatccaactggctttcgtgaacttctaccttggaatcgccgaaggggcgctggaaaaaggcaagacattgatcaaccagcggcagaacgcctggttcttggcgaaggcagaacgctacaaccaagaccacatcttccaacgcttagtgggagagctccacgcccggacggtcgcggtagccgccctgaccgagaaagtgaacggaattcttgacgccacgctggcgactggacgggcactgacgctagaggcacgcagcgagttagaggttcagattgcccaagccaaggtggtttcctctgacgtggcgaccgatgtgaccaaccgtgtcttcgagttcaccggttcctcctcagccaagccagaaactgggctcgacctgtactggcggaacgtgcgcacgcactcgctgcatgacccggttgattacaagaagatcgaagtgggcgcccacttcctgctcggcgaataccagcccatcagcctctacacctaagctgcggcacccgaaggattgatgatcatgagcgaaaaactacctctactgcgggaactgtttagccggattgagctcggtacccagcagcgagaaaacgaccacgagctcccggtagaacaggtcaaagagttgtgccgccacggtttcacggccttgcgtgttccccgagattttggcggtctggaactggactggtaccaaacgaccgaactgctgattgagctggccgcagccgacagcgccatcccacaaatcttccgaggacacctggcagtagttgaagacgcgcgcttccactacgaaaaggatcggcaccgggcggagcaagctggtgacgaacagtcgcaaggcggacatgtctccaccgagcggtcattcaaagcccacacctaccaagaacggctccggtggttcgcccaaggacagctagtgggcaacgcgtggacggaacctggagtcggaaacctgacgggtagtcagacacaggtcaaacaggtggataaggattctgtccgtgtgacggggcagaaaatttacacaaccggcagcatctttgcggatctgttggacgtcacagcgatcaacgaaaccgggcaggaggtgacggtactggtcccgaaggctcaagacggggtccgggtgcatgatgactgggatggctttggtcaacagcaaagtggtaccggcgctgcggagttagagcaagcggttgccccaacctcgcaggtacgtcctgccattgaacggtttggttatcagacagcgttgtaccagcatgtgctgaacattgcacaagctggtacggcgcaggccgccgccgctcacgcggcacggttgttggctgaacggacacggacctattctcacgggaatgctccgcgtgccggtgaagacccacaactgttggcggtcgttgggcagttgcatgcacgtgcggcagcggcgaaggcggttgtgctgtcaacctccgctgagctagatgctgcggcacgcagcgccaccggatcggtggctgaacagcaagctgcctttgctgcggtggagcgggcaaccgctgccgcccagctggtggtcaatgagctctccttggcgaacggtactgcgctgtttgatgcccttggggcatctgccgtccgcaaggtgaccgggctcgatcggtattggcgtaatgcgcgcacgattgcctcgcataatcctcaggtttacaaggcaaggatcctgggtgattttgcggtcaatcagcgcacggctgacccgttgtggagcatcggtgtttcggagcgactccagcaggaaggtgcagcggctctagagaactagaacctttacctcagcacagcagtgggcctgtaccggaaaaccggcacaggcccacttttgcttgctctaggtagagcgggatgttttagttgctacggcgagggcttggggctccgccttcggaagcccagtccgaagcagcttcgctgccgccgagctctggatcagaaaccacgtcaggcttgtgattaggggtagcgttgtccttgtcattgccgtcacgaccagtgaggtcggtgacggtgtcgacaaccttgttcacagcctctggagcgtgctcgcgaacgttgtcagtgacatcgtgaatggtggactgaactttagggtcctcccagatgcgacgagcttcgtctttcatacgttcgtagctgtcacgaccggaacgggaaccgaggacaaagccaattcctacaccaagtccgagggtgagtagtcgaccgattttcatattttcctcctagcctgagctcatcaccattaaagtgctaagcgcgcttgtcatctttaatttatctggttcgagccaagaatcgaagtcttagttacccagctttcgctgttggcgtttcttctgcttcttcgatgtcgagaacgatcgggtccaagggggccaacggatacttcttccggtgccaccggtgaataccttcgatggcggccatccccacagtggagacgatgcccacggcccaccacaatggtgcatcggggagctggaactggtggaagaacagcgaaatgggaaccgtcagcaccaggaccagcaagacgtacagcgagacgatcaggatgatcttcttggcattcagcggccgggatgccacattcagcagccacaggcccagcaacaccacagtcaccgccgaagccgtctggacctgctccaaggagtagtcgccgtgggtaggagtcaacgagtccttgagcttgtaggcgtatgtgttgaccaaaacaacggcactggccacgacgaaggctgacgggatcgcaaaccgcaatgctcgtcccaagaagccaggtacgtagcgccgtgggttggtgagcatggccaggaagaatgccggtgcacccaaaatcaggaaatcgatcgtggagtactgccggggcaggaacgggaacgtccagagcaaggcgccgaacgccaacgcaaagaatgtcgcgaaggttgtcttggtgaggaagagattcgacagccgttccgtgttcgcaatgacttggcggccttcagaaagcacgtggggcaaccgggagaacttgttatccagcagcaccatacgcgaaaccgccttggtggccggagctgcatcccccatggcaatgccaacgtctgcggtcttgagcgccatggcgtcattgacaccgtcaccggtcatggcaacaacgtgcttacgcgactgcaacgcctcgaccatggccttcttttggtcgggggagacccggccgaaaacagagtaggcctccatgacctcggccagctcttccttgtcggtgggcaggtcgcggccgtcgaacccggtttcggcgttctggaatccgacctcccgcgccaccgcagctacggtgagcgggttgtccccggatatgacttttagatccacgccttgctgcgtgaagaacttgagtgtttccgctgcgtccgagcgcacgttttcagtgaacgtcaggatggcttgcgtctgcaagtccgctgggagatacgcgttggtggcctgctcttcactgatctcttcgggatggtaggacagcaccatggtgcgcagtccctgctgtgcgaattctctggctcgggcgacttcgttgttatcccggtcagcagataagagcgcttcgggcgcacctagataccagctgccgcgtgctggcccccggtcgtacacgacaccggagaaacggcgtgcagacgagaacgggatctgtcggcagggctggtcagaaagatcgttgctgaacgcgtcatgcagggccatggcggtgggattggcatgcggatctgcgccaatgtagcccaagactgagcgggccggtaacgtggcttcgccaacgggatggaattcgccaaagctgaccccaccctcggtcagggttccggtcttgtctaggcacaccgtgtcgactcgggccagcagttcgactgccggttgctcttggatgagcacttgcttgctggcgagcttcagggccgccagtgcgaacgcgatcgtcgtcatgagggctaggccctgcgggatgcccgcggtgatggcggcgacggaagatacggccgcgtctttccattcaccactttgccaggcttgggcccagccaccccgagcgatcatctgactgttcagcacaatcgcgatgatcggcaccaaagcgacggtgatccacttgaccacccgttccaggctgccgcggagttcggagttgatcttggagaacttacgcgcttctttggtgatcttggctgcatgcgaatctgcaccaacagcagtcaccaggtaggtgccgttgccggagaggacggcagaacctgaataggcagagtcgtgcgtgaccttggggatcgggtcggcctcacccgtgagcagagcctcatcaatttcgaggccatcagagctgatgatgaccccgtcagcgggaagctgatctccgcgggacaggacgatcacatcgtccaccacaatgtccgcgatcttaatgccgatgacttcaccgtcgcggatcacgttgatcgcatcctgattcaataccgcaatgcgatccaacttaaccttggccgagtactcctgaatcaggccgatgaccacgttggagacggcggcaaaaacaaagagtgtgtcgaaccagcgccccagcatgatgacgatagccgcgcacacgcccaacacgagattgaagaccgtaaacaggtgcgaggacaggattgcccacaccgagcgggaggtttccatccgctgagagttgaccttgcccgccgctacacgttcggccacctggtcggcggtaagcccactataggcgtgcgggggaagctcagtactggctgatgcggtggtcgactgcaacaggggcctctatatctacaatgattggcaaggtacgcctttaatctatgtcaccgcgcgccacatgtgttcgtgtttgagggtgatcttacgcctgtgttcctcatcctgtaggggtaatcaaaatagtaagcaagggttcgaatgtgtaagaataggggttatacgaactatcgaatgtgatcgaatcagaatggggtgcggctgtgcagaatagtagtgagcgtcaggattcggttagcacctctgccggcggcatcctgaccgtcacggccgcgcaggttgatcatcgcaacctaggtgccgtcgttaactttcagaccatggccggggaccgcgtgattggtttcctcgaatgcatcaccatcaaagcagcaggtgggctcactttcaccgtggccggcgccgactacaaggttgaagccgagcaagaggtcgaagtgtccctgccccggcaggtcatctcgttgatgaacatctcccgctacgtcaacgacctgaaggacgccggccgccataactggtagccctcgaacacgcgctgtaataatcgaattacattcgaatagatattcggatattgtattctttgcctatttttctccttaaactgtcgccggctttttctatgatctcaatcacggagtcagaaacgggataaggtaaatcccattgtcactggcaccatccttctagcggattgaggagcaggaaatgcgatatctagttgggattgacgtaggcgaccgcagcgtcggaatcgcggcgtttgaggttgacgatgctgggattccattacggcgactttcattccagtcagtcaggcacgatggaggtcttcagccgggtagcgagaaatctcccgtcagccgtcgggctaccagtggcatcgcgcgaagaatgagacggctcatcaaacgaaaaagagcacgtttaagaaaactcgatgccaaattgcgagaacttggttacccggttccgacggttgaagttccacaaacttatgaagcttggcatgcacgttcgaggcttgtgactgagcaaattcatgatgagcgggagctccgggaattggtcagcatggggctgcgccacattgctcgtcaccgaggctggaggaatccgtattggtcttggtcgcggttgaaacaagcccctgtaccctctgcgagcctgcaaaaaattcgggttgatgcagctgcaaccctaggtcgagattttagcaacggagaaatcacgctcggccagatcggttggctgggtgctaatagagatacgttgatccgtccccgtgaaaacgagcggtcgaagaagactggccgtacgccacttttcaatcatcgcctcatgcaagaggatcatctccaagaaattcgcatgatttggaagacccaaggtcttccgcaccgtcacctagaagcattgaccaaagctatctttcatcaggaaaaaccaggggtgcctgcagagaatgtaggtcgcgattccttgccgggtcgagctcacctgcgacgggcgcttcgatcctcagaggtttttgaaagatttcgactcgttgcggttctgcgaaacctacgcgtaaaaaatgctccgaacgaagagtatattcctcttaatgaggaacagtttcaaactctcctagatctcctaacacgatggcatcttgaaagagggcagaaaggggagcgcccgacatggggagatcttgctgaggttctgcatgttgaacttccatggattcgaaagggcaatttcgacggcgatccaacaactggggtgccagtgctggattctgccctaaaactgaacggtgtttttgagaaaaacaagaaaaacgcatctgaggcatacgaatggtggttggaggcgtcttctgaagacagaaatgacctgattcgttttcttgacgaagttgcagaagacgatgaagacccagttagcgaagagatttctgaactggtcgcgacttggccagaagaactgattggtgccttggaaggtgccaatctgactgcggggagagcaagttattcggagcagtccctgcaagagcttactgacctgatgctcaacgaaaggctaaacctgcatgaggctagaaagaaagcatttggagtagatgactcttggaaaccaaagccccccagtattcaggagagaactaaacagcctgctgtagaccgggtattggcgatcgtacgacagacgatcatgggcttagtcagcaagtatggaattcctgatgacgtagttgtcgaacatgctcggtcgggtctgatgggaccacaagcgagagcggaataccaacgggagatcgcagccaaccgaaaccggcgacaaaaaatcgcaaataacctcaagacagagaaacaggttgataatccgacaggggtcgatatccgtcgggaaatcgttttccagcgtcaacgtggggagtgtttgtactgcggaagtggccttgaaggaggattcgagcttgaccacatagtttcccgtgcggatggaggcgcaaacacacgtgaaaatctggttgcggcatgccggaaatgcaatgcggcaaaacatcgtaggccatttgccgttttcgccaaaactagttcacttcctggcgtcagcgtcgcggaagcggtcgctagggtccgtagctggcagcaaccgcagctggattctcagagagatctcagaagactacagcagcgggttatccagcgtctgagacagaccgaggatgatgagcctatcgacgacagaagtcttgcttcaacgcagtattcggctctggaagttaggagccggttacaaggattcttagattctgaagcaaataagcgcggtcaatcatcccctcaggttcaggtatattcgggccggattgtttcggctgctagaaaagcttccggaatcgatggacaactccgtctcaggggcgcggaaataaaatctcgctcagattatcgtcatcatgcgatcgacgctgcagtgatcgcgatgatgaatccaagtattgccagaaccttggcaaaacgagagtccctcagagaggcccatcgattcacgaataattatccagactggcaagggttcacaggctcaacggcaggcatgaggaaccagtttgagagttggaaattgcggatgcaagcacttgccgaattacttcaagaatcggtccgcgaggaccgcatcgttgtgaagaatgttctccggctcagaccagaacgcggatccgtgcacgccgatacgatcgctgccttggaattaaagacagcaggagaagagtggacgtccaaacatgtagcgcgtatcgcctcgcctgatgtgtacctacgattcaagagtgctctgggcaaaaccaaaactttcattccagcaaacgctagcgaactggatgattgcggtttgaaaccagaatcagaaattcaactgttccgaaggcccgggcctcaaatcatcgttcgcggtggatcggcgaccatcggcgacaatatccatcacgcgcggatattttcttggaaggatcgaaacggcgcaatgctgtttggtgtgcagcggatctttacagctgaactaccgttgatatttgggcctaattacaaacaaagagacttgttctcgggcgaaattccagaatggtcgttcggacatagggacatgcaggccactgttgtcaaaactctcgaaaatgggttggcaaaacaaatcgggtggtttgttgtcggtgatgagctcgaagttgatcctgcagattttgaagatggtaaagatcaattctcccgattcctaagggaaatgccggaaacgaggtgggaagtccgaggactgcctgagtcaagattggttttagtgaggccacactatttgtcgacggaacagatccctagttccttgagtaaggacgttcaacaggtttgggagaaagggtgcagagtttcggcttcgagtctcctgtctgctccgggaaccacattcattagaagagcttccttaggaatgccgatttgggcgagtaatgggaggcaacagatcttttcctttaatgtgactcaacgagcagagcacttgttagaaagcgatgaagcaaatgaagtggcaagtagttgatctcactaattttgacggaagtgtgtctgccaagaccggctggcttcacgtcggtgaggacaaacttcctttagctaacgtggggtccatactgattggtccggattgttcttggggccacggtgttgcgcatcatgcggctgaacacgattgttctgtcgtactctgcgattggcgtggagtgccgattgccacggtccttccgttttcggaaaactcgagggttggagcgagacatcgtgctcaagcgcaactgagtattccgaggcaaaagaatgcatgggcaaggattgtcaaagccaaggtgttgggccaatccagagttctcgatcatattggctcgatggcgagtgctcgtctggaaacactgtcccgactggttaggtctggggatccgaccaatgttgaagctcaggcagcgcagatatattggaaatctcttttcggcgatagtagctatcgccgaattcctggagctcgagactttcataatgcagtgttgaactacggctacaccatcttaaggggtcgggtaatacagagtattgttgcggcaggactttcaccttcgttaggtgtcttccaccgccatagagcaaacgtattcgcacttgctgacgatctcatagaacctttcaggccggcggttgatgcgcttgctgttcgaattgtaaacgaaggtgcggagtcgcttgatagcgaaactaaacgcgcgttagtgggtgtcttggaaacttgttggtctagaaaaggagaatcactagcgacagcggtcttgaatctaacgcaacgctacgcttcctacgtcgagggagagaaggacaagttgcgggtcggcgcgtatttggaggcaggaaagtgagtgatccaatgtggatgttgaccatgtttgacctgcctgttaagacagctgtccaacgaagagacgctacagaatacagaaaatcgctcgttaacttgggattcgcgatggttcaattaagcgtctattccaaatatctgccgacagctgctcagtcgacacggctattgcggctaatcacctacaatattcccgctggcggtgcggtgagggtctatcgactatccgatactcagtggcacggttctacggtattttttggagacatcgagatcgagccagaaaaggagcctcctcaactattcctgttttgagaaaaacggaaggcccccgttttggcgggggcctttaataagtttggtcttagagacctttattaggaagcctcgttcaaacttcctgctaagctgcgttaatcataacagaaaaacagcgtggtagaagctctggcacgcaggtggaagccaatttttcttatgtgtatttccgctgtggccctctgaattcaacgattttcaagggtattaaagcttagcaaggagtctgaacgaggattcccaactgatccccacacggttcatgatgcgccaaaagcttagcaaggagtctgaacgaggattcccaactatacgatgggacgccacctgacactggaaagcttagcaaggagtctgaacgaggattcccaactgatgatgtcagcaagctcgctggctagaaagcttagcaaggagtctgaacgaggattcccaacgttgtcgttcgcggccatttctgcacggaaagcttagcaaggagtctgaacgaggattcccaacgcgaaattgattgctgcatcgaagaacgaaagcttagcaaggagtctgaacgaggattcccaacttcatgaccctaaccagatcgtcgcggaaaagcttagcaaggagtctgaacgaggattcccaaccgagttcgtacaacccaccggtgcgcacaaagcttagcaaggagtctgaacgaggattcccaacttcccgttcttcaaccgcccgttagcgtaaagcttagcaaggagtctgaacgaggattcccaacgtcgtcgtcttcgtctccgatgacgggaaaagcttagcaaggagtctgaacgaggattcccaacgaagtacacgactgtgcttgctgagaggaaagcttagcaaggagtctgaacgaggattcccaactcatcgcgcgcgcatcggtaagcaatagaaagcttagcaaggagtctgaacgaggattcccaactcatcgcgcgcgcatcggtaagcaatagaaagcttagcaaggagtctgaacgaggattcccaacttctgctgaataaacaggagaatagccaaaagcttagcaaggagtctgaacgaggattcccaacttgacccgtggcaggtcgtcgtactcggaaagcttagcaaggagtctgaacgaggattcccaactgctgcgccggagtttgttccgggggcaaaagcttagcaaggagtctgaacgaggattcccaactggtgagcgcgcgttagcgtcgaagctcaaagcttagcaaggagtctgaacgatggtccttgacacctccagttcgcagctcttcacgaagtctgacggggcgggatggaacgtagaggaccagagatggaggggtcttacccctgccgcgctttgaatcgcgggttcttcttgttgatgacaaagacccgtccgcgacgccgaactacctgagcgccagggatctgcttgagtgttttgagtgaatttcttactttcatagtgttccttcttccgtgatgtgactaatgggtgcgtgagtgcttgggagaaaccgttctaacagtccggtatccaggttttctccggtgaaactaacctccgtgtaggcaagttcctcaactgggtgccacgggccccggttctcgacccacacttgtgggccacagccttggacgtgcaaccggtctgttaggtgcgaatccagccacagctgaccccggatgcggacactgccggcagcgagctccggcaagtaccggtagaactgctcagagggtaaaggcagctcatggtgcagaaccaccgtttggaagcgtccagtgtggacgttctcgccgagcgcggcactgaccctgtgtagggcatctcccaagttgtgggagcctaaccgtgaggcgttaccgcagatcctccgctgttgagaagggcacgttatacgccgagcgtgcggggacagggtgctgatgaggtcgatgccgcgctcgcgagccgttccactgggtgaccaaatttcagagcttgccaagaacacggtgtcgacgaaatcaagttccgtgttcaggaattggtgttgctcatcagtggtgtcccacagctgatcctcaatccaatttgggtcaacggctatcccgcaagtcatgaccgtgctgttggataactcggcatctacgcgggcggcaaggctggaactggaagtcagcgtaggcaatgcaatcacgccattgctgctttgaggctctcgagcgttgagttctacgagcacgttccagactgagctctcggtgcgctgcatgacgccggtacgagtatctaggatctcaaagtgatcattaccaatggcccggaccaccacgtcggcccgggtcagctcggcagctgctctcaacccttgatgagaagcgagctggtcgcttgccgatagcaatatgagtttcattctcaacaagttacatgagaatagttctcataatgaatagtgccggcactataagttgccacttaagcagctttggaccccgccagctgtaggcggagtccaaagctgtggtggaaatcggtgcgctattccacgggggtttccttgcgggtcgtgggaataatggccacgaataccgcggccaagacgcctacgacagcgaagatgatgaagttccactcgaatccgagtgccatgcctgcgatccaaccgccgagcagcggtcccgcaatcgcacccacgcgagcgaaactgagtgcccagccggttgcggtggctcgagcgtaagcggggtagtagtctgcaacccaaccggtgagtaccagcgaggtcgcaattgttccaacaccggccagcgcgacgaagatgtagttcacgagcatgctgttcgggaacatcagcagcaggatgcctgcggcgccgagcacgtagaagacaacgaggatcaacttcttgccatacttgtcggctgcaccaccaatgagaatgccgccgattgcggaggctagggagaagaccgccaagaagagaatcgaggagcctagctcatagcctgcctccttcatgatgtttggcaaccaggtgttcaggccatagaccaagagcagtccgcagaacagcgccacccagaacccgatggtcgccactcggtagccgcgcgaaaacatgaccgatagtgagtctttccagcttgtgtgctgcttctgcggggactttgccggcatccattcggcctcatggtacgggttgatgccaagctcggcagcgtgctggcgagctttctcgcgttcgccgcgaatgagtagggactccatcgattccggaagcttccagatcaacagcgggaccaaaagtactgggacggcgccaatgccgatgacccagcgccagccagcctgctccagaattgcgaaagcaaccatcgctgcagccaagatgccgagcgagtagcccgaatacatcaagccgtagttcaaagagcgcttgcgcgggtgcgaaaattcaatggtcatggccgcggcaacggggatgatgccgcccatccccagaccgccaatgaggcggaagagtccaaagagttctggggtgggtgccaatgcggcgcccaattgagcggtggtgaaaatgaccacggagatgatcagcatctttttgcgacctagccggtcagagaggctgccgatgagcatggcgccgatcatcataccgatcagggcttgggagccgagtgcgccggcctgcagtggggtcagggaccaaggctcgtatgcaatgagggcaggcatgacagcaccaaggacacctacgtcataaccctcagccaaaatagagatccaacagaggaacaagacccgatttgtcgttcgggcgggcaccggccatgacggcgtcgacggcgccatagtggcggaggtttgttgtgtaaccatgaagaaactctaagtgcgaaatttaaggagcaccaaaatgcattacctaaaagtttcgctactgcctaagcctcttatcgtctgaaatgcactagatcgataggacacagctttcgttggcctgaatttcacatagacggccaagctcgtcatggtctcaacgaacaatatgtgaacccaagttgccgtgacatacttgaaatctgctaattgtttcgcggagttccgttttcgggtcagatgctccatctcagctcgctgtcagaactaagcggaacggggcagcccatcttcacgtcattcatttagcgggtatagaagacccaaggtgacagagtcgttcaaggagtcgcaatcgtgagtaatgtccaaactcagaagcaaaatcttgtccttcagctggctggcgccctagcggatcagtccgtcaagatcgtggatctgactaacaagctctccgatcaaactccaacgctgcagttgccggagcccttcaagaacctgaacgacttttccctggaagaggtggcccgctacgacgaaaacggcccgctgtggcgtcaccaaaacatctccatgggtgagcatattggtactcacattgatgcgccgattcactggatcagtggcaaggatggcaagtgcgtggcgtccattgaaccagagcgacttgtcggcccagcggccgtacttgatgtttcagagcaagttgctgcggacgcggatttcttggtggatgtagccgacatcaaggcgtgggaagccgaacatggcccgctgccgcagaacggttggttgctggtacgtaccggctgggaccagtacgcccaagaccaagaagcattcgtcaacattgacgagaacggctcccacacacctggtttcacggcagaatgtgcccgttggctggccgaggacaccgagatctccggtgttggtgttgaaactgttggcatcgaccaaggtaacgcagccacactggaaccaccgttccccatgcactactacctgctgggtaacgataagtacggggtgacctctctgcagaatctctccaccttgccggctaccggtgccgttgtggtggttagcccactgccgatcgttgatggaaccggtagtccttgccgcgtctttgcgctggtggagggctaaccaactcatgacaaacaccgttgcagaccaagtaggaacttatctggcgcaactcggtgtaggacatgccttcggagtcgtgggtagtggcaactttgttatcactaacgcacttcgtcgagccggtgtgcccttcaccgccactcgtcacgagggtggcgcagccaccatggcagacgcctacgctcgcatgagcggtgaggtagctgttctttccgtgcaccaaggctgtggactgactaacgccgccaccggtatcggtgaggccgccaagtccagaaccccgatgatcgtgttggcggcagagactgcagcctccgcgattcactccaacttcgccatggatcaaaaggccttcgctgaatcgatgggagcggtggccgaacggattcactcaccggcctctgcgctcgcggacaccttgcgggcttatcgaacggcggtccggcagcggcgaaccgtggtgctgaatctccctctcgacgttcaagccgctgaaccggtcgggcagatgccaaccgacacagtcgaacctgcgccaggggtggcaccaagtctcgagcaggtcaacgcattgaccgaagccttgcgcaacagcctgcgtccggtctttattgctggccgcggcgggcgtggcgccaaggaagagattcaggctttggcccatgacgtcggtgcccttgtggcgaccagcgcggtggcaaaaggtctgttcaacggtgacgacttcaatttgggaatctccggcgggttctcctcaccattgaccgcagaactgatttcgcaggccgatctcatcctctctttcggctgcgcgttgaacatgtggaccatgcgccatggaacactcatcggggaagaaaccacggtcgcccaaatcgatattgaagacgccaacctcggcgctcaccgaccggtcgatatcgggatcgtcggtgacagtgcggctacggctaccgccctgcgtgaggccctgctcaatgatttaggcgagcgttatcgtaccgaagaaatcaaagagcggattgccaacgaagcgcgttgggaccagaccgacaccccagatctgggggagccgggggtaagcattgacccacgggaattgagtaaacgggtcaatgaattgcttccagccgaacggatcgtctcgatcgactccggcaacttcatgggctacccaagccaatacttggacgtgccagacgagttcggattttgcttcacgcaagcgttccaggcaatcggactgggactctacacttccatcggcgctgccctagcccagccggatcggatgccagttcttggcactggtgacggtggattcctgatgggagctcaagagctggaaacggctgtacggctgaagttgccactcgtggtcatcgtctacaatgatgccgcctacgccgctgaagttcaccacttcggtagcgacgtagatctcgataccgtcatcttcccggacaccgacattgctgcgttagcgcgcggttatggtgcaacaggcatcaccgttcgggacgttgcggatctggatcagcttgcagactgggtgaactcgaacccgcaagcaccgattgtgatcgatgccaagatcgccaatgacggtggctcgtggtggctggccgaagccttcaaaggacactagcgccgctgggtcccacacacatggcacgtatcctcgagcgatgccattttcgttggctgcaccgaacgtaaagaagtaaggcaggggctgatccgcagcgtggcgctccaagattttgctgagcggattcaagatcaatgaatcattgttgagctttagcccatccttccaatcggcgaagtactcatagagcgttctcttgagcctgcgctaaatctatctatgtcgatgaaaatgcgattacatggttgctgaattacttctatttcgccggttatcgatgtaataaacaaattctatttatcactcgccaaatcgcgtggatcgctgtgctgatcgctctatgtggggagagttctccgtagaaaaagtgacggaaaagaagcattttcagtcacaaacagcttcacgcttcttccttccatatccttatgtgggggtcgtgtagccgactttatgacggcatcacgctcccaatcatcaccgccttgcgcggtaaataggggatatctaaatagggggattcgtggctgtttcagcacgtccacgccgtattcgcgatgtccgaactcgcaccaagaaacggttgctttccaccgcccaaaagtccggcgtgattgcagctagtttgatggtagttttcggaaccgtgtttaccggcggagccatcgccactggcgagaacttaccagaaccaacatcagcagtttccgaaaccgtggttgaggaaaccgctgaagcgactccgacgacggagaaaacaaccgaggaagcgactcaggaaaaaactgagcaggcatccaacccggccaagaagccggaaaaaccggctgcaccaaaaccatcaacgcagccttcggaacgaccttcagcaccggccagcccgagtgcgccagccgaccaacgtggtccactcagtgacagcggtgtcgggatcaaggccttcccgactccagcaccactgccgaacccgaacttgccacaaaaatgtggactcaacattgccttggtttttgacctgtccaactcgctgacggacgctgacatcaccagttcgaagaacgctggcgtgagcttggttgacagtctgcaagggacccctacctcgatggggatctacagctttgcctcgttggctccagcgcccaacaacaccaacctcggtttgacatcgatcgcgaccgcagagggtagtgaccaggttcggtccaagatccagaacttggtgcgcccaccctcgaaccgcggtggcaccaactgggatcgtggcttagcccagatcccagccggctatgacatcgtcttattcgtgacggatggcaaccccaccgcttacggaaccccgggcactccagggaactccgactggggttcaagcttcgaccagattgatattgatactgctacagcttcatcaaacgcgttgaaacgtgggggcgcctttgtcatgggaattggcgtgggtcgactcaccgaagcgaacttgcggtacatctccggagacaatgtcaatcaggattactacctgatcggaaattacgatcttcttgaggcaaagctccgtgaaatcgggctgaagaactgtgaaggtaccatcaccgtcaacaagcaggttcgcgatcttaacggtgacctgtctgccggtgcgggctgggacttcagcactgacaccaccaatgtgacaccggcatccgggaccactaacgctgacggtgtcgtcaacttcaaggttgaaggcatcgactgggaccaatcccgtgccgtgacaatcgccgagtccctgcaggagggctacgcgcttgaacaacaagacggcaagaatgccgtctgcgtggatcgggccagccaggaacctgtgaccgccaccaacgcgggcgaccttggcttcaaggtggacgtcacatccactcaagtagtggtctgtaccgtgatcaacaagatggttccaaaaccattgaagctgaccaagacggccaaaaccgcctacaagtccagctacgcctggggcatcaccaaggatgtcgacaagaccaacttcgtgatcaacgaaggtgacgagaacccgaccgccaactacacggtagaagttaccgagggtgcgcgtaccaattcggattacgccgtgaccggcaagatcacggtc

SEQ ID NO: 4346 - DNA, 23417 bp, synthetic construct
  source 1..23417: mol_type = other DNA
  misc_feature 1..23417: note = Synthetic
cgaggggttcgatagcctgaccgtgttttctaaacagcgccccccacaggggtccatcaaccacaggagataagcatgtccgctcctcagcagccttcctacggccagcccggtttcaaccagcccgctcagggcaagtcccgcatggtcgctggcctgctcaacttcttcttcggcggcattggtgccggtgacttctacctgggacacacgaaggttggcctggccaagattgccgcgctggtcgtgagctacgctctggtcatcatcggtaccgccaacaacatcacggccctggctacgatcggtagcctgctggtcttcgccttcggtctcttcgtcttcgtgtgcatgatcctgaccttcatgggcaagtggatctacgcgaaggatggtaagggcgttccgaccgtctgaatcttttcccgcgtcgcgcgcggctgacgtcgcgcgcgtgatcgctcagggtgtggggtccggccgcgtgccggaccccacacccgtatccgctgcgcttccatgcctccctttcggggcctctgacgtgtcccctgacttcctccggggataatcaggggcgtttcggggtgggagcctctaccgtgcgggtgcctttgcgcgctaggctgtacgagtatggccggtctcggccctcacgactatcgaaaggctcttccatgacgacgcccgacccgcaggtcaacccccacaaccctgaggaccccgcgaaggcttccgccgctgcagttccctcgggcagctcctctgttcccgagatgcctgcgatcgataccacggccgagatgcctgctcccgagattcccgcgtccgaaacgccaagcttcccccaggcctcggcccccgattttgatgaggccacggccacgcccggcacgaccagctacgccgcggcatacgacgctgcggtgcccgcccccgaggtgccctcgaaccaggccgcctacggagctcagcctggcggccagcccggctatgatcaggcggcttacggcggtcaacccggcggccagccgggctatgatcaggccgcctatggcgctcagcctggcggtcaccccggctatggtcaggcggcttacggcggtcagcccggctatgatcaggcggcctacggagcccagcccggttacggacaacccggctacggccaggtctatgcgggcccgcccaagcagtggatcgtcgctgttctcctggcattcttcctgggagccttcggtgtccataacttctacctgggctatgcggcgcgcggcatcatccagctgatcctgacgctcaccttcgtcggagcaatcgtctctggcatctgggcgttcatcgaattcatcctgatcctcatgcgttccggttcctacggctgcgacgcgcaaggtcagcctttgcagtgaccagggtgtcgtcgcggcgctgagtgtgcgacaatcgaatcatgctgctcagtgaccgcgacatcaacgcctccctggacgctggacgtattctgctggatcccctggatcgtgacttggtccagccggccagcatcgacgtgaggctggatcgtctgttccgcctcttcgataaccacaggtacccggtgatcgaccccgcggcagatcagccggacctgacgcacctggtggacgtgggcccggatgaccccttcgtcctgcacccgggcgagtttgtcctcggtgccactttcgaactggtgacgctcggcgacgacatcgcggcgcgcctggaaggcaagtcgtcgctggggcgcctgggcctgctcacgcactctacggcgggcttcattgaccccggtttctcggggcacgtgacccttgagctgtcgaataccgcgacgatgccgatcctgctgtacccgggcatgaagatcggtcagctctgcttctttgacctatcatctcccgcccagcacccctacggcgcgcaggggttgggttctcactaccaggggcagcgaggccccacgccgtcgcggacccacgaacgcttcacgcgcactcgcatcgaacggtgacatagatggtatctcttccccctccgcctccgtctaggcgtgaacgcatgcgcgctgagcgcgccgcgcgcgcggtgagctatccccccgcgccggatgctcccgctcccgcacctgcgaccgccaccttgcaggagccgcccgtaccgacgccagtgatggggatccccctgatgggggcaggcggcgaggcaaaggccgccatgccgccggtggccccggcctcggcctcggcccgaacgggcgtgatccagggcgtcacgctgccgggcatgacgccgcgctcttcgggggcgacgaatcgggaccagcaggccccggcctcgccgcagaggcgttccctgaaggaacgcatggccagcgcgccccacgcgtttgcggacccgaacccgctaacgtcgtcgggcgccagccccctgacgcagacgaacgtttccctgaacgctatgaccgagacggacgcggctttccaggtcgcggcggacggtgagatcaccagcgcggagtcggcggcccccatcgccgcggcgattgaggtgaacgaaccggccggcgtcatcgacacgcaggaggccctcgaacaccatctcttcctggtatcggacgcggtcgaccccgccgagcttgaggcgcttgcaatatccatgtgggacgagtccgggtggatcgcgccggggcgcctgcgcctgtcctccgacgccgagctcgaagggccgtgggcggtggatcagccgacgcgcgcggcattggggaccccggcctcgttgacgaacgcgtggatcctgcgctgcccgatcgcccgcgcccgacagcagggcagcggcgtcatgggagagtggacgaaggcgttccccgaaggagttcccaccgggctggagtaccgggtgcttgaggcgatgcgtcgcatggcgcgccgcctggccggaggcatgcgcatcgcgggcagcggctacgtgttggttcccgacgcggactccgcggtgaacctgacggtgtactcgccgcgctggatcgcgcccgaggatctgctggccgcgatgcgtgaacgcgccggtttcgccgacatgaaggacgcgcgcgacatcaccccaaaggctcccaaggcgccgccgctgacgcccgcgcaggtcgcccagatcgagaagttgcaggccgagctgggtccggtccgcgaggatatcgcctcgaagatcgccaaggcccgcgaggagcttgaagcccagagcgataagccgcaggttgtcgacggttacgcgctcatgagcccgatcggaaacaggtcggacatgatggtcgaggtccacacggtgcccacgccgccgcgcgtgctgcgctgggagccgtggacggccggagcgatcattgagtatcaggtgaggtggctgcccggagccgctccgactcccggcgtgggagcgatgagccgcaccgcgcgccttgagcggctgcgttccacgcaggacgtggagaaggcagccggaatgatcgccaccctggtgggcggaaacgtcattgacgaggatggcttcttggtcggcctggaggagatagccccggaggacgaggaagatcctccctcgagtgcggatggcgcgggcctcgggcaataggcggtgcgtgcgcgcagccaacgaatcgaacgggcaatccacgacgcctgagcgtgcaaccgggcgcatgtcagtgcctgccattgaccggtcttcctgccaaaggggcccgcgcgtgtttgcggagccactcgctggccggggtaagtcgatccgtgtcccgtgagcgggcccggtatcctactggccgcgcttgacggcctcgagcagcatgacggcgacgtcgcgcacctcgggcagctttccgcccgcctcgcccgtcggttccggggcatcgtcggcgcccccggaccggcgcggaggcgcgtcaccggaaatgaagcccgccgacgcgccggaggcagaacccagcatctgtgtgcagaacgggcacgcggtggccaccacgtccgcgcccgcttgcgcggcctcggcaatacgcgcgtcagcgatgcgggtgccgcgcgtctcctcgaaccaggcgtgtgcgccgccagcgccgcagcacatggcgcgctcgcggttgcgcggcatctccaccagttccacgcccggcagggaacccacgagctcacgcggtggttcgtagatgcggttgtggcggcccaggaagcaggcgtcgtggtaggtgactttcagggggacgcccggctcggttgcccgtgtcgaggaaccgtccctggcgtgggcgtccgcctggccggcgggggagggagtggaagcgaccggcgtgagcaggccgtcgcgcacgagtcgattgaggagctgcgtgtggtggaccacgtcgaagctgccgcccagctccgggtactccccggcgatcgtgttaaagcaatgcgcgcaggagacgacgatcgtgcgaggctttgcgtcgttcagggtgtcgatcgcctgggcggcaagcatctggaagagggcctcgtttccggctcggcgcgccgggtcgcccgtgcatgattctccggatccgaggaccgcgaaggatacgccggccgtgtgcaggagctgggcgatggccgcgctggtttttttcgcggtgtcgtcgtaggcgcccgcgcagcccacccagaacaggtagtcgaccgtcgacgcgtcctcgatgtcctcgccgacgacgggcacctcgaagtccagcttcttggcccagtccatgcgtttgcgggcgctctggttgtaggggttcgccttggattccatgccgcggaacgcgcgccccagctcgcgggggaatgcgccctccatgagcacctggtggcggcgcaggtccaggatgtggtcgatgtgctcgatgtcgatggggcactggtcgacgcatgcgccgcagtttgtacagtcccagaggacctcctcggagacgacgcccggcaccaggggagcggtgacgggagagacgccttcgctgccgctcgcgccggacagggagagcgcggacaccaggtcgaaggagtgcggcgaggccggcacccctttgtccagcaacacctggtcgtcgtcaaggtgctggtctccctcttcctgctctaggatttgcacggaggaagcggactccatgtggtcgcgcaggctcatgatgagcagcttgggggagaggggcttttgtgtgttccacgcggggcacagttcctggcagcgcccgcattcggtgcacgcgtagaagtccagtcgggccttccaggaaaagtcatcaaccgtgcccacgcccaggacggtgtcctcgggcacgtcgtcgaaatcgtcttcgctggtgacggggtttccgtcgatgatcatgtggtcggccgcgcccagggacttggttccgtcagcgttccggcgggcgtacaggttcagtaccgccacgaagcggtgccacgcgacgcccatgccggtctgcactcccacgaccgtcaaccaggtcatcgaggtgatgaccttgatggcgctgacgacgacgatcgcgtttgccagcgtcgcagaggaggatgcggcggctgacgcgcagagggatcccagccacgcggtgagcgggaagtgcagggcactcgcccgatccgcgaggctgggtatgacgctaaacagcgcgaattccagggcgcgcagggcgattacgcatgcgcacacgatgaggatgacccactcgacgaagagcgcctgccagcgggtggatcccaggaaacgggatgccaggccgcgcggcgatgagtcgcgggggtgggggtgcggcagcgacgagggcaggggggagcgcgggtcggcctgggtcaccgctgcgtccgggtcgtcgttcgacagcgccgcctccgcggcggatccgtgtccggcgcgctggcggaccaccatcaacaggatgatgccgatcaggccgccccacgcgaaggcctcggtcagccactcccagggtgcgaaatgtccgagcagcggcagcgtgaaggtttggacccgcagctgcgcgtaccccgtgatcagcgtcaggaacaggatcgggaaggacaccatgaccagccagtgggccgccttgatccacgggcggcccttaaactcgcggtgcgtcagcgcggcggacacgacgccccacagacgcctcccgacggggcgcagccgccccggggctggctttcccgatgcgactgtccgccacatgtgcgcaagcccccgcgcaaatgacaccgcggccagagcgctcaccagcagggccagtccccacatgatggcgctaagcgtcggattggccacgtttcctcctcacggttgctgcactcattgtgtcacctcgaccatgcgctgaacgaatggaccgggggaaactgtgcgcaattcacgcgatccgccccgattgtccacgtgcgtgctcctcaacgtggacaggcaccacagggcgtcagaaagcgacagggcggatcgtgttccgcctggcggccagacacaacacggcctgaccggggtatcttcggcgatgaccacccgcacgatggggcacgtctgcaacggcgcgaccggcgcacacctgcggcatgacgcccagcccgcctcgggcctaacccaccggcacgctggcgcacaacggtaacctgaggacgtcgtctagctgcgcgaggcgggggcccagcggttctggccccgcgcgcccatccatcgcgaacgggcacggcaaagcggcgggcgatgaccggttagccgggtggctcagccgttacttggaggaggattcacccgtccagaaggactcgtcgagctgtttcgggtcgatgtcgtcgtcctctgccgggatgttcgcgaagtcggcgtatttcgaatagaggtcgtcgtcgattgcatcgtcctcttcgggctcgtccacggcggcgtgcgccgtgtgcgagtcctcatccgccagctcgcgctgaagtgcgtttaggtcggtgtcggggctgaagtacttcagcttccgagcgactttcatctgcttagccttttgacggccgcgccccatggcgtcgaccccctccgcgtcgttcgggtccgcgtcaagcggttccctgggtgttcaaagtgtttcgtgggaccatcatagctaatgacgggccttgacctcaccttggactggattttgcgcggatagcggatcggccggggtgtgtcagatgcgtgcaaagtccgggaaatgtggccgttgcgcgtcggtctgtgaccggagttacggtgctgcgctgtgagtgtgggtgcagtcggattgtcggtttcacctttcccgggcacgccttggcgggtgaggcgcgtccgggcgaggctgttatcgagtgccggactcgttcgatgcgagggcggagagcaccagcgcggccgcctcgcgcccggttcggcgggcctggcggcgcgagcgtcgggccgggcgggtcaccagccacgcgatcgctccgagcgcgccgacggcggagagcgcgacgatgccgacgcgcctgagggcctcggtgtcgccttcggccgcttcctgcaaggtgagcgatgcggtttccttgaaggaggccaggcgtgccgtgacgctatcctttacgtcctgcgccagggctgccggttggacgcgtgtgtagagctggtcaatcgtggcggccagttcggctcgcctgcgctccaagtcggcggtgacctgtgcctcggtgcgaggatcgggatcccgtggggaggtggcgggggcgctgacggtcacgttgcgcgggtcgatgttggtgctcacttgcccagtcccttctcgatggctttcttggtggcggtgatcgacgcggccgggtcgggacggtattcctgggcgctcttcagggagcggatgcccaggagcgccaggatcgggacgatcgggaggaggatcccgacgatgatgagtgacgatgcccatgcgggcagcacgagtgacagggcgatctcgatggtgtggagggtccaccccagcaggaagagggcgaagacggcggccgcacccaggagaaatgcgcccttgccgctcctggagaggaacgcgatgagctttgtcttgttcagctcgatctcgtcgcgcacgatgccggagagctggctggtcacggatgcgaagagggtgccgatgctggggcgcgccccgcggtcgccgcgtgcggggtctgagggtggcgagtacttcccgggctgcggggtgggctgtgtcatggggactcctgcgcgtgcggatgaacgaggtgctgcctcgcctaatacgcctagtgtctcacgaagaaagcccgctcgcagagacccgggccttactcccggggcgcgattgatccgggcaggtcagagaggatctgacgagcgcgaactaccagttcggagacttccggttcgtccaggggctgttcctcggcctcgacgacggggatgccgcgcagcgcggtctcggtgcgcggctcgccaggggtctgcgccgcctcggatgcgctctggggcgccgcgtccgctcctgtttcccgggggagatagccctgatcgtcggactctttggtccgggtgggcccgaggagagcctgggggtcctcggggtttgcctccagggaggtggtgatgattgcgacggagggaccgggggcgtccagggcgacgaggccgttcgtgaggaggatcgcgcggtcggtggcggccgcgacctgggtgtccggcgtggacaggacgaccgcgcatccggccgaggcgagggagcgcagcagcgaatccagcttggcgcggtcgggcttgggcagggagacggggtcttcgatgaggaagacctcggcgcccgaaacgatcgcgcgggcgatgagggccttgaagcgctcccactgtgacagctgtgaggggtggacatcgacgcgctgggccaggccggtcaccctgagcgcgcccacgaggctgtcccagtcggctaccgatcccgtcgcggacaggggcgccaggatgttctggcggatcgtcagggattcgtcgaggggggagtcggctcggaccagggcgaccgacccgatgcgcccagcgagacgcgcggccaacgaccgggagggtgccgcgacgacgcggccggcctggggttcctcaaggccggccaggatcagaaataacgcgcgcgccctgacgcccgtcggatccacgatggcgctcagcgtgcgcgcgcggaaaccgaggtccacgtccgccagcagcaccgcgcccgtctcgtgatccgtgtacgtcaggcccaggccggcgacctggactcggccgccgcggccctttgcgctaaaggatcggcgggaacggtaccaggggcgaggctcggcggcgggcaggtgggaccggagcggggtgagggcgaccttgtcctgagtgtcggcgggccgcgcggtcgtggtcggcgctgcctcggacgacgtagcagcggtcgattcggttgcgtccggggtggtggcggccgatgcgggtgaccccgccgccccctccaccgacgagtccgcggcgccctctgcgagggcgtgccgtgtccggggggccgcccctgcctgacgggtcgactctgccaggggggcagactctgcccggtgggcatgctccgaggcggctcgcccggtggcggccgtcaggtcggccaactcccggccttcggtaccgtgcaggttctcacgcgagtcattcgacatgcccccattgtttcagcatcgtgccgattgtgtcgtaatggcgcgcgggagggggtggggtcgggtggcgagaaatcgatgttcagtgtggcttgtgcatcacatgttccagtggtatgctctgagtgattgattctcagtaagggtcgcctcgttagcggctccgaatgctccactgctttgcagtaggccgggttcctcctcgtgaggggcccggtttttttgaaatgcacccaaacgtgtgtgggttgtgccactattagcttatgagtgcttcttcagaaaacatccggggtatccgctaccgcgtcggtattgatgtcggccttcgctccatcggtttctgcgcggtcgaagtcgaccagcgcgatcagccggtgaggctcctaaattcaatggttttcatccacgacgctggcgttgatccaaacgagaacaaggctgcgaagagccgcaagcttactgcgggggtcgcccgccggacgcgtcggctctacctcaccaggcgtcaacgcctgtctaacctggatcgggttttggctaaggagtttggttggccgatcctcgatctatcacggtttaaggatcctctcgagccgtggcatgtccgtgcgcggttgctagagggctatgtggcggacgatgaggagaggcagaaggcattatcgatcgcgttgcgccacatcgcccgacaccgcggttggcgtaatccttacgcgaatgtgcggaccttgcttcagcccaccgaaccgagtgatttcctcatgggattgaacgagcgcatcagcaccgctctcggcaggaactttgccgccgacacggctcccgggcagctggtggatgcgtatctggcgcacccggattacgccgcaaaggcgggtacccccaaacttaggggaccgaagggaattcttgcggggaagctccaccaatcagataacgcagcagagattcgccgtatctgcgacatccaaaagatatcgcccgatgatcgggatcgactgatctgtgccgttttcgaggcgaagtctccgaaggggagcgcgaaggaacggggcttggttggatatgacgagctgcccgggcaaagcgggcacgtgcgcgctgaaaaggcgcacccggcgttccaaaagttccgcatcgttagcgtgctggcgaacctgcgtatccgtgaggggcgtgtggaacgccctctgactcctgacgaactccaagggcttaccgactacctgatggtcgcaggcctaaagcaggagattacgtggcaggacctggcggataacctgggcattgagcgcgcagatctgcggggtacggcaaaggcttcgttcgataactcgcccgtgttgcgcaggcctccgaccgatgtcaccactgagaagatcatggcatgcaaggtcaagtggctcaaggaatggtggaaggaagcagacgaggagcaacgcgggtacgtggtggacgcgttctcgaactccggagggtctgaggatacgaccgacgtcaacgatgaggctgcggagctgtttgagcgggcctccgagcaagaccagctcgaattcgagaagatcgcgctgccgcaggggcgggcggcatattcgctggatagcctgcggcggttgacagaaaggatgttgactgagggcgttgatctacacacagcgcgttgtctggagttccccggtgggaacgactggaggcctcctgtcgaagagatcggagcgccgacgggtaatcctgcggtcgaccgcgtgctgaagcaggtgagtcgttggctccacgcagccacggatcgctggggcgagccgacggtcatcaatatcgagcatgcgcgtgatggactgggctcggaaagagttgctcgtgagctgatgcgggctaatgagcgtcgtcggaaggctaacgcggcagcggttgccgaaatgacggcgcagctcggcatttcagggaagacccgtcgttccgataatatccgctattttgcactccagaggcaggattgtcagtgtctgtattgcggcaccatgatcacctatgagacggctgaaatggatcatattgttcctcgtgctgatgggtcgtcaacgaatgaccgctctaacctggccgcagtgtgccgaacgtgcaaccacaagaagggtgcgatcccttttgcggtatgggcctcgtctgaggacacaaatgagggggtttccctgaagggggctctcgagcgtgtcaggatgtggaagcaagagagcggcatgtcttcgaagcagttgaagcagttgaagcgtgaggtttcggcgcgcctcaagtccactaagctcgacgaggagtttgacgggcgttcgatggagtcggttgcctggatggcggtcgagctgcggacgcgtatcgagggacactatcgcaaacggaatgaatcaaccgtgcccagcgtgggtgtgtaccgtggtcagctgacggccgaggcgaggaaggcctcggggtttgagaaccgtgtgaacctcatcggcgggcgtggtaaaacgcgctttgatcggcgtcatcacgccatggacgccctggtgatcgcgctgatgaacccatcggtgtcgcgaacgctggcactgcggctgaatatgcgtgatgcgcagcgcctgacggggcgcgaagaaacgtggaagaacttctgtgggaagcccggagaagcaacgcagcgcttcgaagcctggcgggagtcgatgctgcgcgcagttgagctattcaacatcatgttgagcgaaaatgcgattccatttgtggagaacattcgcctgcgcgtcggctcgagtgttgttcatgacgcgacggtccattctttctgcccttccaggaccccagaaggtgagcagatccccacaaaggtgtgcggtgaacagtatcctctcggatctgcactgcccgtcgaactgatcgacagggctgagacgccggccctgtggacagcgcttacccgctgtcccgactttgatccccaaaaggggctaccagaggatccgcaccgcgtgatttcggtgaatggaacccgtgttgctccgaccgatttgttgaacttttttggttcttccgcagcctgtctgaaggttcggggcggttacgcggagctcggtagcgcgattcaccacgcacgaatctatcgaatcgatggaaagaaggctacgtatgcgatggtccgggttttccaggttgatttgttgcgtttgaagagccaggatcttttcacaactccgctaaagccatcaaccatctccatgcggaccgcagaaccgaagattcgcaaggcgctcgcggaagggacggcgactcagatcggatggttggttgagggagatgaactccggatcgataccagcaaatacacaggtgggttcgtcggtgatgtattggctcggtatccggagacgacgagctggagagtagcgggcttcaagaccccgtcaaggctacggattaaaccgctatgtctctcgaaagaagggttcgttgatgaaaaacaagccgcgcgacttggagttgaggcaacgacggaagcaataatcaagactgttgacacgcccggctggcttcctgcagttaacgttcttttcggggcgggcggtgtttacgttgtgaggcgaaattgcttgggcgaggagcgtcatcgaccaagttcctcactcccagttacaactattttggagtgatctggcatggccgagcagtggcgcgtcattgacctgtgtggctttgagggagaacttcgatccgtgcgaggtggtgtggaggtttgtcctgatgaagggtcgccgacggtcgtgcctgtcgctgaggttgctgtcgtccttattggaatgcgggtggggctgagtgctgccgtgctacatcgcttgtcagaggctgacatcgctgtgctcttctgtgattggagggggatcccggagggcggctgctactcgtggtccgatcacgggcgggtagcagcccgccaccgggcacaggcggaggtgtcgttgccgcgaaagaaaaacgcgtgggcacgcctcatcagagcgaagattgagggacaggcgagtgttctggcaaatctgaagattcgaggtggcggtgaactactggcgttagcagatcaggttcgttcgggtgatcccggcaatgtcgaggccaaggcggctcgcctgtattggtcgcgcactcttggtcggggagttgggcgtcagcctgcagcgggtcagctgattggcgcaaacgcgtgcctggattatggatactcggtgctgcgtgggcacctgatgagagctgtactggctgctggtcttgcacccgcactcggtgttttccacaaggggcggggtaacgcatttgcgttggcggacgatctgatcgaaccttttaggccagcaatcgatgaggtcgccctgcagcttccgtccacggcttccccgtcggatcgcgaggtgaaacggcttctggtagcggcagcgtcgcagcgctttgacgcggaaggacatgggattcctgctgtggctgagtctctggcgcagtcgtttggacggtacgtggagggggacgtggatcgtctgcgtgtggtgtcgtggcaggggccctcggcggtaggtgtgggtgagtgagatggcggatgacgcaatgtggtgcttggtgatgttcgatcttccggtggagacgaagcggcagcgacgcgaggcaactaggttccgtcatgatttgctggattggggtttttgtatggtccagttcagtgtgtacgtgaagtattggccgaccggtgggcaggaccatgcgacgctgcgtgcgatcaagactcacctaccggaggggggccaggtgcgagtattggctttaacggaccggcagtgggccacggggcttcgttttgagaacgcgaagccccggaaggaagctggaagccccgagcagctcatgattttctgactgagatcccctggttttccgcaggatcctgcggaaaaccaggggatctcagtatatcaaaggggattggtgattgattcccagcgacgacgcccgatcgggtgatcgcggatcagtatatcaaaggggattggtgattgattcccagcgccttgataggacccatcatgcatggaacagtatatcaaaggggattggtgattgattcccagcgaccgggcgagcgagtgttcggggtctgcagtatatcaaaggggattggtgattgattcccagcggcaagtcgcggcccatgctcttccacgcagtatatcaaaggggattggtgattgattcccagccctgctcaagggcatgctgcctgagccgcagtatatcaaaggggattggtgattgattcccagccgggctagtggccctcgcactgagtgctcagtatatcaaaggggattggtgattgattcccagcgatcgcgctcgcgggcacgatcagcctacagtatatcaaaggggattggtgattgattcccagcatcggcgtgctgtgggcgatcgagggcgcagtatatcaaaggggattggtgattgattcccagcggccggtcttcgttgtccccacatcgtgcagtatatcaaaggggattggtgattgattcccagcggacccggcggcgatcttcggcgcggtgcagtatatcaaaggggattggtgattgattcccagctcgtggtgcgaatcgtgggctgtcgaagcagtatatcaaaggggattggtgattgattcccagcgggacgccgcgctcacgcagcgcttcggcagtatatcaaaggggattggtgattgattcccagcgaagacgcggtgtccatcgtagtaggcgcagtatatcaaaggggattggtgattgattcccagcgttgcggcgctcaccatagctccgaaggcagtatatcaaaggggattggtgattgattcccagccgaccatgagtaacctgaagctggctcacagtatatcaaaggggattggtgattgattcccagcacgttcgccaccgtcgtggactcgcagccagtatatcaaaggggattggtgattgattcccagctcgtgaattcgcggtcgttgagggtcagcagtatatcaaaggggattggtgattgattcccagcccctcttttttgtcgatacattcgattacagtatatcaaaggggattggtgattgattcccagcgaccaggccagcgccgtcgaagacgcctcagtatatcaaaggggattggtgattgattcccagccttgtcttggtaccagcgtccgcaccgccagtatatcaaaggggattggtgattgattcccagctccggtctgcgccgtgtacatgttcttccagtatatcaaaggggattggtgattgattcccagcgcgcttggcatgaatcaatctcaggtatcagtatatcaaaggggattggtgattgattcccagccaaatctcgtccatcgtgaccatgtaggcagtatatcaaaggggattggtgattgattcccagcctcgccggcgtcgagtacaccggcaacccagtatatcaaaggggattggtgattgattcccagcatggttgcggcaaggtagaagcggatggcagtatatcaaaggggattggtgattgattcccagccggaggatgtcactcatgggcggccccccagtatatcaaaggggattggtgattgattcccagcaggaatccagtgcaagtcagtcatgacgcagtatatcaaaggggattggtgattgattcccagctgagcgaggtcgccgtgcgcggccaggaccagtatatcaaaggggattggtgattgattcccagcgtgccggccgcgcggatggttcctttgacagtatatcaaaggggattggtgattgattcccagcatcgagttcacatccattgccacgccgacagtatatcaaaggggattggtgattgattcccagcgtcggctcgtgcacccagtgcggcgcggcagtatatcaaaggggattggtgattgattcccagcccacaagaccgcgatcgatgcgggcatccagtatatcaaaggggattggtgattgattcccagccgtgtttcccgcgcccattcctgcccgccagtatatcaaaggggattggtggctcttcataattgagggtgtagttggggtctgaatcctcctgtttcgaggaggcagcgggtgatgtagttggtgaggtttcggaacccgagtgcggatccgcgtaggtgttcgagacgtccgttgatcgcttcggtaggaccgttgctggtgtgtggatgatcgaagtaagccaggatgtcccgggatcggcgtttgagcgttcttcccagtgtgatgatctccgtgagggagcgagggacacccgcgttgctgagacggtctatttcggcttgcatcagggccttaccgcggattttattgggatcgcggtaggcgtcgataatactctggtagacgctccaggtgacttcgagggcgacgtggcaatcgctggcgaacaggtcgaggatccggtgttgttggcgcggggtgagcaggcaggatctggtgtgtaacattctgcgggccttgtacaggggatcggtggcacgcccacgccggtggtggagttcttgctggatgcgcctgcgacactcatcgagagcatcaccggcaaggtgtacgacgtggaaggggtccatgaccgcggttgcgtctgagagttcttcagcggctgcgcttttgaacccggtgaatccatccatcgctacgacctcgatgttctcgcgccacgtgtcgggctgggaagagagccaggttttgaagacctgcttggagcggcctgggaccatatccaggagccgggagggaccacgacggtctcgtataggagtcaagtccaagatgacggtgacgtatttgtcgccgtaaggggtgtggcgccacacgtgctcatcaacaccgatgacgcacactccctcgaaacgatcaggatcatcgatgagtatgcgctggccttcacctaagatcgcggtattggcagtgttccatgacacggccaatacgtcggcgatgcgcgccaccgtcagatggtggaccaccaggcccaccagcgcccagcgcaccgctgcgcgcgagagcttcgcgcgcggatcggctgctgcactcatgttttgacgccacacgtgagcacacgtctggcagcggtagcggcgcacgctcacgtgcaacatggtggggtgccacccgtagggtacgtgagccaagcgcctgatcaccgtgtcgcgtacgacgccctcgcccccacactgtcggcaccaccgatcctcacccactaccttgcaggccaagacggtccgatcgcctcctacacgctgacccatcacttccagtcctaggtcatccaggcccgtgaaggcgctcaggtcagggcgaccaaaggtagcattggacatgtcgaggtctttcggatggacggtgtaggaacccccatcatcggaagacctcgacccctacccggccacgacacaccgaaccccgcataccacccccacaccctcaattatgaagagccggattggtgattgattcccagcaccgtcgcatcgcttatcgcgtataacccagtatatcaaaggggattggtgattgattcccagccatgcccacatgcccgccaaatcattttcagtatatcaaaggggattggtgattgaactctcgtttagctccgacaatggggcgatcaggcacagtatgtcaatgggctggggttattccaaacatttgagcttagatgtgctgacaggcagcgattggcgaatcattggtccaaacccgaagagatagttgtcaaggcctcttatcgtcaaacgtgctcgcaagaggggcttccgtgaggaattgacgtagtttggcttctctgatcgtggtcgtccgggagaatatgtgttcgcggtgtcagtttcgaggctgcaatgcgtgttcctgtgtggctaagccacttggttcgctcgcggcaaggaaacgataggagaaatgatagtagatggggctagggtgacgatccgcgcgcacatcaccagcgtcggaagcgagtatcgcaaagaggtgatctctgggatgtgttatctctgtatctgcgaatggaccaggaaggttcgtgacattggcttccgttttacggatgtcgacgacgatcagctgtgggacgtcaccatcttgacgatccgtgagggcgaatggaacgacatctgggaggtttgcgttaacctcttcccgctttccaaggccctccggcacgtcatcgttaccgtcgaccagaagctcctcggtgactgcgacggctttggcttcatcgcccatgagatcaacgagcttgccgcccacctagaccgcgtcgccgacataatcgagcgtcttgacggggcctacatttacaacaccgacaaggactccgcgcgtggcgacggcgagcaagacgagtacgaggaggggcggggatgagccggcctcggcctagggatcaccgacaagaaggacgttttccccgcgtgagcggggaaaacgtccgtgtgtcgccggcgcaaattcttgaacctgcagatttttaggttatgggacataaacggggttgtaggacaaaacgtgttggtcggggattagccccgggtgttggggtggggagtggtgtggtggagttcgttccagtaaattggatctccccatccgaggacggtgtcggtggcccggtggcccggtggcccggtggcttggcgggcggcgcgggggcgctgcatcaaaggtcatacccgcccatactgtgacccacccgtgcgacggcggctggcccgccctgagcgtgacagaagacctcaacaaaacaaggagcccgtggcaagacaagggctctcggcacaataaaaaccccgaagcgtgagcttcggggctaactggtggctccgaccggcgtcgatccggtgacctttcgattttcagtcgaacgctctaccaactgagctacagagccaagacccgaaccgaaatggtctggtcggcgaccccgacgggacttgaacccgcgacctccgccgtgacagggcggcgcgctaaccaactgcgctacggggccttacaacaggtaagacctattgaattattcattcacgtccgcgaccggttggtacccccaacgggattcgaacccgtgtcgccgccgtgaaagggcggtgtcctaggccgctagacgatgggggcctgtctggccgtcgaactggcgtccgaagacgggagacagcttaggcagaatgagccccccgcgtcaaaacgggacgacgtgacccctaacacattggtggtggatgtcgaaattgcccggtattaccaggaattcaccaggttgcagacctacccttgaaggcatgactatgccaccagcattcggtgccctcgcggaagcctccaacgtccttacgcgggcggtcgacaccccccagtccggaaccgagacagccgtcgccaccaccatagacgttaccctcctgatcctcggcccgatcgtcggcgccttcctgggcgtcgtcgcctctgttatcctctccgtcctgggacgcaaggcgctcgcgaagtccgctgcggcctcgtcaatcctgaaacgagtgcgccaccccgcccgcttcactttcgccgcgtggggcgcgtgggtgggagaagggctcgcgctggtgaaccccggcctgtccgactgggagggcacgtcggtcacgacgttcctcatgcacgcgctgcttatcctgggcctcgccttcctcacctggatggcgtacgcggccgcctgggtcttcgaagatgctgcgaaagcccgccaggccgccgacaagggccgctcgcgccgcttcgaaacacaagcgcagattctgcgccgcttcatccaatgcatcatcgtggtcgtcggagcggtcgtcatcatcggcaccttcgaggccgcacgccaggctatgacgacggtcctggcctccgccggcgtgctctccgtcatcgcgggcctcgccgcgcagcaaactctgggtaacgtgttcgcaggcctgcagcttgcgttcaccgacgccattcgcgtgggtgacgtcgtcgtcgccggtgataagcacgaaaccggtgccgtcgaagaaatcacgctttcctacgtggttgtgcgcatctgggacgaacgccgcctcatcaccccctgccgctatttcaccaccacgccctttgagaactggacgcgccgcgccgccgcccagctgggcaccgtcgaactcaaactcgactggtccgcgcccatgaccctcatccgcgccaaggtcgagagcctcttggcggcaaccgacctatgggacggacgcacctggggcgtgcagatcaccgactctgacgagtacacggtgaccgtccgagtcctggtctctgccaaacactccggcgccctatccgacctgcgcgcctacctgcgcgaacagctgatcgcgtggatcgtcgccgaagagccgtgggcgcgacccgcccagcgtatcgaaccgcgtcaaacggtcacggttgaacacgacaccagccgcgaacacatcgcacgcctggcctccgaactggccggtatctccggcaccaacgaggccgtggccgcgatgagtgatcccaccactcacgcgggcagcgcgcgcggttccattgattccgccacgggcggcgcggcctctttagcgccggcggcggccgagcagcgagacggtcggagcggccagcccaaagacgccgcccacgccgcacgcatggttgccgcccgccgcaaggccaagcgggcgcgtcggcgcgccatggccgatcgccagcgcgaactggcggaaggcggatcatcccaggacgaaacgcaggtcatttccaagtccgccctgcgcaagatcattgaagcggcaggcaagaccatcccacagagcacccagatcctgccggctgcgttcgtcggacggggtgagcgtttcttctccggctccgcagaggccgacgaacgcgccgccgccctcgaaggacccggcgaggaagcttacgccgaacgtgaggccgaggcccgccgcgcccgcgaccgtcgcgaagcccgtcgcggccacgccgccgccctggaccccgaggtaacgacggccctggccgccgtcggcgtcgaacccgtcgaatgcgaccgcgaggccacgggcggcgagtcccccgacgccgcggagaacaccgccgaggccacagcggatgaacacgccgccacgcccgagcgtgacgaggagccgcgcgacagcgagaacatcaacgaccccgcgcaggaaaacgtcgatcccgtgcgggaaacagacgattccgcgccggaaacggcggaacatgcgaacgaaggtgctgccgcgcgcgagtccctcacggaccagtccacaaccgatcaggctacaagcgaccaggctgcaagcgaccagcccgcgaccgacgagtcagccgtgaccgaaggcgccttagttcatgccgcggacgaggaaactcccgcccctggtggcgccgagacggttcctgtgggcgcgggtgatactgatacccaggtgggtgcgggcgacgccggaactcatgaaacagcgggcagcgccgatgcgcaggaagtagcagacgcggtccccgcgccccccgccgccgcgcagtccgacgaaccccagcgtgagagtaagcacgatccagttgctcccgagggtgaggaagatgagaaggcggccacggcccggttgcaggagacgacgaggcaggacgaacaggaaaccattcccatccctgcgcgtaaaacctccgcgaagcagcccatccaggtgccgccccccgagcgcaccgggcgccctgtcgtgaccgacacggtgcaggccctggcgcccgcactcgtgccaccgcccgcgcccaccccagcggagatggcggcgtcgaggaccaacgtcagggacaccggcgacactgtagacgccggcgacgcagccatccatcccggctggtacgccgtcgccgaagaggcacgcctggacaccaaaacgcgtcccacgccgaaagtgacgccccagcgcgtgtccatcatggacttcttcccctcggcggtcccgactccctctgcggtcccgactccctctgcggtgcccacgccctcggcggtttcgactccccccgcagcccccacgccctcggcgacccctacgtccccggcaggtcccgagtccgataacactggcgccgcgaccagccaaatccccgtcgccggacacggcgaacgtgaggatcatcctcaaactggtgcccaaacggcggaacaggccgcagcgcaggtccccgatcccgcacatctcgcgggcgccgcgcaggctcggaacgctgagccggaggccgatgcgaccgccgtcatggaaaccgtcgaagctcctcgagtgcccgcgcctgatgccgagtccacgcaggtcctccccgcgctcaaggaacagcccgcgatcgaggaacagcccgcgcttgatgaaaccctggtcattcccgtcacccgcgcacgcggcgaatccgcgggcgctgctaagacaaagaaagcgacgggtaaggcatcctcttcacagtctgtacccgccaagggcacagctaagaaaacacccactaagaaggcccccgcgaagaagggcacggca

SEQ ID NO: 4347 - DNA, 23417 bp, synthetic construct
  misc_feature 1..23417: note = Synthetic
  source 1..23417: mol_type = other DNA
ccggttcgcaaggacatcgcctccaagctcgcaaaggcccgcgaggaacttgaggcccagcgggacaagccgcaggtcgtcgacggttacgccctcatgagcccgatcgggcaccgctcggacatgatgatcgaggtccatgccgtgcccacgccgccgcgagtgctgcgctgggagccgtggaccgctggagccatcatcgagtaccagattcgttggctgcctacgtccgcgccgacgcccggtgtcggcacgatgagccgtacgtcgcgcctcgaacgcctgcgctccacgcaggacatcgagaaggccgccgggatgatcgcgaccctggcgggtggcaacgtcatcgacgaggacggattcctggttggcctcgaagagatctccccggaggacgagggctaggcgttgtccgtagacggcggctctcgcctccgttagggtttctatgcctgcaatccgactaacgaaagggcatacgttatgaagctctccgcacgcaaccagcttcccggtaccgtggttgaggtctgtgagggtgccgtcaatggcatcgtcaagattgaggtcgctcctggcctggtcatctcctcgtcgatcacgaacgccgccatcgaggagctcggcctgaccgttggctccaaggccgtcgccgtcatcaaggcttccaacgtcatcgtcggcgttgaggactgatcgctgtcacgttgaagggcggccccgcaggttttcctgcggggccgccctttcgtctgaggcgcgcggggctactgtccgcgcttgacggactccaggagcatgacggccacgtcccgcacctccgggagcttcccgcccgctgcggccgtggcgtcctcggccccctggtcggcggcgtcggaggagacgaaaccggcggaggaaccagacgcggagccgagcatttgcgagcagaaggggcaggccgtcgcgacgacgtccgcgcccgtggatgcggcctcgacgatgcgggcgtccgcgatgcgcactcctcgcgtctcctcgaaccaagcgtgcgcgccgcccgcgccgcagcacatcgcgcggtcgcggttgcgtggcatctcgacgagttccacgttcggcagggagcccacgagctcgcgcggaggctcgtagacgcggttgtggcgtcccaggaagcatgcgtcgtggtacgtgaccttcaggggtgccccgatcgaggcagcgccgcccgaaggctgcgccccggcctcgcccgcggtgtcctcggccgtggaggcagctgtgggggctacgggcgtgagcaggccgtcgcgaaccaggcggttgaggagctgcgtgtggtggacgacgtcgaaggagccacccagctccgggtactcgccggcgatcgtgttaaagcagtgtgcgcaagacacgacgatcttctggggcttggcctccttaagcgtgtcgatcgcctgggcggccagcatctggaagagcgcctcgttgccggcgcggcgggccgggtcacccgtgcaggactcgcccgagcccaggaccgcgaaggacacgcccgccgtgtgcagcagctcggcgatggcggcgctggtcttcttcgccgtgtcgtcataggcgcccgcgcaacccacccagaacaggtagtcgacctgcgaggcgtcctcgatgtcctcgccgacgacggggatgtcgaagtccagcttcttcgcccagtccatgcgcttgcgcgcgctctggttgtaggggttcgccttagattccatgccgcggaaggcgcggcccagctcgcgggggaaagcgccctccatgaggacctggtggcggcgcaggtcgaggatgtggtcgatgtgctcgatgtcgacggggcactgatcgacgcaggcaccgcagttcgtgcagtcccacaagacctcttcggagacgacctcggggaccaggggagcggtcaccgcggagacgccctcggggccggtcgcgcccgacagggacaggacggagaccagatcgaaggaatgcggcgaggccggcacgcccttgtcgaggagtagctcgccctcttcgagcttctggggtccggcttcctgctcgacgatctgcacgttggaggcggactccatgtggtcccgcagtcccatgatgagcagcttgggggacaggggcttttgcgtgttccacgcggggcacagctcctggcagcgtccgcactcggtgcacgaatacaggtccaggcgtgccttccacgagaaatcctcgaccgtccccacgcccaggaccgcgtcctcggggatagagtcgaagtcatcctcgctggtcacgggctttccaccgataagcatgtggtcggccggccccagggacttcgtgccgtcggcgtttcggcgcgtgtacaggttgaggatcgcgacgaagcggtgccaggcgacgcccatgccggtctggatgccgatgaccgtcagccaggtcatggaggtgaggaccttcagggcgctgaccagcacgatcgcgttcgccagcgaggtggccgaggacgaggcggcacccacgaagagcgcgccgagccaggctgtgagcgggaagtgcagggccgaggcgtgcgcatcgagacccggcgtgacgctgaagatcgcgtattcgaggccgcgcaggaccacgacgcaggcacacacgatgaggatcacccactcgacgaagatcgcctgccagcgggtcgaacccaggaaacgggacgccaggccgcgcggggaggaatcgcgcgggtggggccgactcagggacgagggcggggtgccatccgggtcagccgcggccgcagcgccgtcgggatcgtcgttggacagggccgcctccgtggcggtgccgtgcccggcgcgctggcgcacgaccatcagcgcgatgatgccagccaggcctccccacgcgaagacctcggtcagccactcccacggcgcgaaatggccgaggaggggcagcgtgaaggtctggacgcgcagctgcgcataccccgtgaccagggtgaagaagaggatcgggaaggacaccatgaccagccagtgggccgccttaatccacgggcgtcccttgaactcgcggtgggtcagcgccgccgagacgacgccccacgctcgcttgcccacgggggccaggcgtcccgggtccggcgtgcccgccgacaccgtccgccacatgtgcgcaagacctcgcgcgaacgacaggacggccagggcgctcaccagcagggcgagaccccacatgatggcgctgagcgtcggattggccacgtttcctcctcttgattgctgcactccattgtgtcacctcgaccatgggggacacgattctgccccgcaaagcgtgcgcaattacgcgctcagcggcgctcgcgggtgcgtaatgtgctcacctcaacgtggactcatgccacgggacgagaaaaaatgtgcgagagtgtgagtgtgcttcccgtctcgcagccagacatgacactgtccgaccaggaactcttcggagacgatcacccccacgatcactgtggggtcttcggagtttgggccccgggcgaggacgtttctcgcctcacctacttctccctctatgccctgcaacaccgcggccagcagagcgcgggtattgcgacgtcgaatggcaagcagatcctcgtgtacaaggatcagggcctcgtgtcgcaggttttctccgaacagtccctgcagggcctgcgcggccacatcgccctgggtcacgtccgctacgcgacgaccggtgccgacgtgtggcgcaacgcccagccgactctgggtcccacccccacgggcaccctcgcgctggcacacaacggcaacctgacgaacaccgtcgagctgcgtgagctggccgtcgccatcgccgacgacggcgaggacttcgaacgcggggcctccaccgacacctctctcgtgaccgcgctgctgggcatggccgaccgcattccggggccgacccccttcatcgcgtctccatccgtgacgcccgccgagcgcgaaggcgacgaggccgccccggcctcgtccgtcaccgagccggagcccgcgcccctggtcggtgccgccctgaaagtgctgccgcgcatcaagggcgcgttctccctggtcttcatggacgagaacacgctgtacgccgcgcgcgaccctcacggctaccggccgctcgtgctggggcgcctcgcctccgggtgggtcgtcgcctccgagaccgctgccctggacctgtgcggtgcggccttcgtccgcgaggtcgagcccggcgagctcatctccattgacgagtcgggcgtacactcgcgccgcttcgcgatgcgccgctccaacacctgtgtgttcgagtacgtgtacctggcccgccccgacacgacgatcggcgggcgccggatcgtggccgcacgccacgagatgggcgctgccctggcgcgcgagaatcccatcgtggcggacctcgtgattcccacccccgactcgggcacgcccgcggcgatcggctacgcgcaggaggcggggatccccttcgcgcagggtctcgtcaagaacgcgtacgtgggaagaaccttcattcagcccacgcagtctctgcgccagctgggcatccgcctgaagctcaacccgctgcgcgaggtcatcgaaggcaagcgcctggtcgtcatcgacgactcgatcgtgcgcggcaacacgcagcgcgcgctggtcaagatgctgcgcgaggccggggccgccgaggtgcacatccgcatctcctcgccgccggtgctgtggccgtgcttcttcggcattgatttcccgacacgcgccgagctgatcgcttcgtccatgagcgtcgaacaggtccgcggccacctcggggccgactctctggcctacctgtcgattgacgggatggtcgccgccaccggacagggcacgtccctgtgcctgggctgcttcaccggcgaatacccggagacgatccccgccggcacgcctattcccggaaccccagacgccaccccctgctaacctccacgcccgcgacgcacctgcgccgcgggcgtttgaccagtcctgacccacccagaaacggcctcgtcgagcgccccacgcgaaaggcaccacccatgaccgacacccccctggactacgcgaccgctggcgtcgacacggctgcgggcgaccgcgccgtcgagctgatgaagagcgccgtcgccgccacccacgactccaccgtcctgggcgcgaccggcggattcgccggtatggtcgacgcctcggcgctgctcggcatgcaaaagcccctcctggccacgtcgaccgacggcgtcggtacgaagatcgcgattgcgcaggccatggacgtgcacgacacgatcggccaggacctggtcggcatggtcgtcgacgacatcgtcgtgatcggcgcgcgcccggtcctcatgaccgactacatcgcgtgcgggcgcgtcgtccccgagcggatcgccgcgatcgtcaccggaatcgcgcgggcgtgcgaggccaccggcacgcccctcgttggcggcgagaccgccgagcacccgggcgtcatggaagcggaggactacgacatcgctggcgcggcgaccggcgtcgtggacgcctccaagctgctgggccccgagcgcgtcgcagctggcgacgtcgtcatcgctttggcttcctcgggcctgcactccaacggctactcgctggtgcgctcggtgctctcccgcgtgggtgcctcgctcgactcgcacgttgccgagttcggccgcacgctcggcgaggaactcctcgagcccacgcgcctgtacacgcgcctgtgcctggacctggtggatcgcttcggcgtggagggtatccacgcctattcgcacgtgaccggcggcggcctggccgcgaacctctcgcgcgtcctgcccgtcggagcgatcgccaccgtcgaccgctcgacgtggaccatccccgccgtgttcgactgggtgcgccgcggcggcgacgtgagctgggtcggcatggaggattccctgaacctgggcgtcggcatggtagccgtcgtgtcggcttccgtggccaccgaggttctggccgcggtcaacgaggccggggtggccgcctgggtcctgggttccgtcacgtcggccagcgccgatggaagcgtggacggcttcgggtcggtggccgacctgagtgcggattcctctggcgtgcgcctcatctccggcacgaaaggcgtgcaggcaggcgccgtgctcatgcacggcgagtaccgcgtcggctgagcgcccgccgcgcctgccgtgagtgcgcgtcaggggtcggggcccgaggcctcggccccttgcagcatgagcgaaggtggccgcgtacgctgcgggcgctcggtcgtgatgggcatgtcgcggcgagcgctcagcgcacggggatcaggaaatcagacgcgggtacgccaaatcggcggaccgctttcgggtccgccgtgtggctgagccgttacttattcgtggaggaaccacccgtccagaaggactcatcgagcagctctggatcgatgtcgtcttcttccgcgggcatctctgcgaagtcggcgtatttcgagtagaggtcgtcgtcgatcgcatcgtcctcttcgggctcgtccgccggcacgtgtgccaggtacgagtcctcatccgccagctctcgctgaagtgcgtttaggtcggtgtcggggctgaaatacttcagcttccgagcgactttcatctgcttagccttttgacggccgcgccccatggcgtcgaccccctccgcgtcgttcgggtccgcgtgaagcggttccctgggtgttcaaaatgtttcgtgggaccatcatagctaatgacgggccttgacctcaccttggatcgtgttttgcgcgcacagcggagaggaaatgggaggcggaggcctgggaaaccagggaaaagagaaccggcgcaactcgcggccagtgtggccggagttacgccggtttgcgtcaggtagtgcctacaggacctcagtcaggttggacttgagggcctcgagcgtgcgcgcggcagcctcgcgggcagcgcggcgggcctcgcgacgcgagcgacgcgacgagcgggtcgccagcaggatgatcacgccgatggcaccgaccgtggacagggcgacgatgccgaccttcttcagggcctcggtgttgccgcctgcggcatcctgcagggtcagtgacgcggactccttgaaggactcgaaacgggcggtggcctgttccttcgcatcctgggcgagggcggcgggctggacgcgcgcgtagagctgatcgatcgtggtggccagctcggcgcgctgacgctcgaggtcggcctggatctgggcttccgtgcgtggctcggcgggtgctgaggcctcgccgatggtcacgttgcgcgggtcgacgttggtgctcacttgcccagtcccttctcgatggcttccttggtggcggcgaccgatgcgcccgggtcggggcggtgctcctgcgcgctcttgagggagttggccccgaggagggcgaggattaggacgatcagcaggaggacgccgacgacgatgagggacgccgcccacgcggggacgacgagcgcgagcgcgatctcagccgtgtgtagtgtccagccgagcaggtacagggcgaagaccgcggcggccacgaggagggtgatgcccttgccgctcttggtcgcgaaggtacgcagcttggcgttgttcagctcgatctcgtcgcggatgatgctggacagctgccccgtcacggaagcgaagagcgcgccgatgctggggcgcgcctcgccggtggcgtgcgtgctgccggaggctttcgtcgtgtcgacgggcggtggcgggtactgcccgggctggggggagggctgagtcatgggtgctcctgcgcgtgcggatgaacgaggcgttgcctcgcctgataggcctagtgtctcacgaagaaagccggctcgcagtgaccgttacgttactcctggggagcgatcgagccgggcaggtcggaaaggatcttgcgggcgcgcacgaccaggtcggagacctcgggctcggccagggccgggtcttcggcttccacgacggggatgccgcgcatcgcggtttcggtgcggggctcgggcgaggcctgggggacctcggcgggggtgggctccacgcgggtggtcgcggcgtcgaaggcgacctcggtcgggtcgacggcctgcgcagcggcttcctcgggggctgtggtttccgctgtggttcgttcggtggtgggggcagtggcctggctggtcgcctcggcggtcgcgtcgtcggtgcccagcgcgtgccaggcgggggcctgctcgcctgagggggagatgacctcgtcgaaggaggaaggcagggccgaggggatcgggccgaggagggtcttcgggtcctcggggttggcttccagggaggcggtgatgagcgcggcggaggggctgggcgcgtcgagcgcgacgcggccgttcgtcaggaggatcgcgcggtccgaggctgcggcgacctccgcggagggagtggcgatgacgaccgcgcagcccgcgttcgcgagggaacgtaggagcggctcgagctcggtgcgggccgccgggggcagggaggtggggtcttcgacgaggaagacctcggagccggacacgatcgcgcgggcgatgagggccttgaagcgttcccactcggagagctcggaggggcgaacgtcaatgcgctgggcgaggcccgtgatctgcagggctcccacgaggttgtcccagtcggcgacggatcccgtcgcggagaggggggcgaggatgttctggcggatcgtcagggactcgtcgaggggggagtcggcgcggatcagggcgaccgagccgatgcggccagcgaggcgcgcggccagcgaacgcgagggcgcggcgacgatgcggccggcctgcggctcctcgaggcccgcgaggatcaggaagagggcgcgggcgcggcggcccgttgggtccaggatcgcgctcatcgtgcgagcgcggaagcccaggtcgatgttcgccaggaggaccgatccggtcgcgcggtccgtgtaggtgatgcccaggccggcgacctggacgcggccgccgcggcccttcgcggagaaggaacggcgcgagcggtaccacgggcgcggctcggccggcggtaggtgcacgggggcggcgacgacgaggtcgttgcgcgtggcgtcgtgtgccgcggcatcggcgctggtggtgtcgttggtggtgttgttggtgggcgtgagctcctgggtcgtgttccggggagcgatgtcgctggcggtctcggctgcgtccgtcaccactgaggctgcggccgccgctgtcgtgtcggtcgtgggcgcggcgggggatgcctcggccgcgtcctggtcctccaaggggacgttggagggggcggcttccaacgggtcctgctcggcgtcctcggtgaacgccgccgccgtctcctgggtgtcctgggcgtcctgagggtcctgggtgtcctgagcggcctggttggagggcgcgcctgtctgcggggcggtgcccttgaggatgtcctcgaaggacgcgatggcggctcccttggtgggggcggcctccgtggtgggggcggcgggggtcgaggcggctcgctgggtgccagcttggtcgtcggcagccgccaggtcggccagctcctggctgtccgatccgtgcagttcttcacgcgggtcattcgacatacccccattgtttcaggatcgtgtcgattgtgtcgtaatggcgcgcggaaacgggtgggtggactcgcgcaagagagcttgcccctgtggcttgcgtctctggaactagtgagataggctgtaagtgattgattctcagtaagagccgactcgttagcggctccgaatgctccaccgggtccttcttcgcgaagggcccggtatttttgtgaaagtgcacgcaaatgtgtatgcggtgtgacaccatgtgttcatgagcacttcctcagaaaacatccccggtatccgctatcgagtcggcatcgatgtcggcctgaaatccatcggcttctgcgcggtcgaggtcgaccgcaatgaccagccgatcaagctgctgaactctatggttttcatccatgacgccggcgttgacccgaacgaaaacaaggcggcgaagagtcgaaagctaactgcgggcgtcgcgcgtcgcacgaggcgtctgtaccgcacgcgccaccagcgcctggtggatctggatcgggtactgtccaaggacttcggctggccacttcctgatctgtctgctttcgagcatccgaccgagccgtggcacattcgggcgcgcctgcttgaggggtatatcgcagacgatgcggcgcgtcaggctgcgctgtcgatcgccctccgccacatcgcccggcaccgcggctggcgtaatccgtatgcgaaagtggagacactgctgcagcgctccgatccgagcgactttctcaaaggactcaacgagcgcattagcacgtcgctcgggaggcagttcccggtcgatgcgacgcctgggcagctggtcaacgcatatctcgctcaccccgactatgtgaaggaggcgggaactcccaagcttcgcggaccggaggggatcctcgcggggaagctccaccagagcgataacgccgaggagattcgccacatctgcgagatgcagaaggttgatcgtgctgactgtgatcgtcttattcgcgccgtcttccaggccaagtcgcccaaggggagcgcgaaggaacgcggcctcgtgggccacgacgagctgccgggccaggggaagcatgtgcgtgccgaaaaagcgcaccccgcctttcagaagttccgtatcgtcagtgtgctcgcgaaccttcgcattcgtgaagggcgcgaagaacgtccactcactccggatgagctgcaaggactgacggacttcttacttgtcgctggcctgaagcaggaggttacctggcaggacctggcggacaacttgggcatcgagcgttcagacctgcgcggtaccgcgaaggcttccttcgacggatcgccggtcctgcgcacccctccgacggatgtgaccaccgaaaagatcctggcttgcaaggtcaaatggctcaaggaatggtggaaggccgcggatgatgagcagcgcggctacttcgtggatgctttctcgaactccggcggttcagaagacagcagtgacgttaatgatgaggtcgctgaactccttgagcaggcgaccgaggacgatcagctcgagttcgagaagatctcgttgccccaggggcgagccgcctattcgctggactccctgcatcgcctgacggacaggatgttgcgtgatggcgtcgatctgcacactgcccgccgcatcgaattcaacgttggggatgactggaagcccgccgtggagccgatcggcgctccaacgggaaacccggctgtcgatcgagtcctcaagcaggtgagccgctggctgcacgccgccacggagcgctggggagagccgacggtcatcaacatcgagcacgcgcgtgatgctctcgggtctcagaaagttgcgcgtgagctcatgcaggcaaacgagaagcgtcgtaaggcgaacgcggcggctgtcgcagccatggctgaaaaactgaagctgtcgggcaagattcatcgatctgatcagatcaggtactttgcgttacagaggcagaattgtcagtgcttgtactgcggtgctccgatcacgtacacgacagcggagatggaccacatcgttccgcgcgcggacggttcgtcgacgaacgatcgctcgaacctggcggcggtctgccgaacgtgcaatcacaagaagggcaagatcccctttgccgcgtgggcctcatccgataaggcgaacgacggggtgtccctgaagggagcacttgaacgcgtcacgatgtgggagcgtgacaacggcatgtcgcccaagcagttcaagcagctccagaaagaggtgaaggcacgcctcaaatcaaagaagcccgacgaggagttcgacggtcgctccatggagtccgttgcatggatggcggtcgagctgcgcactcgcatcgagggcttctatcgcacgcgcggcgaagagtctgttccctccgtgggtgtctaccgtggacagctgacggcggaggcccggaaggcctcgggcttcgagagccgagtcaacctgattggcggccgtgggaagacacgcttcgataggcgtcaccacgcgatggacgcgcttgtcatcgcgctgatgaacccgtcggtgtcccgcacgctcgcactgcgtgtgaacatgcgtgacgctcagcgtctcgccgggctcgaggagacgtggaagaacttctacgggaagccgggtgaagcatcccagcgtttcgagtcctggcgtgaatcgatgcttcgcggcgtcgaactcttcaacattgcgctgagcgacaacgcgattcctttcgcagagaacattcgtctgcgggttggttcgagcgtcattcacgatgcgacggtgcactcgttctgtccgccgaagcgacccgatggcgagcagatcatcacaaagggctgcggcgagcagcacaggctcggttccgctcttccggtcgagctgatcgaccgcgctgagacgcccgcgctctggacagcgcttaggcggtgccctgactttgatccgaagaaggggcttcctgagaatccgaatcggatgatctccgtgaatggcaggcgtgttggaccgatggacctgctgaacttctttgggtcatccgctgcctgcctgaaggtacgtggaggatatgtggagctcggcagctcgattcatcacgctaggatctaccgcatcgacggcaagaagaccatgtacgcgatggttcgagtcttccaagtggacctactgcgcctcaagaaccaggacgtgttcactacgccgctgaagccttcaacgatctcgatgcggacggcagaaccgaagattcggcaagccctggctgatgggactgctacccagattggatggctggtcgagggggatgaactacggatcgacaccagcaagtacagcagcggcttcatcggcgaggtcctggctcggtacccggaggcgacgagctggagggtagctggctttatgaatgggacaacgttgaggctcaagccctatctgctctcgaaggaaggatttatcgacgagacacaagcggcgcgattgggaattgaacctacttccgaggcggtgcagaagacggttgatacgcctggatggctccccgcggtaaacgttttcttcggtgctggaggtgtacgagtaattcgtaggaactgcctcggtgaagaacgatggcattcaacggcatcgttgcctgtttcgatggtgctggagtgatatccagtggcagaacagtggcgtgtcattgacctgtgcgggttcgagggagaacttcgttcgacgcgtggtggggtggaggtgtgtcctgacgggggcgctcctacgaccgtgcctgtcgcggagctcgcggtcgttcttgtaggtatgaaggtcaacttgagcgccgctgttctgcaccgactggccgaggctgacgttgcgctgctgttctgtgactggaggggtattccggagggcggctgctactcatggtcggatcacggtcgagtggcggcccgccaccgagctcaggccgaggcaacgctgccgcggaagaagaacgcgtgggcgcgtctcgtgcgggctaaaatcgagggacaagcctcggtgcttgagaatcttaagcttcgcgggggaggtgagctcctcgcgcttgccgaccaggtgcggtcgggcgatcctggaaacattgaggctcaggcggctcgcctgtactggtcacgcgctcttggtcggggtgtgagtcggcagcctgcagcggggcaactcatcggagccaatgcgtgcctggattacgggtactcggtgctgcgtgggcatctgatgcgcgcagtcttggcggcgggtctggcaccagcgctaggcgtgtttcaccgtggccggggcaacgccttcgcgcttgctgatgatctgattgagccgtttaggccggcgatcgatgaggttgctttgcagcttcctcctacggcgtctccttcggatcgttcggtgaagcagcttcttgtggcggcagcatcacagcgctttgatggagatggacacgggatccctgctgtggctgaagcgcttgcgcagtcttttggtcgttatgtggagggtgacatcgaccgactacgcgtgctgtcgtggcaggggccgtcctccgtgggcgtgggggattgagatggcggatgatccgatgtggtgcctggtgatgtttgatctccccgttgagacgaagaagcagcgccgcgaggcgacgcacttccgtaacgacctgttggactggggattctgtatggtccagttcagcgtctatgtgaagtactggccgacgggcgggcaggatcatgcgacgttgagggcgattaagactcatctgccggagggcggacaggttcgggtattggcgttgacggatcggcagtgggcgacggggcttcgttttgagaacgcgaagcctcggaaggaagctggaaaccccgaacagctcatgattttctaacgttgaaccccgagtttttggctttttgctgccgaaaactcggggttcccagtatatcaaaggggattggtgattgattcccagctaccggtaacgaagccgccgatgaccagcagtatatcaaaggggattggtgattgattcccagcgtggtactcgattcgtcgggtacgggctcagtatatcaaaggggattggtgattgattcccagccatgcgtgcatgtgtgtgctacacgcgccagtatatcaaaggggattggtgattgattcccagcagaagattcggggccttatggtgttcgacagtatatcaaaggggattggtgattgattcccagcccaggcgcagaccaccacaggccggacgcagtatatcaaaggggattggtgattgattcccagcgggggagggtcagggcggcggtcctcatcagtatatcaaaggggattggtgattgattcccagcctcgcgacgggcacacgcccgccgagctcagtatatcaaaggggattggtgattgattcccagcaccgcatccatcgtccatctctcccacgcagtatatcaaaggggattggtgattgattcccagcagacttcctcgatgcgatgtactcaagacagtatatcaaaggggattggtgattgattcccagcaacttcatcgatggcatgtgggcgggcacagtatatcaaaggggattggtgattgattcccagctttcaggtcaggggtcacccgtgcggtgcagtatatcaaaggggattggtgattgattcccagcttgacgtttatcggggtggtggctgtgacagtatatcaaaggggattggtgattgattcccagcgaagacttcgcctgacctggtcgcgaaacagtatatcaaagggcattggtgattgattcccatcgtgctcgcgctaggggacgggggtgggacagtatattaaaggggattggtgattgattcccagcgagggcgacgcgcgcgcccacgacgaggcagtatatcaaaggggattggtgattgattcccagcgcgaactcaaacgccctcaaacgggcaccagtatatcatagtggattggtgattgattcccagctctgtcccctgtccttcaggtgataacccagtatatcaaaggggattgatgattggttcccagccattgtttggaaatgccatatcgaatggcagtgtgcgacagagaattgttgagtgattatagattgctgcattatttatcaatttggaatcgcgcaatgatcctccggcttgcatcggcgaggcccgtacgtgtcagtacttcatgctcaccgctacgcgccgcaagcctctgagagtggccttgcgctccgcgcactctctgccgtatcctgctcggctacccgattttagatgtaaggagaagacgagcacatgaacgcggcgacgacggcgcaacagcgaaccagtgacacgggcaagacgcgcatccgcgcgcgcatcgcgcacgtgggcagcgagtatcgcaaggacgtcacctcgggcacctgcgagctgtgcatcgccgactggagcgccagcatccgcgacatctccttcgagctcacggacgtcaacaccggcgccacgtggcaggcgaccacccccaccccccacgtcgaccgttggaacgacatctgggaggtctgtgtgaaccccttccagctctccaaggccctcgcccacgtcagcctcgtcgtcgacatcgaccgcctgaacgatgaagatggccgtgcgctcattgccctcggcatccttgaggccgtcgaagcctgcacccgcgcctccgcgatggtcgagcgccttgacggagcttacatccacgacgacgactggggcgaataacattttcccctaacgctgtccgagtccgacactctctgaggtttgggctggatctgaacggttggcgcgctgcctgggacccctgcctgccggtcgcgtcgatgtcgcagtcgatcgtcgcaatgtggctaccggttatcgacgctatcgtgtccgcgccttcgtcttcgagcgaactgttgaacgcggcttgaccagtgcgccacaggttgtggacgcgctcagatcgatgtgtttgattctgatggtgccgccgttagtgcgcgtggtgtcgggggtgaaaccggaggcacctctgtcggtggctatcttgggtgttgtgaaaccgttggcacctttgttggcggaaactggctgtttttggttgaaactgcgagacggtggtgccactggttgcatgcgagccctgcgtggtgctgtcagtggtgtcactggtttcaatcgaggggccaatggtggtgacggtggtgtcgccggtttcacgcgagcgcagcgaggcggcatcagtggtgctactggtttctctgtgtgcggctatggtgctgtcggtggtgccgctggtttcgtgtgcgggcggtgaagtggtggcatgagggtcgctggtagtaatttcgttcgcgcgtgtgaaaccggaggcaccactgttggtgtgtttcttgggtgttgtgaaaccggtggcacctttgttggcggaaaatggctgtttttcgggtgaaactgcgagacagtggtgccactggttgcatgcgagcgctgcctggtgctgtcggtggtgccgctggtttcgtgtgcgggcggtgaagtgttggcatgggggcgcggctagtgatttccttcgtgcgcgtgaaacccgtggcacctctgctggcgtgtttcttgggcgttgtgagaccggtggcacctttgttggcggaaaatggctgtttttcgggtgaaactgtgtgatggtggtgtcgttggtttcacgcgagcggtgcgaggcagtatcagtggtgttaccggtttcgtgtgtgggtggtagggctggtgacggaggtgatgtcagtttcaagcgaggggccaatggtggtgatggtggtgccgccggtttcacctgggctcagcgaggcagcgtcagtggcggcaccggtttcgtgtgcgggcggtgaagtggtggcatgggggtcgcttctagtgatttccttcgtgcgcgtgaaacccgtggcaccactgttggggtgtttcggggatgttgtgaaaccggaggcacctctgtcagtggttatcttgggcgttgtgaaactggtggcacctttgttgttggaaactggctgtttttcgggtgaaactgcgagacggtggtgtcaccggtttcgcctgcgggcggtaggggtggtgacggtggtgttaccggtttcaatcgaggggcaaatggtggtgacggtggtgccactggttgcatgtgagcgctgcgtggtgctgtcggtggtgtccccggtttcatgcgagcacagctagaaggcatcagtggcgtcattggttccaccgagccgtgaaagccgctcagcaagctatcgcaggcaaaacaaaaaccccgaagcgaatgcttcgggggcttgctggtggctccgaccggcgtcgatccggtgacctttcgattttcagtcgaacgctctaccaactgagctacagagccaagacctgaaccgaaatggtctggtcggcgaccccgacgggacttgaacccgcgacctccgccgtgacagggcggcgcgctaaccaactgcgctacggggccttacaacaggtaagacctattgaattgtaccgttcacaactgcgaccggtggtacccccaacgggattcgaacccgtgtcgccgccgtgaaagggcggtgtcctaggccgctagacgatgggggcctgcttggccgtcgaactggcgtccgaagacgggtgatagtttaggcagatctcgaggggtgcgtcaaaacgaaaacaagtgacaggtgacacattacaggaaaatgttgcaattgcgcggaagtcccaggatttcatcagccgcccgacctaggcttgatgtatgactctgacaccagcactcggtgccctcgcccagacatcggacaccctcgcgcgggcgatcgccgacccgcaatccggggcggaggccgccgtcaccacgaccatcgacatcaccctcctcatcctcggcccgctcgtcggcgccttcgtcggcgtcgtcgtctcagtcctcctttccgccctgctgcgcaaggccttctcgaaggcggccacggcctcgtcgatcctggcgcgcgtgcgccgcccgggccacttcaccttcgcggcctggggggcgtgggcgggcctgggcatcgcgctcgttaacccccacctgtctgactggaatggcgcgtcgatcacgacgttcctcatgcacctgctgctcatcgtcgccctcgcctgcctgacctgggtggcgtacgccgccgcgtgggtcttcgaggacgccgccaaggcccgccagtcctccgaccaagggcgttcgcgtcgctttgagacccaggcccaggtcctgcgccgactcacccagtcgatcgccgtcgtcgtcggtgttgtcgcaatcatcagtacctttgaggtcgcccgccacgccatgaccaccgtcctggcctccgccggcgtcatctccgtgattgtcggcctcgccgcccagcagaccctcggcaacgtgttcgccggcctgcagctcgccttcactgacgcgatccgcgtgggcgacgtcgtcgtcgccggcgacaagaacgaaaccggctccgtcgaggaaatcacgctctcctacgtggtcatacgcatctgggacgagcgccgcctcatcatcccctgccgctccttcacgcaggcccccttcgagaactggacgcgccgagccgccgcccagctgggcaccgtcgaactcaaactcgactggtccgcgcccatcgccctcatccgagccaaggttgagcagcttctcagatccaccgacctgtgggatggtcgcacctggggcgtgcaggtcaccgactccgacgagaacaccctgaccgtgcgcatcctcgtttcggcgaagaactccggcaccctgtccgatctgcgtgcttttatgcgcgagcagctgatctcctggatcgtcaccgaagaaccgtgggctcgccccgcccagcgcatcgaaccgcgtcatacggtcacggtcgaacaggacatgagtcgcgaacgcgtcgcccgcctggccgccgaactcgccggtatttcgggcgcgaacgaggccggggctgcgcccgcgtctccctcctctgaagacaatgaggattgcgtcgccggactgcccgcgacgggtggtgccgcgtccgcgatgtccggttccggcgtgtctgggacccagtcccaggatccggtacacgccgcgcgcatggtcgccgcccgccgcaaggccaagcgcgcccgccgccgcgccatggccgaacgccagcgtgagctcgccgagggcggtgcaggggctcaggacgaaacccaggtgatctctaagtccgctctacgcaagatcatcgaggccgcaggcaacgccaactcgcagcgcaaccagaaacaggctgcgaactcagtcggtccgggtgagcgcttcttctccggttccgccgaggccgatgaacgcgccgcagccttcgagggtcccggcgacgacgtgtatgcggagcgcgaggccgaggctcgccgcgcccgcgagcgtcgcgacaaccataagcgccgcgagggcgaggccctcgaccccgagacgaccctcgccctggccgccgtgggcgttgagccggttgcctgcgaggactccccggaagcggccgaggccgcagatgaatcgatcgagagcgctgccggtgttgagtctggggatagcgccgcggcgagcgccgccggggatgagtgcgcggaggaagggcccgtcagggacaccggtatcgtggaagccgccccggcggatctcgcccccgacaagcccgctgaatctgcccccgcgctggtcgactcaaacgaagccgactccgctgccgccggatccgaaaccgctggcgacctggccgaaggtgcgcagaccgatgctcgcgcccagtccgcgggcgcatccgccgaggtgcagcccgccgacgacgaggccgcgcccgccgacgacgaggccgagctcgccgacgacgcgaccgagcccgccgacgacgcccagaatggcagcgctcccgcgcagggcgctgagcgtgagggcacgcccgcccccgacgcgcccgaggcaacggacggcgaggaggaggcccaggcctcgtccgatgccgcgatttccccggacgagcaggaaaccacgcccattcccgcgcgtgaaacttccgtgaaacatcccgtgcaggtgcctccgcccgtgcgcaccggacgccccgtcatgaccgacacggtccaggcgatcgcccccgcgctcgtgccgccgcccgtgccgacccccgccgagatggccgcctcgcgctctcctgaggaaaccccggacgagcccaccgtccaccccggatggtacgccgtcgcggaagaggcccgactcgacgcggaaacacgtcccacgcccacggtggtgcccgcgcgcgtgtccatcatgcacttcttcccagcggtcgcccccacgggcgccgaggccgacatgctccgcaccgtcaccggccaaatcccggtcgtcgagccgcgggaagccaagcccgaggacgccgagtctgcggtcacggacgaggccgcgacggacgaggccgcgacggacgaggccgcggcacccgaggccgcggccgctaagggcaagtctgcggagaagaaggcccttgccgacgagcccaccacccaggtggaggttgcgatggccccggaggatgcgacccctgaggttgaggctgcgcgtaaggacgccaccgccgcctctgacgaggcaaacgaggccccgtctgacgccgagtccgaggccgacgctgagggtggggtggacgtcgaggcgaccgccgtcatggatcccgtggaggcaggcgaggctcgggcgctcgattccgacgcgacgcaggttctgcctgcggtcgacgagcccgtggatgagaccctcgtgatgcccgcggcggccgatgctcacgccgaggaggttgttcccggcgaggaggtcgccgcagcggaagaggaaaccccggcgaagaaggagaccgccaagaaggaggcctccacaaaggccggggcgaagaaggatcccgcgaagaaggcggcaaacaaaaaggcctcgaccgcgaagaagggcaccaaaaagtccaccgccgctgccgagaagaccgcgaaggacgagggaggcgacaaggcgggcgacgcgatcccctccaagggcgcaaaggcccccgccaagaaggctgccacgaagaagaacgccgccaagaagaccgccgccaagaaggcggctcccaagaaggcggcggcgaagaatgcctccaacgcagggcccgccaccactgagtgatggggacaggtgaacgggccacggcctcgtcactgaggccggtgcgaggaaaccagaccgcccgcgcccacgcacacacgtgcacgggcgcgggcggcgcgggacaatagatccatgaacgctactgatccctctgtccgcaccgatgccgagtggaagaagctcctgagccccatgcgctaccacgtgctgcgcgaggcgggcacggagcgccccttcaccggcgagctcctcgacgaggcgcgcgtcggcacctactcgtgcgctgcctgcggatccaagctctttgactccgacgcgaaattcgactcctcctgcgggtggccctccttcttccaggcccacgacggcgcgaccgtcgagagcgtcgacactagccatggcatgatccgcaccgaggtgcgctgcgcgacctgcgactcccacctcggccacgtcttccccgacgcgcccgaccagcccaccggcatgcgctactgcatgaactcggcggccctgaccttcgtgcccgcccagtgaacacccccgcccagtgaacgcccccgcgcagggcaccgtcaccgaccgcatccctccccagctgtacatcgtcgactccggcctcatccagtacgtgggcgccgcgctcgcggtcgtcgccttcgcctccgtcgagcccgcctccgtcgcctggtggcgcgtcctgaccggcgcggttgttctcctcgcctggaaacgcccgtggcgcggcggccttacgcgctccgacctggctatttccgcgctgttcggcatcatcattctcacgatgaactcctccttctacgaggccatagcgcggctccctctgggcactgccgtctccatcgagttcatcggtcccgtcgccgtcgccgtcatcaggggccatggctggcggccgcgcatcgccgccgtcctcgcgttcgcgggggtggcgtgcatcggcggactcgccctcgacctgagcgtgccgagcgtgcgcgtcggcgtcgcctggatcctcctcgcggccctcgcctggtcggcctacatcgtcgtcgggcagaaggcctcgaccacgcgcgacggggtgacgaacctggcgctcggatgcgtgtggggtgcactcatcttcgcgcccatcctcgggccgggcgcgatggcggccacggcctcgtggaagctgatcgcgattgtcgtcggcgtgggcctgctgtctaccgcgattccctacagcttcgaggccctcgcgatgcggcgcctggccgcgtcgactttcgcgctcttcgccgcgatcctgccggccacgtccgccctggtcggggccgtcatgctccgccagatccccggcgtcttc

SEQ ID NO: 4348 - DNA, 23378 bp, synthetic construct
  source 1..23378: mol_type = other DNA
  misc_feature 1..23378: note = Synthetic
ccctcgaaggcgggcacccactcatcggtcgcgatgtccgtcgtcggccccatcagtccggtggggaagcacgttcccgccaagtaggcagagtctgctcgcccgtcgacgatcttcgcctggcccaccccgtactcgacgccgtccgcgtcgaggatcgagaactggcaggcgctcaggacgtagtcggcgtcgaccctcgcgtcgacggggatgcgccacaggcgcgcgccgggcgccggctcggtcgttgtctcgccgagccctgtgcccgtcgtcatcgacgcgacctcgcgcgcggggccgggagtgaaggacgcggtgagggtttcgcctttcgggtagacgatgccctgcccgtcggacgggatcgaggcggtcccctcggagcggatctggcgcgggtcctcccacggcaggtaggcggacacgaggaggaacgaggacgccccgatcgccgtcacgaccagcggcacgagggcgaggagcgcccacgtgttccgcgaccaccagcggctcatccgagatccccctccccgtacgcgaggcgcgcgacctcgacgagctcctcgggggaattcacgaggtcggagccctcggcgatctcgaggtcgatgagggcgacgtcgtcgcccgccatgcggcccgacggggcggccgggatccgcaatcggagtccgggcaggtcgtcggtcacgacttcgacggcgatctgacagcgctgcgcgacgccggactggccggtggcgcaggaactgtgcagctcgtaggggtcggagtactcgcgccccgacgccgacaggagcgccgcgttgccgggcgcccagggcttcgccctcgcggtgaagtcgaggtcgacgacgacccaggtcccctcggtcgcgagcgtcccgccgtccgcgacgatcgagcgggcggtgcgcacccgcgtcgcggcgacctcgccggtgcgcaggtcgacaaggtcgccgactccggcctcgtggacgaagggttcggtgagaacgtccgaggtcgagggcagcgccttgttgatggcggagccgatcgcgaggcccgcgatgacgacgaccgcagtgagggcgccggtggagatccgcgcgtccattcaggccccctcccccgagtcggcggactggccgccatcggcgccggacgacgtcttgtcgcgcacggcgagcacctgcgtcgcgacgagcgtcggatccgtccagaacatgccgccgtcgagggtcgaggcgcgccacgtgtgcgagaagtactcgacggtgagcgaagacggtcgcggcgcgtcggccgggagcgtccacacgagaaggtagtcgccggccaagcccggctggaaggtcttgagcggggtcccgtcgatcgcccggtagacgaccgggtcgggcgcgtcctcgccgagttcgcggatccgcatcgcatcgacgaggatcgccctcggcacccaccggtcggcctcgtcctcgatgcgcgccttgacgacgaggtacgtcgtcggctcgaacgcggtggcgagcggttcaacgttcgacagccagcccgccctgtcgaccgtgagggcgaagggcgcgacggagacctcgtcggaggcgccgagttcggcgacgaggtccgggtcgtcgccggccgccgcccacccgccgaacagtcccgtcacgaggacgacgacagccgcgagcgccatgacgacgttcgccgggctgacgaggtcggagaagagtcggacgaatcgcagcgccgtcgacaccggagtcgcaggaggctcctccgcgggaccatcccctcccccgttcccctcgacggggcgcgcggccccggcctcgtcgatcgacgatgagaccccgtcctcgcggcgcggcgggggctggtgcgcctcctcggcgctctgctcgggcggggtcacgcgggctccgttcgggaagagtgactgatgcggacaggactcagatcagcgggtagcggacgatcgtcgcctcgcggccggcgccgacgccgatcgactggatgcggcagcgcgagacctcttcgaggcgggcgatgtacgcctgcgcgttcgcggggagttcgtcgaaggagcggcatccggtgatgtcctcggtccagccggggagctcctcgtagaccgggacggccttcgcgaagcccgcctgatcgaggggcatctcctcggtgcggacgccgtcgacctcgtaggcgacgcagacggggatcgtctcgtagccggtgaggacgtcgagcttcgtcaggcagatgtccgtgagcccgttgatgcgggtcgcgtagcggacgacgaccgcgtcgaaccagccggtgcggcgcgggcgacccgtggtgacgccgaattcgccgcccttctggcggagggcctcgccgacctcgtcgtcgagctcggtcgggaacggaccctcgccgacgcgggtcgtgtacgccttcgcgacgccgacgacgcggtcgatgcgggtcgggccgacgcccgtgccggtgagcgcgccgcccgcggtcgggttcgacgaggtgacgaacgggtaggtgccgtggtcgatgtcgagcatcgtcgcctggccgccctcgaagaggaccgtgtcgccgcgatcgagcgcgtcgttcacctcgagggacgcgtcgcagaccatcgggcggatccgatcggcgtaggagaggagttcttcggtgacgaccgccgggtcgagggtctccatgccgacggccgcgaagatctcgttcttcggggcgagggccgcgtcgaccttcgcggcgagcccctccggatcgaagaggtcctggatgcggatgccgatgcggttcatcttgtcggcgtaggtcgggccgatgccgcgcccggtcgtgccgatttggttcttcccgcgggcgcgctcgttcgcctggtccatgaggcggttgtacggcgggatgatgtgcgcgttcgacgagatcctgaggtgcgagcagtcgacgccgcgcgactccatctccgcgatctcggagaagaggacctcgatgtcgacgacgacgccgttcccgatgatcggggtgacgccctcggacaggatgccggcggggagcaggtggagcgcgtacttctcgccgtcgatgacgacggtgtggccggcgttgttgccgccgttgaacttcacgacgacgtcggtgttctgaccgagctggtcggtcgccttgcccttaccctcgtcgccccactgggcgccgagcacgatgacggctggcatgagagtctccccggatctcgattccgtgcgactttggccgcaccttcaccgatcgtaccgggattccgatcgacgagggcggggcgtccgggccttcttggagggcattgatgggccgcgggcgtcgtgccgggcggggcccctggccgagtggaggggttcacgacaagtggaggacctacaccccctccacgtgtcgctaacccctccatcaaccgcacgtcggggtcgagcgggggcctcatggccccttcatccgccccaccactccccgagctctccacctgtacgctctcccacaagtggaggggttcacgacaagtggaggacccacaccccctccacgtgtcgctaacccctccacttcacgtcggtcaggggcgcaatcccgcgagcgggacgacccagacgccgtcggaccggtggacgacgggcccggagggaataacgacgacgagcgcactgggagaacgctcgacttgggaactcacccgaaggagattcgcggcggcttcatcgacagaaaggtgcgagagcttcgcctcaataccgatccagtctccggaacgagcctcgacgatcgcgtcgatctccatgcggccctttccgtctctcaaatgaaatacgccgcgcgcacgaattgcctgcgcgtagatccggagctcgtgaacaacgagcgactcgaacaagatgccgagagtctccgggtccgattcgaaccgctccggagcaccgccgaggaggctcatcgccagcgagacatcggcgaggtgacgcttcggcgtttgaacgaggctcgccttcgaacgcagtcgaggggaccatgcgggctgatcttcaacgaggaacaaacggcaggcgaagtcatggagaagcggaatgagttgctcagagggctctgaagacgagatctcaccgatcctccggcggaccgcggcgagagatgcgggttgggcgaccagacccgcgtatgccgcgaggaaggcccggaatcttctgggatcgcgccgcatccctccgacgatggggaagtcgtgctcctcgatttgctcgaggtacgcggaaacctcgtctgctgcatccgcagcgtcgagacctacgaatcccggccatccacctgacgccatccattcgatgtagtcggagacactcgcttcgaccccgccttcggcgaccgccgtcccatcgaagagggcttcgagggagacattcgcctgaacgagccctcgctcaaggagggacatcgtcctcatcgtgagtcgcctgatccggcccgcccccgagtgacgttgagactcctcctccggagtcgatgatccggtgaggatgaactgccccttctcaccccggtcgtcgatctcatgacgcaccaagttccagacttccggaatcgactgccactcatcaatgagccgcggaacgtccccgacgagaatctgctcgggcgcagaacgcagcaagtccatcctcgcgccggcgacatccagcctgatttgcgaaccgcccgccgcattcaccgcctgccgcgcggtctccgtcttcccgcaggcccgaggtccgcatacttcaactgcgcccgacgtgcgcagccctcgctcgagttccgcatcgacgaggcgtggaatgtacggcttcatgagtgaagcctaccgacaactacggaattttccatacctgatatatggaattttccatacattaatcgaggcgtcctgtcagtcccctggtcggatggaggggttcacgacaagtggaggacctacacccccccgtcgagttcgacgccgatcgacgtgttggaggggttggcgacaagtggaggacctacaccccctccacgtgtcgctatcccctccactgagggcaggcacgcgcggaatgagagcgcagaaggccgaatcggcgtcactcgtcggactcgggagccccgccctcgtcgatcgacttgcgaggacggccgagcccgcgcatcggagcggccttgggatcccggccggcgtccttgagggcgcgccgcaggacgacctcgatctgcgcgttgacggagcgcaggtcgtcggccgcccacttggcgagggcctcgtggacggccgggtcgagcctgagcaggagctgcttgcgctcgcgcttctcagccacggtcggatcggatcagtagagcgaaccggcgttaacgatcggctgcgtgcgcgtgtcggagcagaggacgacgaggaggttcgacaccatctgggccttgcgctcgtcgtcgagggcgacgatgtcgttctgctcgaggcgctggagggcctggtcgaccatggtgacggcgccctcgacgatctgctcgcgcgcggcgatgaccgcgccggcctgctggcgctggagcatcgcctgggcgatctcgggggcgtaggcgagggaggagatgcggacctcgacgatctcgaggccggcgagggcgacgcggttcgcgacctcggcggcgagttcggccgagacgaggtcggtgccgccgcgcagggaggtctcgccggggccgggctcgtcgtacgggtgggtcgtcgcgacgtggcggagggcggattcggcctgggccttgatgaactcctcgtactcctcgacggcgaagacggcgcgcgcggtgtcggcgacctgccagacgacgatcgcggcgatgttcacggggttgccgtcggagtcgttgactttgagttcgttcgtctcgaagttgtggaccttgacggagaccttcttcccgttcgtcagcggggggacgaggacgaggccggtgcgtcgcactgttccgatgtactggccgaagaactggcggaccgaggtctggcccggcgagacgaccgtgagcgaggtgaacaggatgaggacgaggaggaacaggatcgaggccacgacgatccggaggatcccgccgtcctcattggcgtcggccatgatcgcgcccgtgatgaagaagtagatgaagaagacgaacccggccacaaggatgaggaaggccgggaacgcggcggcggccccgagggaactcgcgggcctctccgcgatttcaacgcgggcggcgcttcgcgtcggatcgtctgcgaactcggagcgggaagtgggggttgtgggcgcagtcatcgctttctcctctgccatctccgcccgccgcgccttcacgcggcttcgagggcgaagccatatcaatatgatatctattttttatggcggcacaaggcccctctcatcggcctcgcccccggcacccgactctcggcgcaatcaatcgcatcacgcgagagcgcccgaaatcactgagggagtcgcccttcagcagccgccatcttcgccgccaaacggatcatggtgcgcgcatcgtccccactcgccccgctgcgccgccgataacgggcgcaggcgccatcggccccgccgctccacagcatcgcgacttcgtcgccatcgaccggaggaagcccccgactgatgagctctcgatatccgcgatccgcctcttcagcctcgtcgaggagtcgtcgtcccgaggcggtgacgatcatgagcgcggccacgaaggcgacagcgtcgagccgccggcatcccgccccgccctcagacggccttcgcgccctcgccgatgcgcagcacgacgagcggaccgccggtgggctgatccgagccgggcatcgggctcctcggtgatgaggatctcgatgcccggctcggatcagcccaccggcgacgaaacggctggcgcgcgcggcgccgaggtaggtctcggggctccgttccccggtcgcagtcggctcgtcggatgcgaagaccggtgcgggaaggacgaggtcggggttcgcttcagtgaggagtctgcgcaccagtttctcggtcgtcgcctcgccgccctcgccttacttgagggcgcgcagctcgcccttcgcgtcggcgaggtagtgggcgggccagtagtggttgtcgaagttcgtccaggtgacgaggtccgattcgacggcgacggggtaggtgatccccagggattcggctcccttcttcacattgtcgacctccttctcgaaggcgtactcgggagagtgcacgccgatgacctgcaggccggcgtccttgtaggtttcgtagagcttttcgactccggggatggagcgttgacagttgatgcacgagtaggcccagaagtcgacgagggtgaccttgcccttccgctcggtctcggtgaggggctggtcgccgggggcgttgaaccatgcgacggcgccctcgatcttcggcagcggaccgcagttcgcgagttcgtccgccccgtcgaggcaggtagtggacgaggagcccttgggggtggaatcgcgcaggtacttgtcggtgccagcctgcagggatgaggtccaatcaggcaaggcgcgctgaatcttcgcgggcaggtcggtggcgagaccgatggcgaggaggatcatcgcggcacccgcgatgatgcggatcagtttctggcggctgcggaaggccgcgatcctctcggtgaggcccctgcccgcgagggcgaaggcgagaagggggatgcccgtaccgatcgcgaaggagagggccagggcgacggtctcggggccgatgcggcccgtggtccccgcgacggagacggccgcgaggaccggcccggcgcagggaacgtacgcggcgccgaggacgatgccgagcaggaatccgttgtcggggcgcttgccctgagagcgtccgaagcgggtgaagggcttctcgaggatctccatgaggcgggggatcatcatcgcgatgccgatgaggacgagggcgacgattccggcgatgcggatgaagtcctgagggagcccgaggagagtgaggatcgtggagcccagcagggtgaagaaggtgaagctgaggacgaggcctcccacgacgaggtaggggcgccatttgctcgagcgggcgagtgacaggctcgtcgtcgattgcgccggggcgctccccagcgagccgagggagccggccgtcatcacgccggggatccgcgcgatcgaggattcggactcccgggagcgcgcgccctgggcgccgcccgacaggaagatcacggggagcacgggcaggatgcacggggagatgcccgtgacgaagcctccgatgaggccgatgagaacgaggttgaccatgtatttcctccttggactgtcatctctcgttcgcagccgagggcgcttcggatcgattccctccaggattcgagcagtgatccatgtcaccaatccggaagtcttgccactccgaaccacccaatgagcgggtgccacaggggcgccccggaaacagattgggacatgcatgaacctccgcaagatcctcgccgcctccgccctcgtcgccactgccgccgtgggcatcgccgcctgcagctccaccgcgacccccgacaagatgggcagtggcggcacgtccatgacggacaagatgggcgatgagaacgccatgtccgaccagggcgctatgaccgacaaggacaagatgagcgaccagggcgccatgtccgacaaggacaagatgaccgaccacgacaagatggatgacggccagtcgggtcacatgcacaagcactgaggccctcggccccatcgaggcggatcccggggtgcgaccgtgtccgagtcgcgccccgggatccgcttccgttcaccgccctcttttgggcgcggacgggaagagcccgtcgggagtgcgagacgggcagggatgagggtcccgatgcccctcatcacgagcgccgggtcacgccctcgtcacccgcgccggaccgtccccgtagagcacgccctccttcgccttgaccgctgcgacgaggacgaaactcaaggtgacgaggagtgcccacgagccgaacttgccgacgtggaccatctgccagccggcctcctgatccgggtagcgccaggcgttgaggaatgtcgccgcattctcggccacccacaggaagaagccgatgaggatgaaggcgagcgccgtcggcatccggtagcggtctcccccgaccgtgaatcggaccttcgagccgtgcagggcgatgaggagcgccaccgcgatcggccagcgcagatcgacgatgtagtggtgggtgaagaagttcgcgtagaccgcgagggcgagggcgctcaccggccaccagcggaaacggtcgacgtgcaggtcgaagcgccggaaggcctggcagatgtaggagccgaccgaggcgtacatgaagcccgagaagaccggcactcccccgaggcgcacgaccccggcgtcaaggtaggcccaggagccctggctcaccttgaagatctcgagggcgaggccgaggacgtggaagacgcagatgacgccgagttccctccaggtctcgagtttgaaggcgacgaaggcgatctgcacgatcacgacgtagatgaggagcgcgtcgtagcgggcgatcggcatgtcgaagcgggcccacacgaaggaggtggcggcgaggccgaggaagacggccgccgggaacaggcagcactgcacttcgagccacacgaactggacgaggcgcagcgggaggagtctgagatcgctcagcggacgacgttcgggcatgggttaagggaagcacggattgaagcagagctcatggacaagcgtctgccatctcacgcgcctccgggtacaagaccccgggaatcattgcagaaggacttcacagccgccatcagcatgcgctatcattgccgacgactgattctcagtaagttccgaccagttagcggaactgaatgctccgccgggtcgctcgcaagagcggcccggtttttgcaccaaacgcccccgcggcgagtcatgattactccatgcagatcaacgcagatacggcaacttcgcttcgctatcgaatcggcatcgacgtcggcactcactcgacgggcttctgcgcggttcaagtcaacgagcatgacgcccctgtcgctttgctcaattccatggtcttcatgcacgactccggcatcgacccggatcaggcgaaatatgccaagacgcggagagcgacatccggtgtcgcgcggagaacacggcgcttgtacagatcgcgtcgaacccgcctcgcacagctcgacgaagagctcaagcgcctcggctacccgatcgttgatctggagaccctcgacgatccgcgcgccccctggcacatccgggcccggctcacgaatgagttcatcctcgacgaggatgagcgtcggcgttcggtttcaattgcgctgcgacatatcgctcggcaccgcggatggcggaatccctactccaaggtcgagtcgctcctcatccccgccgagccatctcaattccttcgaggtctcggcgaaagggtcagcgacaagctcgacattcttgtagatcccgaagcaacgcccggcgaggtcctgtccgtcctcttcaccagtttcccgacggcgaagatccgaggccccgagggcattcttcaaggcaagctcttccagtccgacaacgcacaggaaatccgccttatcgcttcaacccagcgaatcgaagacgatgagcgcgatcacctgattcgctgcgtcttccaggcgaagtcgccacgcgggagcgcacaaggccttcgggggaaggacgcgcttccgggtcaaacgcagcatgttcgtgcagagaaggcacatcccgctttccagctcttccgcatcgttgcggttctcactaaccttcgcatccgagaggggaaggccgagcgccgcctctcgactgatgagctccaaggcttggtcgatttcctcctcattgcaggagagggcgatgctccgtcatgggcggagctcgccgacaatctcggaatcgaacgctctgagctgcgcggtacggcgaagccgggccctgatagcacacccgcgttgtccgcgcctcctcttgatgcaactcatcgagcgatcatcggatcagcgatcccctggctcatcgactggtggatctcggcctcggcagaggaacggggaaagatgatcgacgccctgtccaacagcggcggatccgaggacatccccgacgtcgatgacgaaatcgccgaggtcctggaacaggcatcagagggcgatcaggaattgctcgacaagcttgcgcttccctcgggccgtgcagcttattctctcgattccctccagcgtctcaccgaatgcatgctcacaaccgggatggatctccacgaagcgcgcaaggcggtcttcggcgtcgatgactcctggcagccgcccgccgatccaatcggaatgcctgtcggtaatcccgcagtggaccgcgtgacaaagcaacttgcacgctggttgggagccgccgagcgccgatggggtacgcctgagtcgatcaatatcgagcacattcgggatgcgcttgggagcgagcgcgcagttcgcgaagcgatgcgtgataacgaggcgcgattcaagcgcaatcagaagatgttttccgagatgcatgatcgtctgggactctcgggccgcccgcggcgtagcgatctcattcggtaccaggcgctccagcgccagaacggcgaatgtctgtactgcggcaccccgatcgatttcacgactgccgagatggaccatatcgtgccgcgatcgggggcggcaggttcgacgaatacgcgcaataatctcgctgcagtctgtagaccgtgcaatcatgccaaagggaatttgccattcgccgtgtgggctgagtcgaacacatcgaggggtgcgactcttgcagatgcatcccgtcgagtccggcacttcctccgtgacgagggagtctcccccaaagacttcaaacgattccaaaaggacgtcatcagtcgcctcaaatcgaagtccctcgatgaggagttcgacggacgctcgatggaatcggtcgcctggatggcgagcgaactccgcatgcgcatcgaccagcatttcaaccgtgggggtcggactgtcgacgtcaatgtctaccgcggcgccctgacagcagaagcgcgtaaggcgagcgggttcgaaggacggctcaacctcatcggaggcggaggcaaaacccgattcgatcgtcgtcatcacgccatggatgctctgaccatcgcaatgatgaatcgttcggttgcgatgacactagctgttcgccagaacctccgaaattcccagcaaatcacgggagaaacggaaacatggaagaccttcaccggcgtgaccgatgaagctcgcaagcagtgggagcgttggaacgacgccatgcgtaccgcatcggacctgttcaacctggcgctcacaaacaatgcgattccgatcgttgagaacacccgtcttcgtcaaggcagcggcgccatgcacgaggcgaagatccagaaactcatcaaggtgccgctcagcagcgccctgtctgtggagctgatcgaccgcgcatccaccccggctctttggacagccctgacccgatgccccggttacgacgagaaggacggcttgccatctgatccccatcggtcgatcgttgtcaatgggcatcacattcgcggagaagagctgatttccttcttcaatacgggctctgcctgcatcgctgttcgtggcggatatgcagagctcggagcatcgattcatcatgctcgcatctacaggatcgacggcaagagtccggtctacgcgatggtccgcgtctatcaggtggatctcgttcgccacaggaatgaagacctcttctcctgcgaaatacctcagtcctcgatctcgctgcggaccgcggagaaaaagatccgccaggcactccgaaatggaacagcgactcaaatcggctggctggttgaaggtgatgagctcgaaattgaaatgggaaaggtagcaagtggacaggctgaatcaatagctcagggctttcctaccgtaacaagctggagggtctcaggattcccccagcctaagacactccggctgaaaccattactactggcagcggagggagcaccagaatcactaacatcagaccagcaggtcgtgatctcgggacgcggttggtggcctgcgatcaacaagctcggaaaggcggggtcaacgagggtcatccgacggaatgccctaggcgtcccaagaactgaaccaacaagcggacttccgatttccatcgatctgaaataggcacacgatggcgtcgcagtggcggattttagacttctcctcgtttgaaggatccctgtcttccattcgaggggggatcactgtgacgccgcaagagggctgcccgactgatgttccgaccgccgacatcgcggttgtcctcatcggcactcatgtatcactgagtaccgccgttctccaccgattatgcagcgctgacatcgcagtgctcttctgcgattggaggggcgtaccagaaggggcggcttactcttggtcggaccacggtcgcgttggagcacggcaccgcgctcaggccgaactcagcgcacccagaaggaagaacgcttgggggcgaatcgtccgagctaaggtcctcggccaatccgctgtcctcaagtctcacggtatccctggggcaggcgagctccacgcgcttgccgatcaggtccgttccggagatcccaccaacgtcgaggctcaagcggctcgactgtattggagccggtacttcaatgggagaagcggccgatctccgtcctctggtgagttactcggccagaatccttgccttgactatggttatacggtcctgcgcggattcgtcatcaggggactcctcggagctggcttgtccgggccgcttggcttgttccaccacggcaggagcaacatgttcgcactcgccgatgacctcatagaaccatttcggccatgcatcgacgatgcggtcttggagctctccccagatgcctcaccatccgattccgaggtgaagaggaggctcgtcgctgcggcaacgcaaccgttcgatgagagcggagtccgaatcccggcagcactcgaggcattcgcccagcagttcggtcgctatgtcgaaggagatcttcaacgtctcgttcccccggtgtggtccggccccattcgctctgagtgactttcatgcccaacgatccgatgtggtgtctcgtgatgttcgacctcccagtggagacgaaagcgcagcgacgtgaggcgaatcgttttcgccacaatctgctggactggggcttctcgatggtccagttctcggtctatgtcaagtactggccgaccggcggccaggatgcagccaccatcggcgctatcaagcagcaccttccgcccggcgggcaagtccgcgtcatcgctgtttccgatcgtcaatgggcgaccggtctcagattcgacaacgcaagccctcagaagacggatccgagacctgagcagctcacgatcttctgacgtccgatcgcctgcaatcgttgcaattccaaggaaaaccgccccctcatgttatcaaaggggaacggtgactgattcccagccgaggaagcggctagccctgtcgaagtggatgttatcaaaggggaacggtgactgattcccagcgcccagttggcctcctcatcggcgccctgatgttatcaaaggggaacggtgactgattcccagcagcaggtgtccgacgcgctcgcggccgcgatgttatcaaaggggaacggtgactgattcccagctcgaagcgtgcctgtcggaggcccagtcgatgttatcaaaggggaacggtgactgattcccagcctgaagtgcgaatcgcctcgtccaagcagatgttatcaaaggggaacggtgactgattcccagcgacggcccaacgcctatcagacccgacggatgttatcaaaggggaacggtgactgattcccagccagcggggcgcactccgacgaccttgctgatgttatcaaaggggaacggtgactgattcccagcgtgacggacccgactcacgaacggtaacgatgttatcaaaggggaacggtgactgattcccagcggatcatcgctttccacccggtcatgtcgatgttatcaaaggggaacggtgactgattcccagccgtcggacttcgacttcgaccacgatccagatgttatcaaaggggaacggtgactgattcccagcactggtacgtgtacgacccatagacgccgatgttatcaaaggggaacggtgactgattcccagcactggtacgtgtacgacccatagacgccgatgttatcaaaggggaacggtgactgattcccagcgcagacgctcgacaaggtaaccggggcggatgttatcaaaggggaacggtgaccgattcccagccgaaggtgaaggggtggcagtgggagacgatgttatcaaaggggaacggtgactgattcccagcaggcgcaagccgacgagatgaaggaccggatgttatcaaaggggaacggtgactgattcccagcgcatccgcgacgtccgtgattacgcctcgatgttatcaaaggggaacggtgactgattcccagccgaacacctgccacacgcccgcccggtcgatgttatcaaaggggaacggtgactgattcccagccatctcatcgccccgaggggagcgataagatgttatcaaaggggaacggtgactgattcccagctggaggcgtgcctgtcggaggcccagtcgatgttatcaaaggggaacggtgactgattcccagccgggaggcgagggtaggctcggccgagggatgttatcaaaggggaacggtgactgattcccagccccaccaggcgcggccccaccagatgaggatgttatcaaaggggaacggtgactgattcccagcaactctggcatagggtccgtttttctcagatgttatcaaaggggaacggtgactgattcccagcaaaaccgacctactacgtcctgcacgaggatgttatcaaaggggaacggtgactgattcccagcgcgccgattagagggtgccgcgccccccgatgttatcaaaggggaacggtgactgattcccagcagtcggatccgacggtcattgagtaccagatgttatcaaaggggaacggtgactgattcccagctggcgatgccgggccagatggaccaaatgatgttatcaaaggggaacggtgactgattcccagcttcgggtcgccgaatgggtgacgacctggatgttatcaaaggggaacggtgactgattcccagcacataggcgagaccgtgacgaccgcctagatgttatcaaaggggaacggtgactgattcccagcttcgggtcgccgaatgggtgacgacctggatgttatcaaaggggaacggtgactgattcccagcaatcccacgtccggtcgaacctccagaagatgttatcaaaggggaacggtgactgattcccagctcggagtggcgtcatgaatgacggaacggatgttatcaaaggggaacggtgactgattcccagcgaaatatgcggaaagcagcgcaatctcgatgttatcaaaggggaacggtgactgattcccagcagctgatgcccttgcgagcggatgagttgatgttatcaaaggggaacggtgactgattcccagcaatggtggcgcggggggatcttcgaggggatgttatcaaaggggaacggtgactgattcccagcaactacagcacgggccgcccctacggccgatgttatcaaaggggaacggtgactgattcccagccggggccaacgggcaagacatgtaccccgatgttatcaaaggggaacggtgactgattcccagctagcacggcgggaggacggcgcaaccgcgatgttatcaaaggggaacggtgactgattcccagcggtggtagcggcctgcgagggctgcgccgatgttatcaaaggggaacggtgactgattcccagccagtgcagggaggggagcgcgcggcgacgatgttatcaaaggggaacggtgactgattcccagcagcaatgtcgactcgctcatcggtctgagatgttatcaaaggggaacggtgactgattcccagccagtgcagggaggggagcgcgcggcgacgatgttatcaaaggggaacggtgactgattcccagcgtcccgatgtaatggtgacgcgagccccgatgttatcaaaggggaacggtgactgattcccagcctgtgtcgacgcgcctgcctgcgcacacgatgttatcaaaggggaacggtgactgattcccagcctcgtgggcggcgttgacggcggcgtcggatgttatcaaaggggaacggtgactgattcccagcgtcccgggcacgcccaccgaacggtcgcgatgttatcaaaggggaacggtgactgattcccagcgcttcatcggcttgtaccgccgcgggttgatgttatcaaaggggaacggtgactgattcccagctctggaagccgtgggcttcgatcgctttgatgttatcaaaggggaacggtgactgattcccagctcgcggtactgtgtacgtgtcgccccgagatgttatcaaaggggaacggcgactgattcccagcgatgttggtgacttgcgcggcagagggggatgttatcaaaggggaacggtgactgattcccagccacggggtgggctcccggcttacgggtcgatgttatcaaaggggaacggtgactgattcccagccgcggagctgatgatccacgacccgtgggatgttatcaaaggggaacggtgactgattcccagcgagctcggccatcccttccgcttccttggatgttatcaaaggggaacggtgactgattcccagcctcaactgctcgtcagcgctcgccgcaggatgttatcaaaggggaacggtgactgattcccagccggagacgagagaatgacacccgccgccgatgttatcaaaggggaacggtgactgattcccagccgaggaggtggaggtcggcgcggaatccgatgttatcaaagggaaacggtgactgattcccagcttgcgggcgaggtccttgaggacctgtcgatgttatcaaaggggaacggtgactgattcccagcgtcccgggcacgccgtcctcaccgtggtgatgttatcaaaggggaacggtgactgattcccagcgacttgttggccgacttgttgcctgacagatgttatcaaaggggaacggtgactgattcccagctgatgttgatcaatgcattcccagccgatgttgatcaatgtgcaatctttaccattataccatggagacacactgttcgatttcaggctttgcatcgacgattttgagattgcagagacaattcgaggagatgcaattgtcggccccagcaagatctagatgaatgcaaatggaatcaaataccagcagctgggacgatagttgactctcctcgaatccacagactgagccaacgtctcaaatgaacgtgaactttgaaaaggaaggatgacggagagggagtgatgcatacatttccgcaactgcacatggaatcatcctgcatccgcagactcggctcacgaacagtcacaaagcgcttcggtggcgaataaagcgcctactcccccctccgcgcgcacggacgcgacctcgtacagggcgatgcccgtcgcgaccgcggcgttgagcgactcgacggcggacgagatcgggatcgagacgatctgatcgcaggcctcgcgcacgaggcgcgacaggcccgagccctcggcgccggtcacgacgacgagcggcgaggtcgcgagctcgaggtcgcgcaggcgcgcgtcgccgccgccgtcgaggccgatgacgaagaagcccgcgcgcttgcactcctcgagcgcgcgcacgaggttcgtcgcacgcgccacgggcacgcgcgccgccgcgcccgccgagaccttccacgcggtcgtgttgacgccggccgagcggcgctcggggatgatgacgccgtcgacgccgaacgcgccggacgagcgcagcaccgcgccgaggttgtgcggatccgtcacctgatcgagggcgacgagcagcggagtgccgagctgctggagcgaaccggcgatgaggtcctcgacgtccgcgtactcgtagccgcgcacctcgatggcgacgccctggtggacggcgccgtcggtcgcaacgtcgaggtcgcgacgggtcacctcgaaaacgggagcgcccatccccgcggcgaggcggatgacctcctcgacccggtcgtccttcacgttgtcgaggacgaagacgcgttcgacgggcacgccggcgcggacggcctcggcgaccggattgcggcccgcgatgagctcatgaccgggggcgaccttgatcgacgacttcgcgcgggcgcgggcgatcgcggcctcctgggcctccttcgcctcgcgcgccaccttgcgcttatacgcgggatggtaggtgcgatcctcggccttgggcgtcgggcccttgccctcgaggcggcggcgggagtgcccgcccgtgccaaccttcgcgcccttcttcgagccgggcttgcgcaccgctccgcggcgaccgtcgtttccagccatgagaaccgtccttactcctacgcgagggcgcctcccggcgcctctgatccgcaccagcctaacggggagcggccccgcaccggcagcgcggccccgggtttgcggccggattcacgccgtcgccggttgtccacacgttgtacgcatggaatccgcgacaagcgctgcgtatccatacgatgagtcgcatgttgatcgcctatctcgacgagagccagcgcgacggctgctacatcattggcgccgctgtcgcggagcaggccgtctgggaagtagccaccgataggctcgccgctcttcggagtgagctcgtcgatgagttccagcttccatcgggcattgagtttcatggccatcccctcatgcaatcgagcggcgactggcggcctttgaaggggaagcatcgagagaaggccacggcctatctgaaagctctgtcgacaattgacgacctcgacatcagtttcgtgttccgtggcctcgacattgagcggcaacgcgcaaagtacaaggatccctggccctcccactcagcctgcatgacgttcacactcgaatcgctcgacgatttcgcgcgagcgagaggcgaagcgtccgtcatcgttgtcagcgacgaatcgagctacgaaagggaactgacaagacgattcgagcacgaccggtcgctcggcacattcggctacaggcgcagtctccttgagcggattagcgacccactgaattggagctcatccaaggacaccgacgaactccagatcgtcgacctcgcactctatgtctggcagcgaagcgcttggcctcttgaggccgaacatccgaaagcgaaagctacgcgggagaagctcctgaggaagctcgattccaagatcttccgaggagaaatctggcgtccttagccaaaaaacaaccgccccgcgagcggggcggtcgtgctgacgatgccccgacatagggtgcatcgtccctccagaataccggaggccatccaacgccgacaagcctccacagagtggcccctccgaagatccccagcccctacgccaaccgccagctcgccccgtcccgcccatcggcgacggcgatgccggcggcggcgagccggtcgcgcagcgcgtcggcccgcgcccagtccttgtcggcgcgcgcctgggcgcgctccgcgatgagcgcctgaacgagcgcatcgagcgcctcgtgctccgcggtccccgcgcccgaaccggcgagcccggcgcccagccccgacctccactgggtggaggccggatcgagcccgaagacgtcgagcatggagcggacgaggatctgctccttcttgacggccgcggcatcgccctcgtcgatcgcggaattgccgagcttgaggtgctcgtggacgacggcgagcgcgcccgcgacgttgaggtcgtcgtccatggcggagacgaatccctcggggagcgccgaggcgggcagagcgatctcgtcggcggtcgcctcgccgaccgagtcgatcgcgcgctcgacgaatccggagaacttcgcccacgcggctgccgcggcgggcagcgtctcgggcgcccactcgatcgccgagcggtggtggacggtcgacagggcccagcggaccgcgacggccgggaagtccctggtgagcgcctcgatggagaggacgttgccgagcgacttcgacatcttctcgcccttggtcgtcacccacgcgttgtggacccacaggcgcgcgaagccccaaccggcgccgtgcgactgggcctgctcgttctcgtggtgcgggaagcgcaggtcgatgccgccgccgtggatgtcgaactcgtcgccgaggtagcgccgcgacatcgccgagcactcgaggtgccaaccggggcgcccacggccccacggggactcccaggacgcggtctccggttcactcggcttcgtcgccttccacagggcgaagtcgcgcgggtcgcgctttccggcctcgacggacgcgtcgatctgcgtctcgtcctcggtcgtccgcatgtcgacgagccgctggcgcgtgatcgacccatagtcgggctggctgtggacgtcgaagtagacgttgccgcgcccgtcgtcgtaggcgtgcccgcgctcgacgagcctgcgcacgaggtcgatctggtcggggatgtgcccggtcgcgcgcggctcgtaggtcggcgggaggacgccgagggtctcgtacgcctcggtgaactcgcgctcgaagcggtaggcccacgcccaccagggcgccccggcctcggccgacttcgtgaggatcttgtcgtcgatgtcggtgacgttgcggacgtaggtgacgtcgagcccggagcggccgagccagcggacgagcgtgtcgaaggcgaccgcggcgcgcaggtgcccgacgtggggggagccctgcaccgtggcgccgcacaggtagatcccgacgcgcccggggttcaccgggtcgaggggctggaggcgggccgtcttcgagtcgtgcaggtgcagcgtcatgcccccgatcctaccggcggcgcccggcggtcacgctcgggccgccccgtggtgggatccggtgacgacgggcggacgaggccggggccgggcaccgaaaaggtcagaggagatcccctcgacgaggaaaggtgatgctttcggcgggggcgggcgccggatcaggcgccgggcgtcaccttctcctcgatgagggcgcgcagcgcatcgacctcgttcgccagcggcacgacgcgctgggccccgccctcgatgccggcgaagcgctcggggacgggagggaggtggccggtggcctcgaggatcgtatcggcgaacttcacgggcagcgcggtctccatgacgacgaccgggccgtcgaggcgcggggcccactcgcgcgcgacgtggacgccgtcggcggtgtgcgggtcgaggaggtacccgtcctcggcctcggtgcggcggatctccgcgagccggtcggcgtgcgaggaggtcccggagacgaagccgaagtcctcgcgcagccgcgcgaactccggggtgcccgacaggtcgaaggagccgtcgcgctcgagggccttgccgaagagctccgcagtgcgctcaccgtcgcgcccgagcaggtcgaagacgaagcgctcgaagttcgacgccttcgagatgtccatcgacggcgacgaggtcgcgagcgtctgctcggcggagcgggggcggtagacgccggtgcggaagaactcgtcgaggacgtcgttctcgttcgtcgcggcgacgagggcgtcgagcggcacccccatcgaccgggcgatgtgcgcggcgcagatgttgccgaagttgccggaggggacgacgacgttgacgtggtcgtccgccgacgtcgaggcgcgcagccaggtcgcgatgtagtagacgacctgggcgacgaggcgcgcccagttgatcgtgttcaccgcgccgatgtgccacgccgccttgaacgaggcgtccatgttgacggccttgacgaggtcctggcagtcgtcgaagacgccgtcgaccgcgacgttgacgatgttctcgtcgaggagggagaacatctgcgcccgctggaacgccgtcatccgaccggccggggtgagcatgac

SEQ ID NO: 4349 - DNA, 23345 bp, synthetic construct
  source 1..23345: mol_type = other DNA
  misc_feature 1..23345: note = Synthetic
tcgtgtgggcacgaactgtattttgcgcctaggcccgcttcaaggtccttttcacttcgtcttctaggctttcttcgaggcctgcaccacctagtttcaccagatcatcaagggaaacagttgtgttagcgtccacgaaggcaagcatcggagtgattgattcttccgcgagcccggtgagttgcgaccaggccagccggtagaggcggagctgagtcgcgtagtaacgcagtgtttccttcttcgtgttcctgtgtggagcccgccccgtcttccagtcgacgatgattgttttaccgtgtttatcttcgaagacagcgtcgatcctgccattgactgaaatatcagcgaccttgacgctgaatgcttcttcgatggcgatcggtgtgcccgttttgacgatgggaagctcgacgaagttgtcctgcatgtgtcgcaatcgggcgcgttcgtgatcatcaagggtctcgatcccagcaacgggctcatcgcgttcttctgggctggcaagatgcagttgtcgttcaacccacgcgtggaaaatcgttccaagcgttgcgctgtcgctgggttgagcgggcatgggtctgcgcatatccagagcaaacgcgtcgatgtcttcgagcatctttgaaaccgaggttgccggaatatgatcctggcggatcaccatggtttctttgcttgatgcaagtcgatgttcctcaatgagcgctgtcacgtctttaacgcgctgagattcacccaaggcgtcgagcagttcgaagacgtcggcgtccgttttcagctctgcttgagcttgtcgcacgcgctgggctcctttggcaaccgcttgacgtgatggaccaatttcgaaggggaagtagatggtgtcttcctcactgtcttgcgcaaacgactccgatgttggagcttcgggaatgacgtcgtttaagccgtcgattcgtttttgaagttcctgcaactcgttgccgtctttgacatccacgtttccgtttgcccacacgacttgccctgtcgccaaggtctgttcgaagtcttcgatcatcgcatgccgtgatgccatgaggtagcgggaagggtttcgtagggttttgctctcatccagccacgagccgatgaggagttgcgtgtggcgtgctcgtgtcattgccacgtatgccagacgacgttcttccctttctacgtgtgcaccaagttccggcccatacacggtctttaaccactttgagaatcctgcggatggggtgcgtccgttagaaacatcaatggtgaaaggtgggaggtcgccatagtcacctcgcaacggatgcgggagttcttcaggagccatgacccagccggtttgggctggaggctcgtcccgccaatacacgctcttgctacggtgcgaggggaaaattgtatcggacattccaaagacaatgacgctatcccattccaggcctttggatccgtgcactgtcaggatctgcactgcggacgggtccggttgaacgtcaacgcctttgagccctgccggatcgctttctgcaacgttcagccattcgacaagaccagcaagagtggggttatcaacgcttgattcgtattctgcaatctggtcgataaaggcatcgagcgattccctagcacctgaacccagcgggtcggcgatcgcatcatcgaggatccccatgatctggcttgctcgttctgcgagttcaaccagcccatgcccacgcaacgagcgtagttttcgcaggcgctctccgaggcgaagaacgcgacgatatccaccttcagagaacgatggaccatcaagcgcctccgtctgcgcatccgattcttgaggagcatcgttggcactctctgcaacggaatcggattgtgacgatcccgcttgacgattcgtagacgtccatcccacttccggaggagaatcaacggctgacagaagcacgccctcatacggagttcctctgctcttacggttcagacggcttgcccactgccccagcaaacgcaggtcggacgctccgatatcttcacgaacaaggagtctcaacagggcaggagatgcatctactgagttcgtaatctcgagggctgcacgcaggtcagcaacaaccggttgttccagcagtccgccgagcccgagaacttgggtgggaatgccatgctcgcgaagtgcgcggtcaatgggaagaaagtggctcttcttgcgacagagaatgccgatcttccactcactccgatgggtattgcgaaggcgttgcacgtagtcaacaacgtgcgcgatctgagcatcgcgatcagcttcataggcaatttcaacatcgccttcagttgccaatgtagattcgacgaggaccggagacgttgcagcatgcgaatgtgagcgaagcggttttgccacttcgttggcgcatacaaggatctgacgatcgttacgccacgcggttgatagcgtcagagtctgttccggcttgggttcttcagaacagaaacgttccatgaatgattctagcgaggatgccgaagcacctctccagccgtagattgcttggttcgggtcgccgacggcagtcaccgcctggtctttgaagagcgttgacaggagttccatctggatgacagaggtgtcctggaattcatcgagcagaacaagcccatattctttacgaatctgttgaacaacatcgggcacggtattcacgattcgagtggccaggatcagctggtccgaaaaatccatgactccgagttcacgcttacggcgttggaactgggcaatgggatcaaggagggcgatacgaagctggttacgcgcctgcaccttacgtgcgtcttcgttagaatcgccgacctcggtgagttccgctccgaattgtcccaactgttcgcgagcttgttcgatgctgagtccatgctcccccaactgtccgttgaggctcaacgccgtcgtgaccgcagacgaaatcgtgatgttctcatcgaggcgtttcggccaattcgtcatgatgtctgtcatcagctgaaccgaaccagcttggctgagcattgtgacgtcaggattcaagccgatccgtaaaccgtgttcgctgacaatctgccccgcgaaggcgttgtaggtcattgatgtcggttcttcatgcgggtcgatcatctttgttttcgcagaagaatcatcatcgttgctgatcttttccttttcggaagctccgatgccaatgctgagtttcttcaatcgtgaacgtagacgatctttcagttcacctgcggctttctttgtgaaagtcaggcccagaacacgcgacgctgtgatgtccggttcgttggcaaccgcccagagaacgcgcattgccatcgtttccgttttgcccgaacccgcgccagcaacgaccagcagcgggtgtagaggtgattcgatgactttaatttgctctggggtcggatggattttggggttaatcagtcgctggatctcttcagcgctatagacatgctgtgtcattgttcagtccaccgtccttcgaccgctgtcttgtgcaggacatgagcgcgcaaacacgcaccgtgagcacttcgtattatctggtttcgcctgcaagcgaatgccacgcgcgatttctcctgcgctttgaataacggcatgccaggcgcatttttcgtcttcgtcaagaacgctttgcgtgcgctcttgcagtttctttgccagaaagaccagcttggcaccgttgacttcactggcctgacggtcaagccctaggtctgcaccgtttgcgatcatctgagcgagagcaatctgatagatcgccagctgagcgtgatcttttgcttcttgtttggtcgcaacttttcctgttttaaagtcaacaatgtgaacgcgaccatcggggtcaacctcaaggcgatccaggcgtccacggatcgtgacgccatccatgtcgacttcgatcgcccgttcggtagcaatctcaatgtcgtgcggacattgcgcgaggtattcagcaagatgctcaaccttgtcgagggcggcatctttaaactcaattccgccccaggtctgcatatcgatatcgattctttctagctcctggagcaggtgggattggagttcttctgtgctcccgcgagggaagacttcagcaagctcgtggactatttgcccaactgattgagcattcgtggcacgaggctgcgcaccgatagacgagaagaaccagcgaagaggacaatccatcatcgcttcgatacgcgacggagaaagaacaacgcgttgagaggcaatgcgttgctgggaagtcagcggaccttcaccagtccattcatcggggtccgccgaggaaatgccttctcgagccaaaagagcaagaagagatgctgccgtcgattcgtcttcgctttcatcgggcgcagatgcagcacgacggagttcagcgatctgaccttcgaggttcaaaggagcaggtgccggagtcggaactgctatgtcaccgccctcttggccttcaggattcacaagaatcgcgtaaaagcgtgaaggcgcatagtcttcagcgacgacaacaccaagatgcagatatgttgaacatcgagaaactgcggctgccagcagacgacgttcgtcatcaaggacagctctgcgcgccacctgaggttcatcgagaagaacacgcccattcgcgccgtcacctgtcctacctaaagcaacatccgccagcaggtcaccacgcatcgcgcgtgtgcgcaggcgcgtatttggccacacaccgtcttgcaaccctatgaggacgactacgctccaatggcgacccatcgcttgtgccggagtaatcacacggacaccgtcaggccgtactgcaacgcgactgatcgtatcgacggggacagtgtgatcaagcagttcttttgcgaaatcgcgggcgttcccatcagggttacgttgctcccagacgtcagccacgcgcatcagggagagaacagcgtccagctggtcgtcgtaccacgatgagtcctgatcattagctagagcgcgctctttccagtcgtcaccaacatttgccgcatcccacagcatccatagaagttggcgtggacgctgttcttgatccgttgaaatgccccacatctgcgccgcgcgttgcaattccggcggtacaaaaccgatttcctggttcgtcaaaagatccggctggctcatcaacgtggaagccgtaaccagcggagcatcctggatgcttgcacccatccatgcgctgacccgttgaagaagcgaatagagtttcatcccatcgcattggatcagtggcgaatgaataagagcctctgcacattcatcgccacgcgcctgcgggtgagaattcatcagctcaagaagaatgcgagttgttgcaatactccggaaatcgaaggcagtagagtgcgaggtaaccgggattccaccgcgacgtaaatagcgacgagtttcttcagcgagggcctctgatctgacgatgacgacctgatctttccaagcaatcttgtcgtgcaagaagtgggcacgcagggcatgcgatacgtgtgcaccaagctgcgcgtatgagccaccaacgtgggtgattaccttgccgtcgagcttctgagcctgcggagcaaccccgcattgacgccgaggattgttgtccgaatgcgcaatgccctgggcgatcaccttgtagcgttcacgcagaacgggcgcggttgtgtacacgtcacccagctcatgagaattcagatggagcgtcttttcaaggcgaccatccaaatggggctcaccaccacggtacgtagcgacggcaacatctgagtcagcaaaagcgacaatacgactacccagctgatgcagttgggcgagcagagtgatagtggatgccgtacagtcctgcaggtcgtcgacgatgacgaggtcaggaagtggccgttcgcccgtgatacccagagaagcagctttgtcctgccactgtccaagaacatctgctgccagggcttggatacgagaaatgtcaaccgccagtgtgccctgatactcaagagcgaattgaggttgttcaaggtagcgtcggagcagttcaccggctgcgatccactggggtttatcaaagtcgtgaccggcgcgactgagcgcgataccgtccattccggcttcacccgcgcgcgaaaacagatccctgagttcatcgcggaaagcagacattccgcgcatttcctgcgagattgagtccggccattcaatatcagctgattccagtagatcttggatcagctgatcctgcattgcgccggtgacaagctcaatgccacccaggggttcttgacgttcaacgcgccactgattcacaatccgatacgcgaaagctgacagggtacgaacaggtcgaagagtacggggagcaaaaaactgagcccgaggggtcatgatctgcgcacgaacgcggtcaggaacaatgatgacggcatcttcgcctttttcaattgcacggcggaagacttctaacgcacatgtcgaccgccccgaacctggcgcaccacgaacgataagagaatgcatttccgctgaatcgcatgcctgtttctgagcatgattcagcggcggaatatccgcccatccatgcgggcgcgtagcaatctgtacgtttatttcgctcatagggtaatcatctcaggaggcatgtagaaaccaatgtgcatagcattaaagtcaggttcgaaaaacagatcactcattgagtgaaggagtgggtatgaatatcatcgtcggcgttcgcgaaagcactcgtgaactgcatcttgagttggatctgaccgctgatgagctgactgcaaaggtcgctcaagcgctcacaggcgactctcttctggatctgacggacgccgagggcgctcgttatcttgtgcccggacacgcgctgactttcgtgcagattgccgacgagcccaagcggcgcgttggcttcatgatctgaagcccggtcttcatacactgaacgctcttccgcagctcgcagaagagcgttcaggtgtgtcaggctgagagttgacgctgttaggccttcagatgaatctgctccatacgttcaccgtgacgcttggtgacgaatgcgacgatcgcatcaacagtgtcggggtcttggccaagggcggggtgcgtaaacagtgttgcgcgcactagagcgaatgcttcacctgcgacgcgtcgcgcccacaaggacaggcgggcgccgagttgctcgtctgcggagatcagcggagcgatattgtcacgaacccactccccctgcgtgacatcccagtttccggcttcttcgatgaagagttcgtgccggctagcgatttcgccgagcaggtcagagatgattcccatggtcacgtaggttttcactgagcgttcgaaccatgttgtcgggcgtgtgcgagcatccagatcgtcgtagagaccgttgtactgcccagctgctgcaggcaggtcgatgtcacggttcgtacaccaggcttcaagctgggtgaagagttcaaaagcccgtgcggacatacgcgcatgctcgatatgggcttcgatggtcggcgcttgatcgccgtcctttgacagtcgcgtcattgcggcgagtgccgtgaacgcgagcagaccgattacttcaatatctgcggcttcaaccgcaccgttttcagtagccatgttctcagcctagcctcgtctgcactcccccgatatctcaatcgcgaagacggatgtccacgcaacctgcgcactttccccaccccgtgcgcatactgaacgtgcgcacccgggcggtcggggtggcctcgtgaatgtagtgtgaccatatcctcgggctgaaaactgagatgccaacgtacaatgggagtgaccatagctgaccggtcgctttgaataccacgtttttgcgcgcgcttggcgcctcgataatgcgcgatcggctgctacccccaccccggcgtttccgggagagaaggcagatcgtgacttccacgaatacccagggcaccgatgtgcccgttgaaaaaaatgacgaggccaccgcattcactcaagtagctgacgtgcaggaggcaagcaagccgaaaaccgttgaatactccgcaggcgttgtccgcctaggcactattgttccggtcgctgttgaacccgaagcaacgccggacgttgtggacacgggcgacgaggatcttgagcacaagtccttcgctgattttggcgtgaccgacccgatcgttgacgcgctggaagataagggaatcacgcacccgttccccattcaggcgctgacgcttccgccggctcttgatcgccacgacattattggtcaggcgaagacgggtacgggcaagacgctcggtttcggtattccggttctggaagacgttattgctcctgatgaagagggctatgacgaattgctgaacccgaacatgcctcaggctctgatcatcctgccgacacgcgagctgacgaagcaggtggccactgacctgcgcgaggctgccgcctacctgtcgacacgcatcgtggaaatttacggtggtgtcgcgttcgaacctcagatcgaggcgttgaaaaagggcgcggacattgttgtgggcacgcccggtcgtctgattgacctgctccgaaagggtgttctgcatctgaacggtgccgagacggtcgttttggatgaggccgacgagatgctcgacctgggcttcctgcccgacgttgagacgttgcttgcacgcactcccgcgaaccgccacacgatgctgttctcggcaaccatgcccggcccggttgtggctttggctcgtaagttcatggaacagccgacgcacattcgcgctcaagatcccgaggatcagaaccagaccgtgaactccgtcaagcaggtgatttaccgtgttcacgcaatggataaggtcgaggttgtcgcgcgaatcctccagtctgagggccgtggccgttcgatcattttctgtcgcacgaagcgcactgctgcccgccttggcgaggatctgacggagcgtggtttcgcagttggttcgttgcacggtgacttgggtcagggtgctcgtgagcaggctctgcgtgctttccgtaatggcaaggtggacgtgctcgttgccaccgacgttgctgcacgaggcatcgacgttgacgacgtcacccacgtcattaactaccagtgccccgaagacgagaagatttatatccaccgtattggccgtaccggtcgcgcaggacattcgggcgtcgcggtcacgttcgtggactgggatgatacgccacgttggtcattgatttcgaaggcgttgggcttgggggttccagaaccgctggagacctaccacacctctgaccacctgttcaccgaccttgatattgcaccggaaaccacgggtcgcctgccacgcgcccagcgtaagcttgcgggcttgaacgccgaggtcctagaggacttgggtggttcttcaccgcgtggcgttcacggttcacgaggccgcttaggccgttcgggtgctcgctccggttcggggcgcggaggtagcaagggtggatccggttcgaggggtcgctcgcactcaccggaacgtaatcgccgttcaaaggacggggatcgcgagttccatgcgggccagcagggtcgttctgaccgtggaacgaaggggcgcggtcgtggcaaccacacgcaggctccgcgcactgagggctcagcgccgaaggctcggcgtcagcgtgtgcgccgtcgtaaggacaagggtggcagcgccgagtaaggcattcgttcgtgcctctcatctttcttgagcattgggtttagtcaaacgctcccattgagaagcttgcgcgtgtatagtgacacttaactgattcccagtaagcgccgactcgttagcggcgttgaatgctccaccgggtcactctttcgagtggcccggtctttttgttcccctgttttcgctgataagagggctaatgccgggctaatgcccgaataagacgcgaatgcaatttcatttctacatggtctatgtcactatgaaaggcatgaatgacaaggacgcttctcagcaacttcgttaccgtgttggcattgacgtaggcacacactccattggtttttgtgcggttgaggtcgatgaatcgggtatgccgattcagcttttgaactcaatggtgcataagcacgattcaggtattgatcctggtggaaatgacactgcgacgactcgcttggcagaagctggggtagcaagacgaacgcgtcgactcatccgtcgtcgcaagaagcgcctacaagagcttgatgccttcattgaagaatgtggctggccactggtcgatctcgcaactattactgacgcacgttctccgtggcgaattcgtgcacatcttgcaacggagcacattgacgacgaagcagaacaaggcaagctactgtcgattgcgctccgccatatggcacgccatcgtggatggcgtagcccctatgctcgtatttcgtctcttcacattcaggcggatccttccgagcagttgaaggctcttgctcaacgggtttctgaaaagacaggtatttccttaacagctgatcagactcctgcgcagctcatctctgtctatcttgatgtgtttgaaacaggtaagttgcgtggccctgagggaatcttgggtggcaagctcatgcagtctgataacgcgaatgagcttcggcgtattgctaccgttcaggggcttgataatgatctcctgaagaagatcattggctttgttttcgcggctgaatcgccgaaggggagcgcagctaagcgtgtcggtaaagatgttttaccgggagcgcacgggcttcgtgcagagaaagctcatcctgcgttccagcagttccgtatcgtcagcatcgtccaaaatctacgtatcaaagaagggacagggcttcgtgcactaacctccgaagagacggagattgttgttgatttcctgaatcaggcaggtctcactgaggctccgacatgggaagaggtcgccgataatcttgagattccgcgctcacatctgaaaggaacagccaccgaggggttcgatgggattgctcccagtacacggccgccttttgatgtcacatcgcagaagattctcaatggaaagctgaagaaactctccgcatggtggaaagatgctgattacgatcaccgctgtgccatggtgaacgctctctccaacgtgggttctgatgacgaggggtcgcttgctgatgacgacgtgcgcgagttcctgtctgatttcactgatgaagagctagaggctctagataaagttgaattgcctggtggtcgtgcagcctactctgttgattcgttggaaaaactgaccaatacgatgctgtccgaagggtgcgatctgcactctgctcgtaagattgccttcggggtggatgattcgtggactcccccagccgagccgattggacagcctgttggaaaccctgccgttgatcgtgttttaaagcaggttgcgcgttggattagtgctgcaacaaaccagtggggaactccagaatcggtcaacattgagcatgtccgagatgctctcggtagcgaaaaggcttcacgcgaataccagcgttctttgcaaacgcgccgtattcgcaacgagaaactcttcgctgaaatgcgtgagcgtctcgatattggtggaaagcctcgtaggtcagagctgacgcgttatttggctctacaacgacagaattgtcaatgcctgtattgtggcatgccgattacgtataccgatgctgagatggatcatattgttcctagaaaaggtgctgcatcaacaaacactcgtgaaaactttgctgctgtttgccgagcgtgcaatcaccagaaatcgaatcttccctttgctgtctgggctgaaaagactgaacgaccaggagtcagcgttaaggaagcgtacaagcgcgtcagtgatatgaggattgaacccggcatgaatggtcgtcagatgaacgagttcaggaaggcgattcgtctgcgtctgacaacgaagcatgctgatgcggagatcgatggtcgatcgctggaatctgtcgcttggatggcgaacgaactgcgtcatcgcattgaggggttctaccgttcagcagaaaacgacgtgacggttcgtgtgttccgtggtgctgtgactgcagagggacgtcgcgcatctgggtttgaaagccgagttaatctgatcggcggaaagggtaaaacgcgtttggaccggcgccatcatgcgatggatgcattaacgattgcgttgatggagcccgggattgcccagactattgcactacgcatgaatatgcgcgaatcccagcgggtactaggtgaacaggaaacctggaagtcctttacaggcggcagtgataccgcacggaaacgttgggaacactggtgcgaggaaatgcttcgtgcctctgagttgttcaatgttttcttggcagaagatcgtattccgatctgtcagaacaaacgtcttcgccttggctctagtgcggtgcacaaggcgattgtgcagccttttgaagcatccgataagcgtattgtcagcgatgcgatgccagtggagctgattgaccgcgcctcgactcctgctttgtggacagcactgacacgagatccggacttcgatccaaaggaaggtttgccagcgaatccttcgcgcactattcgtcttcacgacaagcgtttgggcccgaacgaaaccgtggagtttttcccgactgcagccgcttgtttggctattcgtggaggctattgcgagatcggagctgggatccatcacgctcgcatcttccgcatctcgggtaagaagacaacgtatgcgatgttgcgtgtctatcagtgcgatctggtgcgcttccagaaagagaatctattgactgttgaacttcctgcaaacacgatcagcgtacgcacggcagttccgaagttgagggaggccctcgctcatggaacagctgagcagattggctggctagttgtcggggacgagttgaagattgatctgtctggattcacgacaggccagatcgaaaccttcaatgaaacctacccgcaggcaacgaggtgggaggttactgggttcccaactaagactcaactccgtttgaaaccactgctcattgcaagcgaaggcttagctgacgatgttccagatgacatcgttaaaatcgtaaaagggccaggctggtggcctgctattgataaacttctgaagattgggaatgttgttctgtatcgacgtgatacgcatggaaaaccacgagtagtttcacaccgttcccttcccctttcgagtaagttgcagtagggatgagcagccagtggcgggtactcgacttcacctcttttgaagggaagatccactcagacgacggcgccattgttgtcgttaattctgatggcgtgagccaacgagtatccgttgccgatgttgccgttgttctcatcggaatgaaggtgtcgttttctgcagctgtactccatcggttaacggacaaagatatcgctgtgttgttctgcgactggcgcggagttccagaatctggagccttttcatggtcagagcacactcgtgttggagcacgccacaaagcacagctcgaattgagtctgcctcgtaggaaaaatgcttggggacgtattgttcgcgcaaagattcaagggcaggcagcagttctgcgaaatctcaataggcctggagcgcaagaattagaacatatcgctggccaagttcgttcgggtgaccctagcaatcttgaagggcaagcagcgcgcatctattggagcaagttttcagacactctcggaaaacgaacaccaggaatcggcgcactatttggccccaattcctgcctcgattatggatatacgatcctacggggccatggaatccgagcggttcttgccgctggtcttggacctgcgaatggggttttccatcgagggcgttcaaatatgttcaaccttgttgatgatctgattgaaccatttcgaccctgtattgatgagattgcgatgttccttccggcagatgctactccttcggatcgaagtgtgaagaaacgcttggttgctgctgcaatgcagacgttcaatgatgctggaagtgttccacgtgtcttattagatctcgcccaacagtatgggcgttatgtcgaaggagatattgaaaaactcccggttccttcgtggcaggggccatcagcgttgaatacggatctcaagaatgcctgattctccgatgtggtgtgttgcgatgtttgatttgcctgttttaacggctccgcagcgtcgtgaggcaacacgttttcgaaaattcttgcttgatcgcggtttttcgatggttcagttcagtgtgtacgtaaagtattggccgactggcggaatcgatatgacgacgatcaaagcgattaagggatccttgccaacgggagggaaggttcgggtgcttgccgtgaccgatcgccagtggtcgtctgcttactgttttgagaacgcacgtgagcaagtagcagatgaggcgccagaacaattgatgattttctgacacctcaaaggcacttttccgcgctattctgcggaaaaccagagcctctaaagaatatcaagagttctggtaactgattcccagcacagcccatcactccccaccatcacctgaaagaatatcaagagttctggtaactgattcccagccgttggtgttgagcgtgaacctgcttgaaaagaatatcaagagttctggtaactgattcccagcgggaacacggtgccagaccgcgaaaagtaaagaatatcaagagttctggcaaccgattccccaaataataatttcagttcagaaaaacaacatcagagctggaagcacacttaaatgcaatacgtcttgggggcagggcgcatttgcgccctacccccaaggtctgtgcgagacctcgtcgattatgacgaagcccgacagtcgaaaaccgaaactaacgcaccgacgtgtggcactcaatcgaacgcacaccccaccatgcgacaccgattgccagcaacaccgcccctacgggcgcaccaatgccgacaaactgcggatccgtatcagctaacagcgcgttcaccaggtccgtgacccaaaagccgaaacgtaactcgcccgtgttgacatccatcatcagcgggaagaacgccatcgcaacaaaggacaccacctgattcgccagatagaggatcacgaaacccactatcgcagctccaaagccatgcttctgccaacgctcgcgagcactcaagctcattccagcagcgacctcaagaacaatcgtcaccaactgcactacaacagccaccacagcgaaccagacaatccagctcggaagatcccaaataacagcggtgcgatgccagaactcctgcacgctcagctccgccttgtgagccttcagtagagccagcacaccccagttcaccagggttagcacgatcgccactaacgcatacaccaaggcaaccagcactttcgaccagaaaagatcacggccacgaaccggcagcaaatgcgtaaagtacgccatctgaccatgcatactcttccaatactcctgagccagaacaagtagaacagcaaccggcatcatcggagccacaagcagagcaaagctactagaaaagcctgaaaacacggggaaatcaacagcgactgccacgaaggcaacaaggcacatgacctgcaggatgcctaacgtttgtgcaacccgctttgcgttctcacgcaattcatacccgaacaacgtaccaaacatcagcggtactccttcttgaaaataccctccagcgacatgccatggtcggctcgcagatcgtccacattcgcgtgaacaagcaccgtacccgctcgcatcatgatgacgtcatccagaatctgctccacgtcagcaatcaaatgagtggaaatcaccatcgccgaatctgggttaaagtcgcgcagaatcccctgcatgatcgtgtcacgcaccgctggatccacacccgacagaggctcgtccaacaggtacagctcagcactgcgtgccatcagcagagcaatctgcagtttctcccccatgcccttcgacatggacttcagctgctgatccgcttgcaatccgaagtagtcgattccttcacgcgccttctcagccgagaaatccgaatagaaacgcgagtacacgtcaatcgctttattcgcatcccacatcggatccaagaaatccgaagcgggaaggaatgcgacgtgtgccttcgtggtggctcctggcttctcaccttcgatcaggacagtcccgtcccaatcggaaagaacgcccgccatgatcttcagtagcgtcgttttaccacaaccgttttcgccgaccaagccggtaattgtgcccggcttgagctcaaaattcacaccttgcagggcagtcgcgccacccgcataggttttcgtcaggttttccacctgaacaactgcatgtgttgatgtcattgcgcatcaccttcgcgtattgtgcgttcgatgtcggtccactgttcagcaagcaactcctgcgcccgatcgagactcagcccgagttgcgtgacagtagtgatgtgatcccgagttgcatcgagggcgagctctgccctggtcacatcgatcacgtgttggtccgcggtgacgaaacgcccctgcgcacgttcagcttcggtcagtccctgacgatctaattcgccgagggcgcgctggatcgtgttcggattaactcccgcttgtagtgcgagttcgcggacactaggaatcttcgaggacggcggccaggttccggacacgatattgatccgaaacgtttcaactagctggacccaaattggtcgagaatcgtcgatactcacaccccctccttcctgtatcactgtattaatacagtaatactatgacagtccgcgaggcactgtgtcaagcgcttaatacagacgcggagggtgggtgccctactcgttcggtatacgaggcaacgaaatcaggctctcagcagagataacagcgcctcacacgaccaaacccgacagcaggagccacgtacacgaccgacaacgtcatacaaggcaacgaaaccgggaaccactgcaaacagcgtgaaaatatcgcttcacacggtcaaacctgccccacaaacaccccacgcagaggcacacaccccagcaggcacaccccagcaggcaccccgtccccaacctgaccacacacagaaaactgcgggggcaagccctcttggacctgcccccgcagccaaagccagcgagaagctagcagaaactagcgcgtcactagatcagtcgatcggcgttgcgtcgagcttccagacctcgttcgcatagtcggtgatcgtacggtcagacgagaagcgaccggactgagcgatgttgacccacaccttgcgcgcccaagcgcgcgcatcgcggtagtcggtggccatgcgatccttcgcgtcacggtaggccgcgaagtcgccgaggacgtagtagacgtcggcgggctcgtagccggcttcgagaagcgaccagcgcagatcgtggaaccaaccggaaccgcagtcatccaaggtaccgtcggtcagagcgtcgaggactcgcttgaggccggggacgttctcgtagtgccagcgcggatcgtagttctgacgtagctcgggaagttcgtcttcggtggcgccgaagatgtaggcgttctcatcaccgacggcgtcaagaatctcaacgtttgcaccatcgagagtgccgagggtcagggcgccgttcatcatgaacttcatgttcgacgtgcccgacgcttccttacccgcagtagagatctgctcggagatgtcggctgccgggataatgtgctcagcaggagacacattgtagttatggatgaagacgaccttgatgcgaccgttgatgtcttcgtcgttgttgaccaggtcagcgatcgtgttgatcagcttgataacaccctttgcgcggatgtagccaggggctgcttttgcgccgaagacaaagacgcgcttcgggacgtccagcgtcggatcatccttgatgcggaagtacaggtcaaggatgtacagagcattcaacagctggcgcttgtattcatgcaggcgcttgatctgaacatcgaagatggcgtcgggatcaatgtcaacgccttcacgttccttgacccacgccgcgaagtcaaccttgttggcgtgtttgatcgaggtgagttcgtccagaacatcctcggaagcggagtcaacgtagcgagacaggacggagaggtccgtgacccattcgtcagagccggtgacacgatcgagaagagatgcgaggcgagggttgcactgcttcagccaacgacgcggagtgacaccgttcgtcttgttgttgaagcgctcgggccagatgtcgtgccattccttgagggtttcgcgcttgatgatctcggtgtgcagggccgcaacaccgttgatcgagtaggcggcgtagcaggcgatccatgccatgcggaccgtgttgccggaaaccggtgccatgtagtcgatggtcgactgttccagaccacgttctgccatctcgatgcggaagcgacggtcgatttcgcggacgatttcggcgatgcgcgggaacagacggtcgaagatcgtcatttcccaggtttcgagggcttcggccagaaccgtatggttcgtgtacgcgaaggtcttggcgacgattgcccaggcgtcttcccagccgagaccgtgctcatccatgagcaagcgcatgagttccggaatagccagaaccgggtgggtgtcgttcaactggatcgcgttgtacttcgcgaagtcggtcaaatccttgccgtgatgttcgacgtagttgtcgacgatggcctgcagggatgcggagcagaagaagtactgctggcgaacgcgcaggaccttgccttcaaacgtggtgtcgtttgggtagaggacgcgcgagatgtcgttggtgcgttcacggtcgacgatagcgtcggtgaagcgctgcgagttgaaggcgtcgtagtcgaattcctcgacaggctctgcacgccagaggcgcagagtgttgacattctttgtgccgtagccggtgatcggcatgtcgtagggtactgcgcggacggtcaggtcagcgtaggaaacgatgcgctgggcttcttcacgacggataacgaaggggtagccctcttccatccaggggtccggatgttcggtctggaatccgttgtcgaacaactgcttgaacaggccgtagcggtagaggatgccgtagccggcgaccggcagatcgagcgtggcgcaggaatcgaggaagcaagccgccagacggccgaggccaccgttaccgagggccgcgtccggttcttcttcgagaacaacagagagatcgtcgccgtgttcggcgagtgcggcgcgcgcttcgtcaacaaggcccaggttggacaggttgttcagcagagcgcgccccatgaggaactctgcggagaagtaatgctcttgacgacccttggcgtaggtttcggtcgttgtatcccacgagtcggcaatctgatcaacgactgcggctgacaggccctgccagagctccatcttcgtggcttttgcgatcggacggccagagaccgcgcggacctgcgttgccagcgtctggctgaggttctgagtcataggtactcccagtgttcaatgttgtcgtggctcgtttgctactttggcaaagacaccctggctacgagattaccgactatttctgggcaatttcgccaaaagtggtcgtttgaaaggtgagccacagtgggagttttcgccccacggggactagtgtagcgcgttttacggaaacgtttccgttaccggcgggaatcaaccgagtttcacccgaacagatcccaaaggaacacaccccttattcgaggaaaaagacccttaaactgccgcttcagcaatgaaatcgaagatgccacccatgaccagctgagtcgcgatagcggccaagagaaggcccatgatcttcgtcaggagcatgatgccaccggtgccaagcaaacgcgacaggatcagcgagaagtacatggcgaaccacataatcaggtgagcaacaacgaccgccgacacgacggcgatccatcccgcaagagaagcgtgagcctgcgcgacggacaccatgacggcaacaatcgcgccggggcctgccagaagtggcgtgcccagcggaaccagggcgacgttgacgttcgggtcgccagtatcgggctcatcgctgtctttgcccatcagcagttccattgcgacaaggaacagcaagacaccgccggaaagcttcagtgcctccatcgaaatttgtaggagacgaagaacctgctggccaagaacggcgaacgccaagatgatgcagaaggaaataatcgttgcctggctggcggctttcttttgcgcctgtggcttcaggcgaccggttaaaccgaggaagatggggatcgcgccgaagggatcgaggatgacgatcagggtcgtaaacgtcgtcgcaaaaagtgtgacatcaaaaaacgacgatgcgttcacgggcgaattacctccattgttcctgcgtcttcaacctgagaaattacttcaggatccgttagattctcacccaattggttcggttttcccaaaccgtggtagtcagatgagccgaagatcgcaagccccagatcgtcggccaaccgttggacggcctcgcggtcttcagcctgatggtcgcggtgatcgcgttcgattccgaagagcccggcatccttcatgtcgtagatgacttcgtcggagaacaaacgctggcgcgcacgcgctttcgggtgcgccagaacaggcactcccccagccttcaaaacaagctctgtcgcttcgacaggatccggtgcccagtggtgaacgaagtaaggaccggacggatgcaggatcttttcaaaagcctgcgccctgttttcaaaaacgccgactgcgaccagagcgtcggcgatgtgagggcgaccgattggcccaccatcgggcgcaaattcgaggaccgtatcccacgtaatcgggtagtcttccgcaaggttttcaaccatccgctgggcgcgagttttgcgagaatttcgggctttctcgaagcaatcaagcagtccggtgttcgtggggtccggcagatatgccagcaggtgcaccgtaattcccgaggccgcgcatgacatttcaacgcctcggattaacgcgacgtgcgattctttgacgctcgcctcaccttcatcccacccggcaaacgtgtcatggtcggtcaatccgatcatgtcaagaccagcatcgcgagccttgaaaagcagttcagttggcgtatcggtgccatctgaatacgcggtgtgagtgtgggaatcaattcggagcataaaactgagagtatcgaccttcgcccgaaagtgccatcatggagactatgaacgacacgacgaatactcagtcagcgcaagaaaacaaggcggaagaagcgcccgcatcgatggctcagcgaggggaaggacgaagccgtcgcccctcgtcggacgcattccgcgcgttcatgggctccggttgggggcctcgtatccagacggaaatgaagcgcagtggagcagccgactatctgcccgagcgcgccgaagcagccggcgagcctttcaagggcgagcgcttggtaatccccgcgggcacatacaaggtacgcagtaacgactgcgattaccgcttccgcgcatactccgctttcgcacacctttcgggcctcggtggcgagcgcgaacctgattctgtcctcgttcttgaaccgcgcgaagacggcccacacgagccggttctgtacttccgcccgcgcgcttcacgttcttcccaggagttctactccgacgcaacctacggcgagttctgggtgggcgcccgcccctctttggaagaggttagcgccgagaccggactccgctgcgagcacatcgatacgctccgcgacgctctgtcgaaggacgctgggctgatcaacttgcgcatcgtgcgcggtgtggacgcgaacgttgaagcaatggtgaacgaggttcgtactcaggctggattgaaggccggagacgacgcccgcgaagcagacgagaagcttgaagagcgcctgtcggaaatccgcttgcgcaaggaccccttcgaaatcgctgaacttcagcgcgcggtcgatgtcacctatcagggcttcaccgatatcttgaaggctctcccccgcgccgtcggtcaccaccgtggcgagcgcgtcatcgagggtgcttttggcgcggttgctcgcgaagagggcaacggccttggctacgacacgatcgcagcatcgggcaatcacgcgaacaccctgcactggatcgacaacgatggtccggtgaacgagggcgatctggttctggttgacgctggtgttgaggtcgattccctttacaccgccgacatcacccgcacactgccggtcaacggaaagttcaccgaggtccaggcacgtgtctaccaggctgttttggatgcgtgcgaggctgcgcttgcgcgagcaaacgaacctggcacccgcttcaaggacgttcatgacgcggcaatgcaggtcattgccactcgcctgcgcgagtggggtctacttccggtcaccgttgaagaatccctgtccgccgaaggtcagcaacatcgtcgttggatgcctcacggcaccagccatcacctgggtctggacgttcacgactgcgctcaggcgcgtcgcgagatgtaccaggaggcactgctcgaaccgggcatggctttcaccattgaacccggcctatacttccgtgccgatgacgaactgattccggaagaattccgtggcatcggcgtgcgcatcgaagatgatgtgatcgtgaacgaagacggttcggtcacgcgaatctccgagaatatcccgcgcactattgaagacgtcgaggcatggatcgcggcggcgcagcaaagctgagcatcatcagtttcgactgaccgttttcaactcccgctggtggggagcaggcagcgcctgctccccaccagccttttcatatcagcgtcatatcaactcgttcttccagcgcgaacggggaaaatattttagtgcaacacaatccttatgctaatttaggtgcgccttacctatgacataaaaggagaacctaatgacgcattcgtctcgaggagtgcaaaaacgacgcatttctcttcgcacgattgttacgacgttgtgtgtttccatcctctgcagcgtggcaggaa

SEQ ID NO: 4350 - DNA, 23342 bp, synthetic construct
  source 1..23342: mol_type = other DNA
  misc_feature 1..23342: note = Synthetic
aaggcattccccgacggcttgccgaccggcctcgagtaccggatcctccaggcgctcgcgcggatggcgcggcggctggctggcgcgctgcgcctcgccccgtcgggcttcgtgatggaacccgacgcggagtccgcggtcaacctcaccgtgtactcgcccaggtggatccccccggaggatctgctcggcgccctgcgcgacaagggcggcttcacgggactggccgatgcccgcgacctctctcccgccgggtcctccccgcagatggagcacgctgaggcgcagaagatcgcccagctccgcgagaacctcgggcccatgcgcgaggacatcgcggcgcggatcgagcgggagcgccaggagctcgcagccaccggggagtcccagaaggttgtcgagggctatgccctcgtgggccctatcggggggcgttccgaagtgatgatcgaggtgcacgcggtcccctcgccgccccgcgtcctgcgctgggagccgtggaccgcctcgacgatcatcgagtaccaggtgcgatggctgcccggggggtcgcttgacgcgcccgacgccaccttgtcgcgctcggcgcgccgcgagcgcctccgctcagcggcggacatcgagagcatcgcgggtctcatcgccacgatggcgggcggcaacgtcatcgatgaggacgggttcttggtgggcctggaggagatccaagtggctgacgaccaggagccgcaggactgaggggccggtcccccccctggcccggggggcgccggtcgccgtcatcaaggcgtcgaacgtcatcatcggcgtcgacgaccgacccgcccctgatccggcccaggatcccgagcggactcccggcagggcgcgtccagcgcccgcacctgctctgatcagtcccgttccggcgcccgcccgtcctggccccggcgcaccgcctccagcagcatgacggccacgtcgcgcacctggggcagtccagtgcccgaggccgcctccccggccgacccgcccgggacgagtcccgcgctggacccggaggccgaccccagcatctgcgagcagaacgggcaggccgtcgccaccacgtcggcgcccgtctgcgcggcctccgcgatccgggcgtcggcgatgcggatgccccgtgtctcctcgaaccacgcgtgcgcgcccccggctccgcagcacatcgcacggtccctgttgcgcggcatctcgaccagttccacgcccggcagggccgccacaagctcgcggggcggcgagtagacgcggttgtggcgccccaggaagcaagcgtcgtggtaggtgacgcgcaggggggcgccgctgtccggagcggccccggcgccgtggtcgcctcccaccccgtcgggggcgctccgggcggtggcccctgttcccgtggcccccgcctcgtcggcgccgttggagggggcgccagtcggtccgctggcgggtacgggtgtgagcagcccctcgcgcacgagccggttgagcaactgcgtgtggtggatgacctcgaagtggccgccgagctgagggtactccccggctatcgtgttgaagcagtgggcgcaggagacgacgatcctctgcggcgaggcctcggtgagggtctcaatggcctgggcggccagcatctggaagaggacctcgttcccggcgcgccgcgcggggtctcccgtgcacgactcccccgagcccaggacagcgaaggacacgcctgcggtgtggagcagttccgcgatggcggcggtcgtcgccttcgccttgtcgtcgtaggcgcccgcgcagcccacccagaacaggtagtcgacgcccgaggcgtcctccacgtcctcgcccacgacggggacctcgaagtcgaggcccttggcccagtccatgcgcttgcgggcgctctggttgtaggggttcgccttggactccatgccccggaaggcgcgcgccagttcgcgggggaaggcggactccatgaggacctggtggcggcgcaggtccaggatgtggtcgatgtgctcgatgtcaacggggcactgatccacgcacgcgccgcaattcgtgcagtcccacaggacctcctcggagacgacgccgggcaccagggggcccgccacgtcgaggaccccgccggggccggtggcgcccgacgccgtcagggcggtgaccaggtcgaaggagtgcggggagggggcgacgcccttgtcgagcagaacggcgtcctcggcgtctgccccagtcgccccggttccggttccgctgtccccatcgggtcgcgcgtcgccgtcggagcgggtgatgatctccttggcggaggcggactccatgtggtcgcgcaggcccatgatgaggagcttgggggacaggggcttctgggtgttccacgcggggcacagctcctggcaccgcccgcattcggtgcaggcgtagaggtcgaggcgcgctttccacgagaagtcctcgaccgtgcccacgcccagggtggcgtcctcggggagctcgtcgaagtcgtcgggggaggtggcgggctttccgtcaatgagcatgtggtcggcgggccccagggatttcgtgccgtcggggttgcggcgggcatacaggttcagcaccgccacgaagcggtgccaggcgacgcccatgccggtttgcactccgacgaccatcagccacatcatcgacgtgatgaccttgacggctgagacgacgacgaccgtgttcgccagcgccggggccgaggacgaggcagccgatgcgaagagggagcccagccacgcggtgagtgggaagtggagggcgctcgtgtggccctccaggccgggtgaggcgccgaggagtgcgaactcgagggcgcgcagggcgacgacgcacgcgcacacgatgaggacgacccattcgacgaagagggcctgccagcgcgtggatcccaggaagcgcgaggccagtccgccgggggaggagtcccgcggatggggtcttgtgaggcgcgagggcaccgcggggtcctcaacgcccatcgcctccgccgcgacggaggccgcccggtcggggtcgtcgttggacagggcggcctcggcgggcgagcccctgccggcggtgcggcgcacggccatgaggatgacgatcccggccagccccgcccacgcgaaggcctccgtcacccattcccaggggatgaagtgccccaggaacggcagcgcccacgtctggtcgcgcagttgcgcgtagccggagaccagggtgaggaacagcagggggaaggacatcatgaccagccagtgagcggctttgatccacggacgccccttgaactcgcggtgggtcagcgcggtggtgacaaccccccagaggcgccggccgacggggcgcaggcgcccggggtcgggcgtgcccgaggccacggtgcgccacatgtgcgccaggccccgcgcgaatgccacgagcgcgatcgccgtgacgagcagcacgaacgcccacataatggcgctgagcgtcggatcggccacaggggttcctccttgcacggccgcttaagtcggtagccgtcccattgtcgcactatcggcttccccggccccgacgagcgcgctgggacgggcgggcgcgtggaggcggcgcaccgccgcagggccgcggattcgtcagtggcctcggcagcggggcgccgtccaggggcggtgctggcgcgccgccgctgtcccgcactccggggtgccgcctggccgcgcgccgacgcagccactcaccctgccctccgccgacatcagccgcgcagctccggccgcgcgctggcgcgcccgcatggaggaggggtgaatctcacgcggacagttaccatgtgaccggggaaactgtgcgacagttggggtgtgcttccagtctcgcagcagattgaccagtcacttcctggccgcggggtcctcgaggacgaccgcccccacgaccagtgcggcgttttcggggtgtgggccccgggcgaggacgtctcccgtctcacgtacttctccttgtacgcgctgcaacaccgcggccagcagtccgcggggatcgccgcctccgacgggtcgaagatcctcgtttacaaggaccagggcctggtgaaccaggtgttctccgagcagtccctacagggcctgagggggcacatcgcggtcgggcacgtgcgctacgcgacgacgggcgcggacgtgtgggagaacgcccagcccacgctcggccccactcccgacggcaccgtcgccctcgcccacaacgggaacctcacgaacacggacgaactgctcgccctcgccgcctccatcgcgcgggagggggaggacttccagcacggggccacgacggacacgtcgctggtgaccgcgctgctcggcatggcggaggggatgcccgggccccggccgttcgtcgctgccccctccgtcctcggccccggcggcggggcgggggccgcggggggcgcccgccgcactgcgcccggccgcggtgcccccgcgcagtccgctccttccgcaccgccagtggacgaggaggacgcctgcgcgcccctggtgcccgccgccctcaaagtcctaccgcgcctcaagggcgcgttctcgctggtgttcatggacgaggacacgctgtacgcggcgcgcgacccccacggctaccggcccctggtgctgggtcgcctcgactccgggtgggttgtggcgtccgagaccgccgccctcgacctgtgcggcgcggccctcgtgcgcgaggtcgagccaggggagctcgtcgcgatcggcgcctcgggcgtccactcgtggcgcttcgccgtgagccgcgccagcacctgcgtcttcgagtacgtgtacctggcccgcccggacacgacgatcgggggccggcggatcgtggccgcgcgccacgagatgggggccgccctggcccgggagaaccccgtcgacgcggacctggtgatgcccacgcccgactcgggcacgcccgcggccatcggctacgcgcaggagtcgggcatccccttcgcccagggcctcgtgaagaacgcctacgtgggcaggaccttcatcgagcccacccagtccctgcgccagctcggcatccgcctcaaactcaaccccctgcgcgaggtcatcgagggcaggcgcctggtcgtcatcgacgactccatcgtgcgtggcaacacgcagcgcgcgctggtggcgatgctccgcgaggcgggggccgccgaggtccacgtgcgcatctccagccccccggtcgcgtggccgtgcttcttcggcatcgatttcccgacccgtgaggaattgatcgcctcgtcgatgagcgtcgaccgggtgcgcgagtccatcggcgcggactccttggcctacttgtccctggagggaatggtgtcctccacgggccagggcacctccttgtgcctgggatgcttcacgggggactaccccgaaccgatccctaggggcgccccggtccccggagcacccggcactgcctcctgctaggcgcgcccaggctcccggccgggcgaacgtcctcagacccgataacccagacacggcgtcgtcgagcgccccaccgcgaaaggcaccatccatgaccgacaacccccttgactacgccaccgccggagtggacaccgccgcaggagaccgcgctgtcgagctcatgaaggccgccgtcgcgcgcacccacgacgccaccgtggtcggtgcgaccggtggcttcgccggaatggtggacgcgtcggccctgctgggcatgagacggcccctgctggcgacttcgacggacggggtgggcaccaagatcgcgatcgcacgggcgatggacgcgcacggcacgatcggccaggacctggtcggcatggtcgtcgatgacatcgtggtgatcggggcgcgccctctgctcatgacggactacatcgcgtgcggccgtgtcgtccccgagcgcatcgcctccatcgtggagggcatcgcgcgggcctgcgaggccacgggcacgcccctggtcggcggcgagaccgccgagcaccccggcgtcatggagcccgatgactacgacatcgcgggggccgcgacgggcgtcgtcgatgcggatcgtgttctggggccccagagggtcgtcgactccgacgtggtggtggcgatggcctcgtcgggactgcactccaacggctactccctggtccgctcggtcgtggcgcgcacgggcgcgccgctggacgcgcacgtcagtgagttcgggcgcaccctgggcgaggagctcctggagccgacgcgcctgtacacacgcctgtgcctggacttggtcgagcgcttcggcgccgggggcggcgacgggcggggcgtgcacgccctgtcccacgtgacgggcggtggcctggcggcgaacctgtcgcgcgtgctgccctccggggcggtggcgtcggtggaccgcggctcgtggcgggtgcccgccgtgttcgactgggtgcgcaggggcggctccgtgtcgtgggaggccatggaggattccctgaacctcggggtcggcatggtcgccgtggtcggcgaggcggacgcctcggcggtggtcggcgccgtgcgccaggcgggcgtgggcgcgtgggtgctgggggaggtgcgctccacggcggcagaggccggggcaggggagcgcgtggtccgcggcaccaagggcgtcaacgcgggttccgtgcgcctgcacggctcctaccgggtggggtgagcgcccgggcgccctacttgtccgagggcttgcccgtccagaacgactcgtccaactgcgcggggtctatgtcgtcgggctcgtccgcgaccgtggcgaagtccgcgtacttggcgtagaggtcgtcctcttcgtcgggctcgtcgacgtcggtgtccgcgccgtcgctgccctgctcctcgtacatgtcctctggcgccagctcacgctgaagcgcgtccaggtcggtgtcggggctgaagtacttcagcttccgagcgactttcatctgctttgccttttgacggccgcgccccatggcgtcgaccccctccgcgtagttcgggtccgcatggcgcggttccctgggtgttcacaatgtttcgtggcttcatcataaccaaagaggcgcaacgaattgaacttgaatccgattttgcgcgcgtggcggaacgcgcccggggcgcccaccccgagagccgtcgggccaggtgggggcgtgttggagcggcgccccgcctggggcgcgtcagcgccgtctgcgggaccaggcgaacgcgaggaggccgatggccaccagggttgcgcccacggcgataccgatccgtttgatggcctcggagtcgccctcgcgggcggcggctgcggtgtcgcggacgctctttcgggcgcacgcggcggcctctgccgcggcggccttcgtgttcgcgacgatggcagcgggctgcagctgctcgtagaggtcgtcgacggaggccgccagggcggcgcgcgtggcctccaggtcggctcggatctgcgcttcggtgcggggcgcggctgcgggttccgtgggagtgctcacttggtaagtccgttcttcacaatgtggacggcctcggtgatgccggcctttggatcgggtttgctctcctgggccttgcgcagtgcccggaagccgaggagggcgaggaccgctgcgacgacggccaagagcccgacgatgatgagggaggcggcccataccggcaggaccatggccagtgccgcttcgatggtgtgcaggacccagcccagcaggaagagggcgaagacggcggccgcggccattaggacgaggccggtgcggatgcgcgcgaacatggtcgcggcctggaccttcgccaactggatctcgccgcgcacgatcgaggagaactggctggtgatatcggcgatgagcctgcccacggacggcttgcgccgcgcctgcgggcccgtctgggtctgcgtgtccggggcgccctgcccggcctggggacccgggtcgggcgcagcctggggggcgggcgcctgctgggcgggccccgcctgcgccgacggggcgtaggcgcgggtggtcgatgtcctcggcggcaggtgggcgccctgggcggacgcggctcccgcgccgggctgcccctgggtggagggcccctgcgcttgggaggccgccggggcctgcccctgggcggtgggcccctgctcccgcgtgatgggcgtgggggcggactgcgccgcgggtgcctgctggatgggctgaacgggggcagaagcgcgctgcggagtctgggagggcgatgcctgtggcgcggactgtccttcggggacacccgggttggacggttgggtcatctgagcgactgccttcctgcgtggcggtgcctggtcgactacaggctatgtcacacagttaatcacgaaggcggctcggcgcgcagccgcccggcatgtgtcctcagtccttcacgcgcgccgggatcgcggcgcaggcccagccgactccggttgccaccgcgatccgcggcgcgcccactcctgcggcgcgcgcctcgtcggcaccagagcggcaggaccgaaggccgctcacgggcggcggcgcccacttcgccggcgccgaggacgggtgcgggccctggtctcagtcctcgggggcgatggaaccgggcaggtcggagaggatcctcttggcctgcacgatcaattcgtcgacgtcggtgtcctcctcggggacggcggtggcggggatcgcacccgtgtacgtggccgtttcgtcgatctcatcgtaggtggccacgctcgacaacggcgccggatccgccggatccacaacgttgagggagtgccacgcgacggatcccgagtcctcgtcctcggccccggcggcgtccgcctcgtagaagaggggggaggcggaggggatggggcccaggaggttcttcggatcctccgggcagcgctcgagcgacgagtcgatggcgtcgagcgtgggcggcgcggcgtccaaggagacgctgccgttggccagcatgatgacgcggtgcgcgcgcagcgcggtctccgggtggcgcgtggccacgacgaccgcgcaccccgcggccgccacggcccgcaacaggtccaccagctcgtccgtgtcgtgggcgggcaggaccgacggctccgtcaccaggaacacctccgcgcccgacacgatggcgcgcgccaccgtggccttgaagcgctccatcggcgtcagctctgcgggatgggcatccaccttggtgcgcaggcccgtcagttccagtgcgcccaccaggttgtcccagtccgccaccgatcccgtggcggccaggggcgccaggatgttctgccggatcgtgagatccctgtcgagcgtgtcgcgcccccccagcagggcaacggccccgatgcgccccgcccacctctggcgcgccgaacggggcttggcggacactacgcggccggcgtccgggtcctccaggcccgcgagcaccaggaacagggcgcgggagcggaggccggacggatccagcaccgccgtgatccgccgtgcgcggaaggcgacatccactccgtccagcatgcgcgcgctcgacgacggatccttgtaggacaggccgagcccgccgagcagcacccgcccgccgcccccatgggcggcgtgcgccttcctggagcgccaccacggcttgtgagccggacggagcgacgccctctcctgggcctcagagttcgacatgctcccattctggcagcggatacccaaaaacgctcaggggcgcgcggggggaggggtgagaaggggagggggttggttcaaggcgcgcctggggttgcggcgagcgcgtgaggagtgtatcatctgcactgattgattctcagtaaggtccgactcgttagcggacccgaatgctcctaccgcaagtcggtaacagccgggcacctcttgtgaggtgcccggtcttttctgtattttcgcgaaacccttcccaaggggcgcgcggagtggcacaatgcacatatgagtgcttcatcgcaaaacgtcgagcgcatccgttacaaggtcggcattgatgtcgggctccggtccatcggcttctgcgccgtgcaggtcgatgccgacgaccgtccggtcaagctgctcaacacagtggtccacgtgcatgacgcgggagtgtcccctgctgacgcgaagaaagctgacacccggaaactggtgtcaggagttgcccggaggacgcgccgactgtatcggacccgcaaacgacgacttgtggacctcgaccgccagcttgacgggctcgggtggccattggtggacccggcgcggttcgcggacccgcgtgagccctggttcgcccgggagaaactcgtgagcgggagagtggacgacgccgatgagcggaaggaactgctgtcggtcgcactccgccatattgcgcatcaccggggatggcgcaacccgtactcgactgtggagtcgttgcaggctgatgcgcccccgagcgagttcctccagggcctcaaccaacgagtgtccgagaagttgggcacggaactggacctcgggctcacgcaggggcagctcgtcgcgcagttgcttcatcgtttcccgaacgccaagatcagaggccccgagggcattctgagggggaaactccaccagagcgacaatgccggagaactgcggctgatttgccgaacacagggcttggaccgccatataacggaagaactggtgcgcttagtgttccaggcgaagtccccgaaggcgaacaaggagatgcgcaaacgtatcggcagggaccagttgcctggacagggggcgcacattcgagccgagaaagcacacccagtattccagaggttccggatcgtcgcggtcctcgcgaacctccgtattcgcgaggctcacgtggataggcgcttgacggccgaggaaatgcggactctgactgatttcctgctcgggctggcgggctcagagcagccaacatgggaggagttggccgacaacctcaacattgagaggcatcagttgcgcggcacggcgaaagcatcggtggatggggcgccggcgctccgtttcccgccgattgatgcgacgacggacaggatctatgcgtcgaaactcaagtggctggctgaatggtggcggcaagctaacgaggagcggcgcgggtacatggtcgacgctctctccaactccgggggctccgaggacgagccatacctcgatgacgagatcgcggagatgctggagcaagcgtccgaagaggaccaggcgaagctggacagcctgcatctgcctgggggaagggcttcttactgcctcgacactctgcgccgtttgaccgatgcgatgctgggtggtggacttgacctgttcgaagcgcgcaaagcgatcttccatgtcgatgatgattgggcgccaccgactgatccgattggcgctcctgtgggcaatcccccggttgaccgggtcctcaagcacgtggcgcgctggctggaggctgcggccgggcgctggggggcaccgcagacgatcaacattgagcacgtgcgggagggacttgggtccgagaaagcggcgcgtgagcttaccaggatgaacgatcggcggcgtaggaacaaccagaagctcgtcgaggaaatgggcgaaaagctcgggatgagcggacggatacgacggtcggatcggatgaggtacgaggcgatccggaggcagaactgcgagtgcctgtactgcggccaaccgatcacatatcagactatggagatggaccacatcgtgccgcgtgcgggtgctgcttcaacgaactcgcggtccaatctggcggccgtgtgccggcgctgcaatcatcagaagggcaagttgcccttcgcggtctgggcagagagccaggacagcccagcagaagtgcgccttcaggacgcggtgcaacgcgttcgtcattggctgcgggacgctggaatgggtcagaaggagctacaggtcctccgggtccaggttatcgcgcgcttgaaatcgaagcggccggacgaggagttcgatggccgttcgatggaatcggtcgcttggatggccaacgagctgcgcgcccgcgtggaagcccagtaccggggatcgggtaccaccgtccgagtgtaccggggagcgctgactgccgaggcgcgcaaagcctcgggcttcgaaggaagggtgaatctgatcggtggcagggggaaggaccgcttcgatcggcggcaccatgccatggacgctctggtcatcgcactcatgaaccagtccgttgctcagacgttggcgcttcgcctcaacatgcgggactcgcagtggctcacgcagtcggagcagacatggcgccagttccacggggcgccgggggaggctgcgcggaagtgggaggcgtgggatcgtgccatgcgcgatgcgtctgacctgttcaacctggcattggacggcggcaggattcctatcaccgagaatgtgcgactccgagtcggcaatggacgcgtgcatgaggacggagtcattcggttcaaacccgaatacgaggtgaaggggaagaccatcaaggggggagaggcccgtctgctgggcgatagcctcccgtcggagctcattgaccgtgcagcgacccccgcgctgtggacggctctcacgaggcttcctgagtatgatcgaaagagtggtcttccagagaacccagatcgtgtgatccgtgtcaatggatctgtggtccaagcgacggatcgcatcaggttcttcggaaccccggcgtcggtcgcggttcgtggagggtacgcgaagctcggtgagagcatccaccacgcgagaatctatcggatcaacgggaagacgccgaaatacgcgatgatccgcgtgtacaccatcgacctcatgcgattcaaccatgaagacatcttcacagcggtcttgaaaccgtcgactatctcaatgcgctgcgctgagaagaagctgaaacacgcgatagtggaggggaatgcggagcagatcgggtggcttgttgaaggcgatcaactcgagcttgacgctgctgcctatgcgaagggcgttggcgctgacctgatgcgggagtaccctatggcaacatgctggcgggtcgcgggcttccccgatgaagcgaagctacggctccgtcccgttcttttggcggcagaaggaatgggagaagacgcgccgaagttcgtgcgggaggttcttgagaagcaaggatggaggcctgctgtgaatgctctgctctcaccggggtctgtgcgtgtggtgaggaggaacgtcctcggcgaaccgcgtttcaagtccagcgggcatcttccaactactgtcgatttggtgtaggccatggcgtctcagtggcgtgttgtcgacctcagctcattcgagggtgaggtgcgttccgagcgcggcgccgttgccatcatccctgagtgtggcgagcgtgtggttcttccagtcgcagaactcgcagtcgtcctcattggaatgaaagcggcgttcactgctgctgcgcttcatcgcttagtgcaggccgatgtcgcggtgctgttgtgcgattggcgcggggtgcctgaggcaggcgcctacatgtggtcggatcatggcagagttggcgcacggcatcgggctcaggcggagctgtcattgccccgtaggaagaatgcgtgggcgcgcatcgtgcgggccaagattgagggtcaggccaacgcactggccaatctcggctatcggggcagcggtgaactcttcgcacttgccgaccaagtccgctccggtgatcctggtaacgtggaggcacaggccgcccggctttactggtcacgtgcaatggataaaggaatagggcggcaaccgagttcaggcgctctccttgggtcgaacgcttgcctggactatgggtacacggtattgcgcgggtacgcgatgagggcagttctcgcggcgggtttgtgctccgcgcttggtgtgttccaccacggacgggcgaatatgttcgctttggcagacgacataatcgaaccattccggccgtgtgtcgacgaagtcgccttgtcgcttccctccactgcatcgccctcggacccagaggtaaaacgaatgcttgttgctgccgctggccagaaattcacgaaaaacggactcggtgtcgcagccgtgatggaggatctcgctcagcgctacggtcgttatgttgagggcgacgaggagcggttgtctgtccctgtgtggaaggggccgacaaccgtctgtgcgagtagtggttcagatggctgatgatgccatgtggtgcttggtgatgttcgatcttcctgtcgcaacgaagaaggaacgtcgggaagctgcccgtttccgcaacgatctattggactggggcttttcaatggtccagctttcggtgtatgtgaagttctggccaacgggcggtcaggacatgacgacgatccgggcgatcaaacgggagctgccggagggtgggcaggttcgtgtggtatcaatcaccgataggcaatgggcgacggggttgcgtttcgatcaggcgaagcccgtcaaggaccagggagcccccgagcagctcatgattttctgacgcagaatgcgtgattttcggctattttccaaggaaaaacccctcccctcaagtatatcaaggggaggggtgattgattctcagcaatctgttgcaaaggcgctccgcggcggcaagtatatcaaggggaggggtgattgattctcagccggccaggcgtccgcggctggtctcggtcaagtatatcaaggggaggggtgattgattctcagcgcgggaaccactggtcgaggatgtcctccaagtatatcaaggggaggggtgattgattctcagcagtcgaggcgtgcgtggtcctctgagagcaagtatatcaaggggaggggtgattgattctcagcccgagaccaccatcggccagctcaccgacaagtatatcaaggggaggggtgattgattctcagcgggcgctaccgcgttcctgttcacggaccaagtatatcaaggggaggggtgattgattctcagcacggcgtgcgcattgcgcgaatgttctgcaagtatatcaaggggaggggtgattgattctcagcaccgcgcggcgcggtatactgataccaccaagtatatcaaggggaggggtgattgattctcagcggtaatggctacttcactccaaggcgcgcaagtatatcaaggggaggggtgattgattctcagcaagtctttttttcgaaccacacgaatttcaagtatatcaaggggaggggtgattgattctcagcgttggacacgcttttcacggctgttttccaagtatatcaaggggaggggtgattgattctcagcgtcggcggactgacgtgaatacgcaatgcaagtatatcaaggggaggggtgattgattctcagcagctggagcagcggctcctggacgccgccaagtatatcaaggggaggggtgattgattctcagccgtaattgatcatcacggaagtgccacccaagtatatcaaggggaggggtgattgattctcagcagcgctaatcaacaccaatgccgtccgccaagtatatcaaggggaggggtgattgattctcagccggttcgcacctgccgttctgctcactacaagtatatcaaggggaggggtgattgattctcagcagttcacccactggaagttgcaggatttcaagtatatcaaggggaggggtgattgattctcagcatgaggaagtgctcaacctcaagtgggacaagtatatcaaggggaggggtgattgattctcagccaatctctccgagtgcgacattcttcggcaagtatatcaaggggaggggtgattgattctcagcccccggcggcggcctggcgcgaccgcgccaagtatatcaaggggaggggtgattgattctcagcgccctcgacggagacttgttcgctgaggcaagtatatcaaggggaggggtgattgattctcagccgattcgacaccgaccccctcctgcacgcaagtatatcaaggggaggggtgattgattctcagccataacggtgtttgttatcccccgttatcaagtatatcaaggggaggggtgattgattctcagcgccgtgggtcgaggccgcccccgacgcgcaagtatatcaaggggaggggtgattgattctcagccgcgcagatcgcgggcaccagcatggagcaagtatatcaaggggaggggtgattgattctcagccacgcgcacaaccactgaaggttcgtgacaagtatatcaaggggaggggtgattgattctcagccaggccgtttgcttcggccatgatcttcaagtatatcaaggggaggggtgattgattctcagccacgccagggcccgcgcccccgactccgcaagtatatcaaggggaggggtgattgattctcagcaggcagccagggtggcccccaccaggcgcaagtatatcaaggggaggggtgattgattctcagccccaggagtcgtgcacgagggcgtcggcaagtatatcaaggggaggggtgattgattctcagcccttcgacctgcaggtgaagttggaggacaagtatatcaaggggaggggtgattgattctcagcatctgccgtcgctgatgcgggatctgcacaagtatatcaaggggaggggtgattgattctcagctcacccacacgtggccgcacgagtcgagcaagtatatcaaggggaggggtgattgattctcagcccctcctctctctagtctccggtgggcccaagtatatcaaggggaggggtgattgattctcagcttctgaataaacatcgtgcggggcacgacaagtatatcaaggggaggggtgattgattctcagccgtcggcggcgttgctgacggcggtggtcaagtatatcaaggggaggggtgattgattctcagccttctgatctgcgaccgcatcttggagacaagtatatcaaggggaggggtgattgattctcagcgacgcatccgtaggacacgcgcggcgtgcaagtatatcaaggggaggggtgattgattctcagcggcaccccgggcacccgcccacctgaaccaagtatatcaaggggaggggtgattgattctcagcgaaacgggcatttaccgcttttgccggtcaagtatatcaaggggaggggtgattgattctcagcaaatctacgcgaggtcgctgcggaatgtcaagtatatcaaggggaggggtgattgattctcagccttttcgactcgatgacaccgcagttcgcaagtatatcaaggggaggggtgattgattctcagctcatgatggctgtcctcttgtgggcgtacaagtatatcaaggggaggggtgattgattctcagcgcgctcggctccagggccaggcgctcggcaagtatatcaaggggaggggtgattgattctcagcgatttagtcatcgccgaacggagcggtccaagtatatcaaggggaggggtgattgattctcagctgtcgcgcgcttgtctgcgggggcgtctcaagtatatcaaggggaggggtgattgattctcagcgtgggtcgcgggtgttgcgtcgggttgccaagtatatcaaggggaggggtgattgattctcagcaggacgccgcgagcagcctcgcgggctgcaagtatatcaaggggaggggtgattgattctcagctggatgctggctctactacgacggcgaacaagtatatcaaggggaggggtgattgattctcagctgaccggacgcccgccgcgtcgcgttcgcaagtatatcaaggggaggggtgattgattctcagccagcgataacgagacgctgggcgagagccaagtatatcaaggggaggggtgattgattctcagccgacgtaggcgcgggtctcggcgtagggcaagtatatcaaggggaggggtgattgattctcagcccgccccggccctggaggcgctggtgatcaagtatatcaaggggaggggtgattgattctcagctcatgtaggcgcgcatccactccgcgtacaagtatatcaaggggaggggtgattgattctcagcgctgctgggcgcgtcgtggacagccgtgcaagtatatcaaggggaggggtgattgattctcagcaccgtctccaatgttcctgcaccctttgcaagtatatcaaggggaggggtgattgattctcagcggcgtccagatcatagtctccggcgtagcaagtatatcaaggggaggggtgattgattctcagcgaggccagggagaagcccacaggcccatcaagtatatcaaggggaggggtgattgattctcagcggtggtagcggccgccgagggcggcgcccaagtatatcaaggggaggggtgattgattctcagcacctcgcccaacccggcgaggacaccgccaagtatatcaaggggaggggtgattgattctcagcgcgccgctcccaccgtcgccgctggcgacaagtatatcaaggggaggggtgattgattctcagcggtaagtactcgcctggttaccgagtaacaagtatatcaaggggaggggtgattgattctcagccaggggatgcgtgaggtgctggaagacccaagtatatcaaggggaggggtgattgattctcagcaccaccacgcgcgcccgtagaagatcatcaagtatatcaaggggaggggtgattgattctcagccgcgagcgcggttatacccttgtggaagcaagtatatcaaggggaggggtgattgattctcagctgcccccgtccccaaatcctcccaaatccaagtatatcaaggggaggggtgattgattctcagctgtcgcctgtgtccgcgaaggatgcttgcaagtatatcaaggggaggggtgattgattctcagctcgtggatgtgccagcgtcggagtgggtcaagtatatcaaggggaggggtgattgattctcagcggtcgatcacatcgtgccgcacgccagtcaagtatatcaaggggaggggtgattgattctcagcaggcagagtttcacgcggccgaggtcgtcaagtatatcaaggggaggggtgattgattctcagcgttgggcgccgaggccgggcacgctgcgcaagtatatcaaggggaggggtgattgattctcagcaccaccatccgggtgcgcggccccgtcccaagtatatcaaggggaggggtgattgattctcagcagtaggcgcgcaccgcctcgacggcgtccaagtgtatcaaagggaggagcgttgatctcgaaatcgcatggcctttctgttgtcgcgtggttcttcgagatggctctctacttcggacttgaatgattggaggcgctgcgattgaccgcacctcgtattgttggcctgtcgggggccctgtcccgagcgtttctggacttgttgcgtgatttactccagagcgtgagcaatatgctgctgtcggccgatgttggcgcagtgttcggagcctattgggcaaactcatgcaggaacgcctggcgccccatagcccccgcccaccacagtcccccgcccccgcctggcgtggcaccccgggggctgcggccccaccccacccagcggtccccgctgctgcggcgcggcgcgtcctcggtgccggggcaggccccgccccacctcatcgcgcagccatcgcctcccccgccccatcccatcgcagccttcgcccggcgtggcgccccaggggggctgcggccctggcccccgcctcgtgcgcacaaccgcacaaccgcacaaccgcataacaaaatccccgaagcccagggggcttcggggaggtggtggctccgaccggcgtcgatccggtgacctttcgattttcagtcgaacgctctaccaactgagctacagagccaggaccggaaccgttacggtctggtcggcgaccccgacgggacttgaacccgcgacctccgccgtgacagggcggcgcgctaaccaactgcgctacggggccttacaacaggtaagacctattgaattattgtgcttccacgattgcgggagccgtacccccaacgggattcgaacccgtgtcgccgccgtgaaagggcggtgtcctaggccgctagacgatgggggccgtttggccgccggactggcgcccgaagacgaggattactttaggcagaacatgccttccaggtcaaaacgcccgctcgtgacccctaacacacctgatgtctttcaggaagcggtcaggcacggggcatacgcttccgccatgcgcactatcccatcccaatttggacatgttctggcggcgtcgggcgactcgggacaatccgatggagcctccgaagtggtcacccgcgccctcgacatcgcttcgctgctgctgggcagcgccgtcggcgccttcgtcggcctggtcatcgcggtcctggtgcacgccgtcgcacggggcgcgctggcgaaatcggccatcgcctcggccctgctggcccgcacccgcaccgcgtcctacggctccttcctcacgtggggcgggtggatcggcctgcaggtgactctgtccaacatcgacctgatggactggtcgaacggcaccacggtgtcggttatgtcccacctgctgctcatcgccgcgctcgcgtgcttgacgtgggtcggctactcggccgcgtgggtggtcgaggacgcggcgaaactgcgtcagaagcaggacagggggcgctcgcgccgcttcgagacgcaggcccaggtcatccggcggctcatgcaggtggtgatcagtgtcgtcggcctgtgcgcgatcctgggcacttttgaagccgcccgccaggcgatgaccacgatcctcgcctccgctggcctcgtctcggtcattgcgggcctggcggcccagcagaccctcggcaatgtgttcgcgggcgtcctgctggcgttcactgacgccatccgcgtgggcgacgtggtcgtggcgggccagaagggggagaccggttccgtggaggagatcaccctcagctacgtcgtggtccgggtctgggacgagcgccgcctcatcaccccgtgcacctacttcacgtccacgcccttcgagaactggacgaggcgcgccgccgcccagttgggcacggtcgagctcaagctcgattggagcgcccccgtgaacctcatccgccgcaaggtcgaggcgctcctcaccaggaccgatctgtgggacgggcgcacgtggacggtgcaggtcaccgactccgaccaggacacggtcacggtgcgggtcctggtttccgcgaagaactccgggaccttgtccgacctgcgcacctacctgcgcgagcacctcatcgcgtggatcgtcgccgagcaccccgccgcgcgcccggcccgccgtttcgaacccctcagaaccgtcactgtgacccacgaccccacaggggagagggctgcctccctggccgaggagctcgccggcatcgtcgggagcggcgcgaccggggcgggggccgcgctcgtggcccctcctgctccctcggacgcgccggcccccgggtccgacgcctcgaagacccccacggacgcggcgcacgccgcccgcatggtcgctgcccggcgcaagcacaaactcgccaggcgcagggcgatggcggagcgtcagcgcgagctcgcccacggggggccgtcccagggcgaggagacccaggttatgagcgataccgccgtcggccgtgtcctgagcgagggcagggtgggggtgcgtccgaagagcaccgacgggccggccaccgccgtccacgggatcgaccggacgcggatcatggaggcggtcggcggcagcgggagggggcgccccgcgcccgccgcagccggggcgcccgacccgcgcccgggcaccgctgcgggtccggccccggccgcctccgctgccgacggggactggtcggggtcctcggaaagcacgcgggtgctgcccgccgtcggctccggccccctgccgcccccgcccgccgcctcccggcgccgccagtcggctcccgccgaacaggacgggtcggcccagcgttccgctccagcgccccgggaggcgggcgcgtcgcccgccggccacgcctcgtcggctgcgcccgcccccgcgcggccagcggcagagcctgtcgagcggggcgagcgcttcttctcgggctcgcccgaggccgacgagcgcaacgcggccatggccggacgcaggtacgacgacgaggaggacgaccagcggcgttgagccgtgcagcccgtgcagcgcgccataagaggcgggaagggtcacaataggggcatgagtgatttcccaagccttgacgaggcctcggccctcacagacgcccagtggcgctccaggctgacccccatgcagtaccacgtgctgcgcgagggcggcaccgagcggcccttcacgggggaactgctcgacgagcaccgtgagggcgcataccattgcgccgcctgcgggcagcgccttttcgacgcggacaccaagttcgagtcggcgtgcggctggcccagtttctacgaggccgacgagggggcgaccagggacctggtcgacaccagccacggcatggtccgcacggaggtgcgctgctcgcgctgcggctcgcacttgggccacgtcttccccgacgccccggaccagcccacggggatgcgctactgcatgaactcggcggcgctggtcttcacccccgcccagtagatggccctcgccgaccgggtgccggcgcagctcttcatcgtcggctccgcactcatccagtacgtcggcgcggcggtggcggtcgtcgctttcgctgcggtggagcccgcctcggtcgcgtggtggagggcggccacgggcgcgatcgtcctgtgcgcgtggaggcgcccgtggcgcgacgggctcagccgccgcgacctggcggcgtccacgctcttcggagtggtcctggtggcgatgaactcctcgttctacgaggcgatcgcccgcctgcccctgggcaccgccgtttccatcgagttcgttggcccagtggcggtcgccgtcctgcgcgggcgggggtgggcgccgcgcgtcgcagccgtcctggccctggcaggggtcgcgtgcatcggggggctggggctcgacctgtcgcaggggcgggtgcgcgccggcctggcatggatcctggccgctgccctcgcctgggcgctctacatcgtcctcgggcagcgggtcgcctctactcgctcgggtgtgacgaaccttgcactcgggtgcttcttcggggcggtgctcttc

SEQ ID NO: 4351 - DNA, 23312 bp, synthetic construct
  source 1..23312: mol_type = other DNA
  misc_feature 1..23312: note = Synthetic
gcgccatcccaggtacgcggcgactgccacggccacgatggcgaggacgataaggatcggatacttcatgcgtcgatcgccgccgatgcttgcttcatgaggacgcgcactcgaatggacgacgcttcattggaggcgtcgaggtttccggtgacatccgatgcgttcgctccgtcgaaactaggtgcctcgcagcgggcgaggagatccgccagttgcggccacatggggacgagggcgcgcacttcctctgcggtggcgacttcgaggtccctgccactgcgctcggttcccagggcgcgcataagcccggcgactgcgaggctcgctccggcctcgttccattctccctgctcgtagcgctcgtggatcgaggtgaggaactcgtggtagcgctctctctgagcggcgtccagcgactgcagttccggcaccgatgagatgtcggaactccaccaccgccagatgttgaacacgatccacacgataatgaacagaaggatgagagaacccacaacccacatccagttggggtagatgatggggctcctcacctggtcgatgaggtcatcggacacgactcccccttcgcagtgcttccataagggcgtgcggcagtgccgccgacgagccgactccgactcggatgacaccgcgccggtcgagtatctccgcaaccgcctgagtgcggcggcggacggcctcgtgggcctgggacgcgagcgtgctgtcgcgcaacaggaagtccggcagcggcccctcgtcgacgtcgatgacgcgcgtgcccaccggcagatccgccggattcatatcctccacgctgatggcgataacctcgtggcgcgctcgcagccgcttgaggagagagtcggtggcgggagtcggttcgggttgcatcgcgtcagtgatgaggacgatgagggatctcctgcgggtcatgacgaaagcgcggtcgagtaggcgcgctacatcggatcgcggcgattcgagagtgatgtcctcttcaatgcgccgcatgatcgtctccgcgtgggcgttgccgctgcgggccgtcatatggcggaccctgctcgcatcaccggagacgaggccgatctggtctccgcgggcgacggagagccaggcgagcgcctcgcacgcggcgagggacacttcttctttcgtctcccccgatggtgcgagagcgcccatggaccggccggtgtcgacgacaaggatcatctgaagattcgccgacgcctcgtatcttttgaccactggcttgtcaaagcgcgccgtcgtcgcccagtcgatggcatggacatcgtcgccggccttgtactccgcaaggtcgaggaactcccagcccttgcccgcgcgtagccccgcatgctgcccgtccatgacggacagcagcttgcgcatcaccggcaggtggattctggatgagagcgcgtggagctctctggaacggacgggcatggcggctcaggggacgggcaccgctgagaacacggcgtcaatgaggccttcgacgagcacgtcatcggcgagggcgtcgaaggtacggatgatgcgatggcgcaggatcgagtggcgcagcttcttgatatcttcggggatgacgtagtggcgcccgtccatgagggcgaccgcctgtgagatatgcatgagggcgataccgcctcgcggggatgccccgaccctcacatgcttattccagtcgggcaggggcttggggccgccgcctcgggaggtgttgatgaggtcgacgatgtacgccttgagggtcgaatggacgaagaccctcttcgtcagctgctgcaggtcgacgaggtcatcaatgctgatgggtttggcggcgatgggcgaccgcatgacaccggagtcgattcgttcgaggacctcgagttcctcgcggggctgcgggtaggtgatcacctgcttcatgacgaagcggtccatctgcgcttcgggcaggacgtaggtgccctcttcctcgatggggttctgggtcgccatcaccatgaatggcgagggcagggggtagttgacgccgccgatggtggtctgggcctcctgcatggcttcgagcatcgcggactgggtcttcgccgacgagcggttgatctcgtcgaggaggacgaagttggcgtggaccgggccgagctgggtggtcatctcccccgccgcctggttccagatctgcatgccgacgatgtcattcggcatgaggtcgggagtgcactggatgcgcctgaatgaaccggacacggatgctgcgagtgtctgtgcggcggtagtcttggccaggccgggcacagattcgatgaggatgtgtccaccggagaggagccccgcgaccaggcattcgcgcagcccttcctgcccgacgatcttcgatgagaagatctcgttgatccggtcgagtttggtgcgcgctctggcgagctcgtcctcgttgaggtattcggccacgtgccactcccctcggatgatggtgggttctcttcgccctgttgaccccaacagtgtaaccgcccggcaccgacgcatcagagtcggatgatggacggacggggactgctccccatgctgacacccgaatgagggccatctggacgacacggggattcacacacccgagtgatggtgattccctatggtcgacgagcagagttcgagcaaggagggacaatgcttcaacgaggccgacgaacggatggattgaccaaacgaccggagttgaatgatccgacggtcaacggtttcaatcctcttgcttcgatcaccaccaatcttttcgtcacttgtatgacagtgcttggcattacgcatacaacgtcaatgattcaaacatttcccaaaccgccaacaggcgtgacaatcggatggaatctactgaccgagtacgcgatcagttctgaactcccaccagtactccttggagcggagcgtggcgttgccgcacttgcaatgacagtcgcaaccctcagtagtcgctcatggcgcgaagttcgagaatcctcggtcagggttatcatctgggaggcagcattagagactcgtctcacgacgatgctgatattcctcggcataatatcgggaattaatacaacattccttgcgttggcaacatggcgcagacaggactctacttatctcttattcatcccaatgcttgcccttcatttcattatcgctgcactcccctcagtgatgagaacgagcggcgcttcgctcgtccgcacctacacgctacaactcacagccctcgagagaagtgctgtcacaactggcgaccgcgaatttactcagatcgtccagagtgcaaaggagagcgaaggagtcggctccaataccagcagatcgacaagattacgtcgacgatctacccgcgcgacaaccatgcacactcgacaccgacgcaatcgcagccttccatggttcgtcattccaacaaccagcggcattctgctcttattgaccggtgccatattgagaaacgtatggctacccttcggaaactcactcatcggcatcagtcttagctgttttacattactatttcttctaccaatagcaagtggaatatttacaactgatcaccgctttcaaagagttattggatcaaacatcttaatatatatcgccttcattgaggcaacaatgggattctatagttgcagaaccacacagtggactgtattgacatgaatctgcgcaatactcgtcttgatcattccgccaataatggctttaagtggcaaccggaagttctggtcgtcaaagcccttcgtcggcattcgaaacagcaaagtacagcaagtgtttacgaccgccaccgaataccgcaggagaatcctcgcattcgacaccgacagcggaaacaacggcgaagctcttctcaagcgtctgcatgcagaactcctcgcagggcaaaccaaggattctgctattgcgatggtcatcgccaggatcgaccaatcctcatccggagtcgcagcatacgacaccacctcgtcgggaatgcgcgaaaaagcccctttccgcccgctatctgagccgcacaatcgtctcccagcggacatcgcacatgtagcgatacagatgcctgaaagccccgaagacaatgacgctcatcgcccgcccgtcagtacacgtcgagcggcatcactgctactcggatcagcagggcttgccgcgactctgatcggcggagttatcgcagttcatcgacgcaatcgcccttccacctgacctgttgctctcaccggggcagtgctcctgcccgcccgacgggcagcgcacgggaaaggaacagaagccacggctccgccaggggcaccgacacgcaaaaaggccgctggccgacccctcagggccgaccagcggcatgccactgcgagcagtgcactaggaacgggaatgctcagccgcgggctgctgcgatgcgctcacggaacttcgcgagctgctcagtgatggccgcggggagcttgtcgccgaactgggcgaagtactcctcggtgccatccatttcagcggtccaggcatcgagatcgatctcgaagagcttggcccacacagcctcgtcaatgtcgagaccatcgaggttgaagtcctcgaacttcgggtagcggccggtgacgccgtcaatcgcctcgacctcgcccgccgcgcggcgaacgatccagtcgaggacgcgcgagttgtcgccgtagcccggccacatgaacttgccgttctcatccttgcggaaccagttcacctggtagaccttcgggaacttgtcgccgagctcggcttgcatctcgagccagtggccccagtagtcggccatgtggtagccgcagaaggggagcatggcgaagggatcgtggcgcagcgaaccggccttgacgtcggtcgcggcggcagtgacctcagaggcgaccgaagcgccgatgaacacgccgtgagcggcctcgtactgctcggcgacgagcggcacgttcgtggcgcggcgtccaccgaagaggatcgcgtcgaccgcgacaccctggggagcctcccagtcggggcagatgatcgggcactgcgacgccgggacagtgaagcgggagttcgggtgagccgccttctcgccggactcgggggtccagtccttgccgagccagtcgataaggtgagccggaacctccccgtcgatgccttcccaccacacgtcaccatcgtcggtcagggcgacgttggtgaagatggagttggcgcgcatggtgtccatggccatcgggttggtgtcgtaggaggtgccgggggcgacgccgaagaagccggcctcggggttgatcgcgtagaggcgaccatcggggcccgggcgcatccaggcgatatcgtcgccaacggtctcgacgttgtagccggggatcgtcggctggagcatcgcgaggttcgtcttgccacaggccgaggggaaggcagcggtcacgtggaactgctggccggtctcctcgcgggtcaggcgcaggatgagcatgtgctcagccatccagccgtcacgacgagccatggtcgaggcgatgcgcagcgcgaagcacttcttacccaggagggcgttgccgccgtaaccggagccgaaggaccagatctcattggtctcggggaagtgggtgatgtacttctcgtcgttgcagggccagttgtcgtcgacggcgccctcagcgagcggaacgccgacggagtggacggcgggaacccacggcttgccctcggcaatgaggtccatggcagcagtacccatgcgggtcatgatgcgcatgttgcacacgacgtagggggagtcggtgatctcaacgccgagctgggagatcgggccgcccagcgggcccatggagaaggggatcacgtagagggtgcgaccaaccatggagccggcgaacttctccttgaggatcgccttcatctccttcggatcggcccagtggttcgtcggaccggcatcttcttccttctcggagcagatgaaggtgcgggactcaacgcgcgcgacatcggacggcttggagcgggcgaggaaggagttcgggcgcttctcctcgttgagcttggtaaacatgccggtctcaaccatgagagcggtgagacgatcccactcttcctgcgagccatcgcagaactcaatggcatcaggcgtcgtcagcgctgcgatctcagccacccatgcgaggacgtcttcgggagcgttggcgggcgcagctgcgcgcacatcctgttcagtcacggacattttgcctcctgaggcactcggtatttcggggcgcggtcacgcccttgatctacgcgatcaatcatcgctgataaccgtggattgcgcgcgggcgattagtcccgtggacacgtgtgcaacagttcacatgtcgtgtgggtatacacacgcgtcattccccccgagtcttatcgcgatgcggaagtggacgcggcgccggttttatgccctagtctgtaagcgcgactagtccgcacctcatcatctcaggaggaaaatcgtgggactccgcaaggcctcgtctggcccgtccttcttcgacctgttcaccgatcaggccaccaacctggtcaccggggctcagcttctcgcctcgatcctcaccgcatctcctcaggagtgcgtcgcgctgcgcgatcaactccacgaggttgagcactcggccgatgagatcaaccatcacatcgcccggctcgtcaatcagaccttcgtcacgcccttcgatcgtgaagatctcggccgcctgtcctcgtgcctcgacgactgcatggacctcatcgacgaggccggcgacctctacgtcatgtacgggctcgaaaacatcccaggcccgaccgcatccctcatcgccgagcaggcggacatcctcacgcgctgcgccgttcagacggcgacgaatatgccgtcgttgaagtctcctctcgacatgcgcgaatactgggtggagatcaacagcctcgagaacgagggcgacctcacctaccgccgcgcgctgaccgcgcttttcgattccgggctcgatccgatcacgatcatcaagctcaaggatctcgtcgaggttctggagaaagcatcggacgccttcgaagatcttgcgaatacgatcgaaatgatcgcggtgaaggagtcttgaggccgtggatctcaatctgatcctcgtcgtcctggtcatcgtcatcgcactgggattcgactacacgaacggcttccacgacgcagcgaatgcgatcgccacgtccgtatccacgagggcgttgacgccgagagccgcactgttcatggcggccgtcatgaacatcgtgggcgcgctgttgggcaccgaggtcgccaaaacgatcggtgaggggatcatcgacatctcccactattcactgtcgaccgatgtctccatgcagcgcgagggcctcgtcatcgttctcgccgcgctcatcggcgccgtcgtctggaacctcatcacatggtggttcggactcccctcgtcgtcatcgcacgctctgatcggcggcctcgtaggcgcgggcctggcctctgcgactgcggtgaagtggggcgggatcctgtctcacgtcatcatcccgatgttcgcctcaccctttgtgggcttcttcctcggctacctgctgatgaaggtgctgctcaaactcgtccaaaacctcccttaccatccgacgatgcgccgcttccgcatcctccagaccctctccgctggtgcaatggcactcggacatggattgcaggacgcgcagaagacaatgggcgtcatcgtcatggcactggtcgcgggcggctacggcgagcaccatgccatcttcgatccggtgacgggcgacatgcagatccccctgtgggtcaagatcgccgccgccgccgcgatttcactcggtacgtattcgggcggctggcgcatcatgcgcaccctcggccgcaagatcatcgacctggatcccgcacgcggcttcatggccgagagcgtgtccgcgatcgtgctgtatctgtcggcgtatgtcctccatgcaccgatttcaacgactcacaccatcacctccgcgattctcggggtcggcgcgaccaagcgcttctcagcggtgcgctggggagtcgccggcaatatcgtcggcggttggttcctgaccatccccgcagctgcggcggtcgcggcggtggtcttctggatcaccggcttcatcgtgggagtctgatcgtgggctcgtctcacgccgatcaacggggtctgtccgcccgcgccatgagcgcgagcggcgtcctcgtcggagcgtgcgccctggcgttgtcgggatgcaccccgtcatccgtcatgaatctctccgtcggcgattgcatgcagctgccaacggattcgactgcggtcaccatcgaccgctcatcgtgcacctccccccaccaggcggaggtcgcggccgtcatcaatgttcaatcggatgcggacgccgctttccccgggaatgcggcgctcaattcgcaggcggagacagcttgcgtcgagtctttcgaggattacgtgggcgcagcctacgtgtcctcctcgttggatgtcacgtggctgactccaacagcggaatcgtggcagcggggcgaccgttcgatcgtgtgcctcgttcacgcgatgggatcggctgagctgaccgcctcggtcaagggctccgggctctgatctcctgtgtacggcccacgttcaggaggggacgccgaagacttccttcgtccttgtcccatggcgttcgatcccgatgactgagggcgaggccgatgtgtggacgacgtgcgcgatcagcaggtccgtggtgcccagccaggggctcgacgaggggaagagcctggtgagagtcgacggcgccgcatcgcgcagtggctgcaggaggagcgggatcgtggggcggtggacgcagatcgccgtcggcccggaggcttgggcgaccaggccgctcatgactcgggaggccgcttccggattcgccttcgtggcatcctcggtgaggtcgtcctcgtagaggatcggtgcgtcggagagacccgcccatggtgcgagagtctggcggcacctcgtccacggcgaggagaccgccgattcgatgccgaatgcggaaaggatgtcgatgaggtcgaggctctggcgcgctccgaggcgcgtgagggggcgcctcgcctccccgccgaaccaggaggatcgggacatcgccttcgcatggcggacgacggcgagcgtggtcgtcacgaggagcccatcgcgggctcgggtcaccacttcggacagcagacgacgatcgcctctgcgcgtcagcatctgttcggcccgggagggcttggcccacctggtgaggtcgatttcagcggtgggcgcggtgtggacgggaagcctggttcgctcgacggcgccccccgatgaacgaggatcggatgagacgagggtgccgatccagtagtagacctctttcgtctgcccggatccgagacgatagcgctgcgtcgtcagcggcgccccgaggacgacgaccagccccgtctcctcctccacttcacggactgctgcgttgacgatcgactcactgcgctcggccttgcccttgggccatgaccagtccctgtatcggggccggtgcaccatgaggacttcaatgtcatgggggtcgatggattcgcccgggatgggggtgcgctcgggatccgtgaatcgccacaccaccgcgcccgctgcgcgcacgaggcgcgaaggaatcggagctggacggatgagacgcggcaccctccaagcctaccggcaccgacgcccccgcgcgtgtcggcggaccagggatggcgtttgaccgcattcaatccgatgattcgccgttgttcatgcccgcggacgacgctggcgcgttatcattgattctgactgattctcagtaagttccgactcgttagcggaactgaatgctccaccgggccactcgattgagtggcccggttttcgcccaaatgtccgagtaatgcgccatgattggaaacatgaccatcaacgacgacaacaatcctcatcccatctatcgaatcggcattgatgtcggaacacactcaacaggcttctgcgcggtagaagtggatgactcgggctctcccctccgcctcctcaactcggtggtgttcatgcacgattctggaattgatccagccggagcgaaaaaggccgagacccggaaggctgtgtctggtgttgctcggcgaacacgacgcctctacaggagtcggcgtactcgtcttttcgaactcgataagacgctgagacggctcgagtacccgttgatcgatcttgagtccattgaggatccccgtgcgccgtggcatgtgcgatcccgactcacccacgagttcatctccgacgaggtcgaacgccgtgaagcgatctcgatcgctctgcgtcacattgcccgccaccgcggatggcgcaacccttattcgaaggtcgaatccctcctcatcccaacagagccgtccgaattccttactgggttgaatcaacgcatcggcgagaagctcggtgagaatctcgaccccgacctcacaccgggagagctcatgtcgcggctcttcgtcgccttcccgactgctcgtatccgcggccctaaaggcatcttgaacgggaaacttcaccagtccgacaatgcacaggaaattcgtctcatcgccgagatgcaggacatcgatgatgaggaacgggatctgctcattcgaacagtcttcgatgcgaagtctcctcgaggcagtgcacaaggccttcgaggaaaagatgctctgcccggccagcaccaccacgttcgcgcagagaaagcgcatcctgtcttccaactcttccgaatcgtcggtgtcttgacgaatcttcgaatcagagaaggcagagaagagcgaagactgacgcctgatgagctccgaggtctcgtcgactatttagaggtgacgggcgctggtgacactcccacgtggggcgatattgctgacaatctcggtgttgagcgttcagcactgcggggcacggcttcacccggtcctgatggttctcctgcgctgtcgtctcccccgattaacgtcactgatagagccatcgcggcatcgaagattccgtggctcgtcgactggtggacgagtgcatcttccgacgagcggggtcgcatggttgacgcattgtcgaatagcggcggttcagaggatacccccgatgctgatgacgagatcgctgagatcctcgaacaggcgtctgagcaggatcaggagaagctcgatgcaatctccctgccggcgggtcgagccgcctattcgctcgactccatgaggcgtctgagtgaatacatgttggcgaatggtgctgaccttcatgaggcccgcaaagccgtgttcaacgttgacgactcatggagaccgccagccgatccaatcggagcccccgttggcaatcctgcggttgaccgtgtgacgaaacaggtcgctcgatggctgtccggcgtcgaacgccagtggggacctcctcaggcgatcaacatcgagcacgtgcggcatgcgttgggaagcgaacgcgctgttcgagaagcaatgcgtgacaacgaaacacgtttcaagcgcaaccagcgcatgttcacgaagatgcatgagcagctcggcctgtcgggtcggcccaggcgcagcgacctcatccgctatcaggctctgcagcgtcagaacggccaatgcctgtactgcggctgcatgatcacattcgatactgcggagatggatcatatcgttccccgcgccggatcgggttcgacgaacacgcggatgaacctcgctgcagtgtgccgcacatgcaaccacacgaagagcaaaatgcccttcgccgtgtgggcggcgactgattcccgtcctgaggtttccctgaaggaggctgagcagcgcgtgcgtcactggctccgcgacgagggagtatcagctcgggatcacaagagattccagaatgaggtcattcgtcgtttaaggacgacgacacaggatgaggagttcgacggcaggtcactcgagtcggtcgcatggatggccaatgaactgcgcaatcgtatcgaccagcacttcaacgcacatgatcggctcgtcgatgttgctgtttaccggggttctctcactgccgaggcccgtaaggcaagcggtttagagcggagggtcaacctcattggtacaggaggcaagacgcgattcgatcggcgacatcatgcgatggatgctttgaccatcgctctcatgaaccgttctgttgctgcgtccctcgcattgcgaacgaacctccgcgattctcagcggatcacgcgcgagcctgagacgtggaagtccttcacgggcaccactgaggaggctcgccgacagtggtcactatgggatgacgcaatgcgacgcgcatctgacctgttcaacatcgcattgactgaagatgcgatccccattgtggagaacattcgtcttcgtcagggcagtggggcaatgcacgaagcgacgatctctccgttaacccgcgtcgcactcagctctgctatgcccgttgatctcgtcgacagagcatcgacacccgctttgtggacagccctcactcgtctgcccgacttcgatgatcagcagggactacccgctgacgagaaccgggaaatcgtcgttaatgggcgccacattcgtgcgagcgaggacgtctcattcttcgacacggatgccgcatgcattgctgtgcggggtgggtatgcgcagttgggagcctctatccatcatgcgcgtatcttccggatcgaggggaagaagacgacatatgcgatggtccgcgtttaccaagtcgatttggtgaagcatcgcaatgaggatcttttcaccgtcgagctttcgccttccacgatctcgattcgcacggccgaacagaagattcggagggcgcttgaagatggaacagccacccaaatcggttggctcgtcgaaggcgatgaactcaggattgattcgtcggcgttcacctctgcggcaatcggcgagttcttctccgcatacccgatgtgccagagttggcgagtggcgggttttccaggtctggcgaggcttcgactgcgtccactcgccctcgcctcagaggggatgccggacgacgcgagcgcggggatcaaagagatcatcgcaggccaggggtggcgcccagccgtcaatgctgtcctcaagtcagggagcgttcatgttgttcgcagagatgctctgggacgcccccgctatcggcgcacgtcgactcttccgttgtcacaaccattgatttgaggcgattggcgttggcttctcagtggcgcatcgtagacttctcgaactttgagggcggccttaagtctgttcgcggaggcatcgagatcattcctgactccggcgatccaatggtggtacccgtggccgatctcgcggttgtactcatcgggatgcacgtgtcattgagtgcggccgttctacatcggctgtgcgaagcggatgtcgccgtcttgttttgcgactggcgcggcattcctgagggcggtgcgtattcgtggtcagatcatggacgtgtaggggcgcggcatcgggcacaagccgagctcacacttccccggaagaagaatgcttgggggcgtatcgttcgtgcgaaagtccttggacaggctgaggtgctcaagcgcgctgagattcccggcggtggagagctactcgccctcgctgatgaagtgcgctcgggggatccgatgaacattgaggctcaggctgctcgcctgtactggcagcgcttcttcgggcggaaagacaagcgtcttcccggatcgggcgagttgctcgggcacaatccgtgtctggactatggatacaccgttcttcgcggactggtcatgcgctcggtgattgcaacggggctcaatggttcgctcggcatcttccaccgtggacgcagcaacgtcttcgcacttgcagacgatctgatcgagccattccgcccgtgcatcgacgatgcggtgttgggactcccatcggatgcctcgccgtcagatcccgacgtcaaacgtgcacttgtcgctgcagcaacccagcgtttcaacgaagacgggctgcatgtccccgctgtggtcgagtcgttcgcccaacaattcgggcgctacgtcgagggtgacattcaacgcctcgacccgcctgtgtggcgcggccccttcatcatggagtcgtaagacgatggcggacgacgcgatgtggtgcttggtgatgttcgacttaccggttgaaacgaagactcaacgtcgcgaagcgaccaggtttcgccagtcactattggactggggcttctccatggttcagttctccgtatacgtcaagtattggccgacgggcggtcaagacgccgcgaccatctccgccatcaagcgatggcttccgcctggaggacaggtacgggtcctcgccctgacagaccgacagtgggcgacggggcttcgttttgacaacgcgaagccccaatcaacggagccgaagcccgaacagttgatgattttctaaccccggaccgctcaaaaccgttgaaatcctgcggaaaacccttccctcgccaagtttatcagagggaagggtgactgattcccagcattcgccgaagactttgacctggaagcacaagtttatcagagggaagggtgactgattcccagctatccaaggtgaggtgtacgtcctcacccaagtttatcagagggaagggtgactgattcccagccatcgaattgtgcgcctacacgcactgccaagtttatcagagggaagggtgactgattcccagccagcctgagcctcatggttgtcgctgttcaagtttatcagagggaagggtgactgattcccagcgactggtcaatttccagaccgaggaaatcaagtttatcagagggaagggtgactgattcccagcgttcgattgacgtccacgattgtagtcccaagtttatcagagggaagggtgactgattcccagctatgtcagtggcgctgggcgcggcttcgcaagtttatcagagggaagggtgactgattcccagcccgcctggcgtggggggccgattccgatcaagtttatcagagggaagggtgactgattcccagctcatcccgaatgtcggtgcctcgaccatcaagtttatcagagggaagggtgactgattcccagcgcgttacacaacccccacatttgtgcgccaagtttatcagagggaattagcaacaaatccaaacagcatattcaacacttccaatatcgtggtcacgactaccagaataaatgacgatcaatcttaatccccgttcttgaccttcactctgataatggggttgtgctcacgacgcgcatcgaccccttatcaccattggcctgcaggaagcggtgctgaaacaacggaagttattcgagaggggaacaccagatcgcagttcgtgttcttctctcagtttgccgcgcaggcaggatgaagattggactctggttacttctttcctagcgcactgggacgcgatgaattcgtcaccgcccgtttctacagccaggcaaccggcagtaatcagcgcttggtcgaagtgttgcggcatgtcatcactccatcgtcagcgattatgcgactcccctcttcgtcgcgagaattcagcgacataatcgccggagtccaacgagtcgttgaaacccagttagctgtcagcgcgcccggagttgcgaggccgatcggcgcgtgaggactcgagcatcaattgctgtagccttgttcgaatgaacgcacctgatggcacaggacggcaacccgcaggtattcagggcgaaccgacgattttccaccggtgccccagcatcatgactaccgcattgcggaatcggaagggattgagatccgggaacaatcagggggaatcctcactgcgccgggcacgcgttgatgcttgaatcaaagacggcgctgaacctgcgccacaccacccccaaggagcagccatgaccaccgagaacccgaacccctccttctccgaacgtatcgacgttgccggcgaccaagtcgttgcagcagtcaagcagctcctcaaggacggctccgtacgccggatcatcctgcgcgacgacaatgggcgcgaattgttctccgtccccatgaatgtcggtgcggcggtcggcggcctcgccgtcctcgcggcgcccacactcgcagcggtcggagcgatcaccgccctcgtcacgaaagtcaccatcgacatcgagcgcacggacatcacccctgaggccccggaggtcgtcgatatagagcccgactcccccgccgagtgacgcccctgccgggggaaactcgcacacccacgcgatcccactcccaccagttgcatacccccaggggtatcctctagcctttcgtgaacattcacttacgagaggttggaccacgcatgatcacccacttcagtgagaattaccgcccgctgtacttcctatccgcactgggcatgggcggcctcagcatctcgttcttcatgtacttgatgttcctcgtcccccaccccaacactcccatccccaccttcgactcgctcactgcacaattcgccaaaggcaatgtgacggcgaacgtcctcatggtggtgacgctgctggccatcgcctacttcgccgtccgccacgtgcagctgctgatcgcgaatatcgccgcctaccggcgcttcacccgcacgcccgactacacggcactgatctcctccaatgcggaggtccaactcatggcagtgccgctgaccctgtcgatgaccgtcagtgtgctcttcgtcctcggagcactcaccgtccccggcctgtgggatgtcaaggaatggctgttccctttcgcgctcgccgtgaatagcgccatcggggcgtacgccttcatgctcttcggccgatacatcaatcggatcctgtccgacggatccttcaacgtcgacgacaccaaccacttcagccaggttctgccctcattcgccttcgcaatgatcggcgtcggcttctcctcatcggcggccatgagccagaccctggtcacatccctcatcggcgccgccgggaccgccctcttcctcgctgcagccgcgctgtggggattcgtgaagatgcccgtcagtttcggcgcgatgcttcgtcatggaatggcccgcgaagccggcccaaccctgtggctcgcgatcccgattctcaccctcttcggcatcgccggaatccgcgtgagcagcggactcgcccacaatgtgttgcactccgatatcccgggcatcgtatggctcgtcttcttcggcgccatcgtcgccctgcagctcatcgtcggcctcttcggctgggcggtcatgcgccgccagggctacttctcccagttcgtgagcggcccgggtcggtccatccccgcgtacggcctcatatgccccggggtcgccctcatcgtcctctctcagttcttcatcggccgcggcctggtgggctcgggagtccttgagaagttctccgtcacgcacatggtgctgctcgccctcgtcttcttcctgcagctgctgacgatccgcaccgtggcgcgcctaaacgccaaactcttgggagtgccgaagccgagcgccgaagcgtcggcggacgaagagaacacggaagcggtctctctgcgttgaccccgcgctgcgctgatctgggcggggcctaccttccgacaacccgggaggaggcctcgtccatcaattcggattgcacatccaccaagggggagccgtccttcgcgaactggttgcgcttccacttgccgttcttcttcaatgcccacgaggacgtcccctcggacactccgcggcgcacgagtcccgccagatacgcgatctgcgtctcgtctttgatcctcaccagggcctcaacccttcgatcgagattgcggtgcatgaggtcggccgagccgatccacacctcctctgctccctcgggcccgaaagcgtagatccgggagtgctccaagaagcgaccgaggatcgaacggacccggatattctccgataggcccggcacccccgcccgaatcgcacaaatgccgcgcaccagagcatcgacgcgaacgcccgcctgggacgcccgatagagggcgtcaatgacagcctcgtcaacggcggaattgaccttaatgccaatccatgcatcctcacccgccttcttccgggcgatctggccgttgatcctctgaatgaggccgtcccggatcgacagaggcgccacgagcaggcggtggaatgtcgagcgcggcgcgtaaccggagagctgattgaataggcgcgtcatatcctgcgccacctcaggatcacaggtgagcagacccaagtcctcatatccgcgcgccgtcttcggatggtagttgccggtgccgacgtgacagtagcggcgcaggccatcggtctcttggcgcacgacgagggcgagcttgcagtgcgtcttcaaaccgaccatgccgtagacgacgtggacgcccgccctctccagtttgcgggcccagccgatattcgcctcctcatcgaagcgcgccttgatctccacgatcgcgacgacctgtttgcccgattgcgctgcctcgatgagggccgacacgatcggcgaatccccggaggtgcggtacagggtctgcttcatcgccaagacattcggatcgcgcgccgcctgcgtgatgaacgcctgaaccgaagtcgcaaaagaatcgtaggggtggtggagaagaacgtcgtggctgcggatcttggcgaagatatcgcccgcgcgcgccgactcgaactctgccagtcccgctgcggtgaccgggacgtacttcgggtacttgaggtcggcgaggtcgagatcgtgcagttcattgcacagcgtgagatcgagcggcgcgggcagtgcgatgacatccgccggagcgatctccagcttctccacgaggaattcacggacgaagggcgtaatcgtctcttccacttcaaggcggacgacgggaccgaagcggcgcctgaggagctcctcctccatggcggtcagcaagttctccgcatcgtcctcttccacttcgaggtcctcattgcgggtgacgcggaagccgtgggcctcgacgatctccacccccgggaacaggtggtcgaggtgtgcgcgcaccacgtcttccagggtcacgaaggtggcacccttttcagtgccgacaatgtcttccactgacccgatgcccgtcttgcccgccgtctccacattgatgaggcgcggcagcgactgggggaccttgacgcgcgcgaagtgcagcttgtcggtcagtgggttgcgcacgacgacggcgaggttcagcgacaggccggagatataggggaaagggtgggaggggtcgacggcgagaggcgtgaggacggggaagatctggcgcctgaagtagcgggtgagctccatctgctgttcctcgccgaggtcgtcccagcggcgcaggcgtatccccgaagcattcagcgacggcaggatctccgactggaatgcggcggcttggcgctcgaggagttcacgggcgcgcgcctggatcccctcgaggacttggcggggctccagcccggatgcggatgccttcgcgatgcccgcggcgatccgacgcttgaggccggcgactcggaccatgtagaactcatcgaggttggaggagaaaatcgcggagaaccacgcgcgctccagcagtggcaggttcacgtcctcggattgttcgaggacgcgctgattgaacgccatccatgagatctccctgtcggcgaagcgccccctgggcaggggctcgtcctcgccgagcggggctgaggcgtcgatgtgggtagcaagggcaggcagtaccatctgcgccggtatcgggtcgtcgtcgtattcggagtcctcatgctcgacgccgaccagtcccgcccggtccgcagggacaagcatctcatcggctcgcgccacctccactgcggttgcctcgcccacctccggggcgactgcatcctcggggatggccggtcccggccaagagccatcgggggaggagaaggtcggggagtcggacattcggggtcacttcctcaatgtcgggtcgcttggcgcggtcctgggcgacgagggcgctccgccccatccatggggttaaaccctcagcgcgattgcagccgcttccaccgccgctgcgggcgcgtctactgtcgatcttaggctgccgggtcgctccccgccgctcgacggctccccgatagctgggactcagacgggttcaccttcgatgtcttggacgtgtcctttctcattcaaggcacccgggggtcgacatcgttcctccggagcacccggatctcgggggcttcgcgcccaccctcgggacctattccaatggcgtcatcgcgcctgcgactccgcccctccccgacatcagcacctcgcgacctcgccccacacaccaacactccccaatcctgaagtgagagccctctgcggcactcaatccaggttccctaccgctgcctcccgcgcggcgaggtccaagtcctcagcggtcctcagcagcgcatgggcgcgcatcgtcaccgcgtgcgcgagaggatcgttcgggtcggtgatccacgatgccccaccgccctcccccgctgcgaggatcctcatggcgcgcgacgcatctgcgaggacactctggaggtcgtcatcggtgagggtcccgcgcaagagtgcggccacctcgtccatgacggaatcgagggggcgcacgtcgacggggtgctccagtccggggatgatcgcagcgcgctcaccgtcctcgtagcggctgtggacgagggcggggtcgcggtcgaaccactggaggagcaggtagagtcgccagaaggctccggggagtgtgaagtcggggctggaagaccataggtgggcgaccgcgtcgacgccctcccgctcaacgagggcgcggaggcgctcgaccatctcgggcccgaattcatcatcggggacgcccatgagcgcccacgcgctggtgtgggcgacagcggaggccgctgcggggtcctcgtcgccgacgagggcctcggctcgcatcggcgacagcattgctggccgacgggggacacgggattgggccattgaagcgccgtcctcttacactagggatgcggcgtgtcgcatgctggtggtattgtccagcggtggcgcaaacgccgcgggcctatagctcaatggtagagcagcggacttttaatccgtgggttgggggttcgagtccccctgggcctaccagcaccgtcaaccatcatcactccccgcgtcggcgaactcataatcataatagagcctatgagcgatgatgcaccctccaccgagaccgcgctgacgagcaccgagcgggctgtgggcgccctcgtcgggctcgccgccggggacgccctcggcatgccgacccagtccatgtcgcccgagcagatccgctccgaatacggctccatcaccggttttcgcgatgcatccgcatcccagccttacgcgccgaacctgcccgccgggcacatcactgacgacacggagcaggcactcctcgtcgcagacctgctgatctgcggcgacgggacgattgaccccgcagcattggcgcacgccctccttgagtgggaggcggcaatgatcgcgcgcggctccctcgacctgctcggcccgtcaacgaaactcgccctcgaacaggtccgctcgggggcggaccccgcaacgactgggcgcacgggtacgaccaatggcgccgcaatgagggtcgcccccgtcggaatcgcgacctccacagcggatcgtgagtccttcacgatgcgcgtcctcgattcgtgccgcgtcacccactcgacgcatcagggcttcgagtcggcggcgctcgtcgcagcgacggtgtccctcggcatcgacggggcgggggtgcgcgacgccctgcgcggggcgctggaactcgtggcgtcactggaaccccaggggacgtggaccggcagggccagtgttgtcgccacgacgagggcggccctcgcccactcgtccacggcccgcgccgacgacatgagcgacgatgacttcctcgacctgctgcgcgcagaaatcgggacaagtgtcgaatcctcagagtcgatccccgcagcattcgccctcgccgaccgctactgtgacagacccttcgacgctctgctcggtgcggcgaatctcggaggggacacggacacgatcggagcgatcgcgggagccatcctcggcgcctgcatcggccccggcatcgcgggccccgacgcgaggacgctcatcgagggcgtcaacgggatcgacctatcggcgcccgtcgatgctctgctcgccctgcgccggactgcgcccgaggcgaagaaaggcgcagccgtgagccgatccggccgtccagtgagcgaaggggatcgtctgggccgcgtcatcctgctcgggcaggtcatcgtcgatctcgcgctgcgcctcgacgcgattccctcccccggctccgatgtcttcgccgaggatgcggggatgcacacgggcggcggtttcaacgctttgtatgcggcgacgcggatgggcgccaaaacggtgagcctctccggtgtcggagacagcggtttcgcccggatcatcaccgccgacctggaaagtatcggggtcgacgacgcggggccgcacctcaccggcattgactcaggctattgcgtggcgctcaccgacgcatcgggtgagcggactttcgtgtcgacccgcggtgcggagacccttgtccccgccgacgcgtgggccgccttcgcccgcacccgcatgcgcccttcggatgtcgtctatatcgacggctatgcactcgctcatcctgcgaatgttggggcgctgagagctgtcgccgcacaggaccttctcgccggtgcgcgcgtcattgtggacgtgtcgccaatggtggagtccgtcgatctcgctgacctgctcatgctcacccccttgcgccccctgtggtcaatgaatgagcgcgaagcgctaatcctcttgagccgcctcggcctcgacgcagcggcccgcactgagtcgaccgctcacggggagccgcgcccggcgctgtccgcgagtgcactcggcgagtgcttcgcctccgcggtgctggtgcgggcgggggcggcgggcgcgtggctgtggacccctggggagtcgtgcccgctgtacatcccgactccgacggtgagcgtcgtggatacgaatggcgcc

SEQ ID NO: 4352 - DNA, 23312 bp, synthetic construct
  variation 16643..16662: note = note, n is a, c, g, or t
  variation 14828..14847: note = note, n is a, c, g, or t
  variation 15297..15316: note = note, n is a, c, g, or t
  variation 15660..15679: note = note, n is a, c, g, or t
  source 1..23312: mol_type = other DNA
  variation 15064..15083: note = note, n is a, c, g, or t
  misc_feature 1..23312: note = Synthetic
  variation 16343..16362: note = note, n is a, c, g, or t
tccgggtgaagccgatattattttggccaagcatcgtaacggtgaaacgggaactattcgtgtgcttttccaggggcacatggctcgctttgcgaactttacttcgcgcgaagaacctgtgtagtttgaagagtcaggagggatatgtacgacttaaacgctttcacgcctgcacaagcggctgatccctctttacctgccgaactgatcgcccaacttgccgctgcacgccctgacctgcatgccgtgctcttggaaaaccccagcatgtacccgcagctgcgccagtggattattgatacgaatgctcagcgcgagccccaattcgtctatggctcgggagttgctgcgccaagtggagcatttccctcgccgcctcaagccgactacttctcaatcccccaaagcagccctgcgccgcagactcaggtctcgccgcagagcgaggcaccggtcccaggacagtacgcctcggcgcaggttcaggcgccggcctcggcagtgggggaagcggtggactggagttgggcacaaccgcgccaaagcgggccacttcaagacctcgaggcctttgcgaatggcaagcgcgttcgcgaacccggacagggaaggggcgggtccgctcttgcgtggggaattggggcgtttattgcgctctgcgcgggcgtgatcgctattgtttggagcggcgtactttgagcagaccgtccacgctgagcaaggccagtgcaacccagacgatgccggttgcaatccagcgcgtgggctccatgtgctcgtggaagatacacacgccaatgatcagctgaatgctgggcgagatgtactgcaagaaccccagaaggccaagaggtaggccctgcgaagctttggcgaaagtgagcagcgggatgacggtgaggattcccgaaccaatcagaagagccaggtgaagctgccaggacatggctccgtctcccaagcgagcaagcgcatggaacgatgttgcctggtgcgcggcaaggtagatgtagtaacccagaagaattgggatgactacggcagtttcgatcgtcattccatcgaggggacggaccttgagtgcgacctgtttcttcacaagggaatacaggccaaatgatgcgggtagggccagtgagatccacggcaggcgcccaaggccgacaatgatgaccgcaacagcgatcacacccaaaactaatgcgaccccctggaggcgcgagattttctcgcgcaggacgatcatgcccagggcaacggtcagcagggggttgatgtaatagccaagtgcggcgtcggtcgtgtgtccaatgagtaccgcgtatatataggtcgtccagttgatgacgaccaggaatcccgctgcgaccagaggccatgtgatcgaggggtcgtggacaatgcgccacactcgcggcagcgagcgggtcaaggccaaggtgatgaagcaggcaaggaaggcccacagtgcgcggtggacgatgatttcaagggaacctgcgggatcaagaaggtggaaatagagcgggaagaaaccccataagacatgggtaccaatacctagtgcaaggtacttaccgaagtgctcgtgttgtgtgggatgttcgctggccataaatgcagggtatcggtttgggtagggaagtgcccggtggtgaattgcttccgagatagtgagttccctgggctaccctgatgacatgttcatacgccccgccacttccgaggatctggatttcatcgagtctgcttttgaccaggcccgcgaattcatgcgggcgaacggtaacccgacgcagtggcccagcgattaccccaaccgcagtgatgcgctcagtgatattgaaagaggcgagtgcttccttgtttgtgatgaacaggggcctttggcagtgtttagtttcgctcgcgggccggaagaggagtattcccagattgatggtgcgtggcacttcgatgatgagtatggcgtgatccatcgccttgccagcgtccgaggccgtggggtcactcgcgtggtcatggacttttgcgcgggacaagtcccgtatttgcgctgcgatacgcaccttgataacggaccgatgcgtcgagcgctggaggcgtatggctttgagccgtgcgggatgatttcggtacgaggccagtgcccgcgaattgcctacgatgggttgttttctcaaatatcgaaatagtgtcgagtaattacttgctgaatcagctttcttcgttaggctgaggttgacctcaacgacggcgaggaggtgtggtggtggtgtctgattcgcagtccacgcgtggaatgcagcgagggcgcgtaaagcgctatttgcggtacgtgctgcgttttgtaggtgcagtggtgggattcctattcgcgatatgggtgtttattggaattatctcgttcccttacatcaatgatcccccgcgtgagggtggggatcttcctttggagaagcgtgtgtcgattgaggtgtttcagcgtgatgtggagccgcgcattctttccgcacgaaatgaaatttttagtggttctcagtcttttcgtcctgagactgagaagagcgaaattagtcgtctctacgatggatgggagctgtccagtcagagagtacgtgggggtacccaatccccagaccgcgttgaagaaattctcggccggtatctcgaaccccttgggtatgtatcgattgtgcatgatcaggagagtctggtttggcgtgacgaaaagaatggagggcgtgttgaaatcttaattagggatcagtcaatgacttttcaatatgacacccaagggcgtccttctgatggttctgtgcctgatccgcgggtgttgattcctaatgattctcgggatattgccggatacgtgagtcctagtcttcccagtattcgggtttttgatagggacgcgccttttttcccagagactgatggcagtgagttggagaaggaacgtcagtcggttgaggtgtttgagcgtgaggttgagccggggattttgagtttcagagacgaaattgttggtgattcaccgtattacgtggcacccagccccagtgagattacaaggtggggcagctccctcacttcagagtattggtttgagattgagagtcagcgtgttcagtgtggtccgcgtgatgtggggcgggttattgagatggggaatgctcatttgaatccgctgggctatgagttggtgtatgactatgccagttcaaaacctggggttggccactacctggcgtggaaggatgagaagaatggcgggattgtgacggttattcttcgccaggagaacacggagtttagttatgagagtggggctcgtccttctgatggttctgtgcccgacccgacggtgttgattcccaacgaccaccgcgacttaccagaccctcttgcgtagccgcggcctcggcctcggctattccctaataccgacgtggatggtgggaatatagactggtatggccagtgacgcaagaagctcctcaaggctactgcctaaaacccctagatctgcatactgcataccctgatgcgcctcacccggaagacgagagggaagatagcgcaaaacctcgtactgatcaccttcatagtccgtatacaatccggtttcgacgaagccgttgcgctgatagaaggccagtcgcctttcgcgctgatggaagttagaagcatcggtagtcattggctcgatttccaaagcaatggcaaaaccggggaaatgctccttcagctggtcaagaattcgtgttccatatccccgcgagcgaagcgcgggattcgtcgctaagaacacgacaaaaagcaaatcatctgagtgaatagtgaaagtcactccgcaaaagcccgagggttcttccggatcaaaatacgcagtgaaatcaatagaacgacgtagtgcaagtgcattcatcacccattcaggaatgagttcggcgggtggaaaggcctcggcaaggaggctacgaacctgcgggtagaagtgggaatgacggcggacgggcaaaatgataagagatgactcgcttgaactcacccttccatactaaatttcacccgtattggctgcctcatgacaattgtcatgtgaaacttcgtaaaaacgacactgttgtcgttgtccctcacaggcttgacttaaagcatgaacacggacactcaaaccacgaccccagtgatcctcgcgaaagacctggtgaagacctacgggaatgtgcacgcgctcaagggcatgaacctgcgcgttgattccggtgaaatcgttgctttccttggccgaaatggcgctggaaaaagcacaacaattgacatcattcttggccttcaacaagcagatagcggaagcgttgaagtttttggcatgagcgccaaagaagcaatccgccgcggattgatcggtgtcgttctccaatcgggttcacttcctggggactacagcgtcgcagaaatcctcaaactcttctcgcgcgtctacaagcgcaccgagtccattgacccccttgtcgaagaaacccaccttcgacaccttcttggccgcaaaatccgcaagctatccggtggtgagcagcaacgcgttcgcctagcaatggcactaattcctgacccagaactcatcattctcgacgaaccgaccgccggaatggacgtcaccatgcgcaaggagttctgggatctcatgagtacccaggcctcgaaaggtaagacgatccttttcgccactcactaccttgctgaggcgcaggactacgctcagcgtacggtcatcgtcaacgcgggccgcgtgagcgccgacgccccgaccgaagaaatccgccgagcgcactcgtcgacgcgccttgccttctctattccttcttcctctcttgagggtgtgcgcgctggactggccgcgcgtgcggctgagcttgggacagtgtgggagctttccgatattgccgaggtcgattcccccgattccgcccccgctgccttgggtgatggggacttggctgccgatcagtggctacgtgtggagttccacacgaccttttctgacgaggccgctcgacacatcgtcgccattccccaggcatgcgaattcgaggttgttttctcaagcctcgaggatgtcttcgccgagctcactcagtagaacgcagggcaccaagtcctgtctttcactttggccacctcgcacttcttctttaaggattcacaatgacgactcacactcacgcagcaacaaacccctggatcagccgccgagccctgagctcctggcagggctttgggcttctcacctggaagtcattcctgaagctggttctcaatcccgccatgttcgcctttgcgctgatccttccgatcttcatgtacatgatgtttggagcaggacaggagtactcgaaagagtgggcgatcaatgcaaatattggcgcaacggttttggtgtcaatgaccctgtacggcgtaatgatcgctgccgcatcggctgcaaccgttgtcgcacttgagcgaacctctggaatctccaggctttttgcactgtcccccgtcggttcgggcgccttcatcttttcccgtttgatcgcggcgatctccatgagtgccctggttattgtcattacctataccttcggatacgcgaccggagcacgaatgagacccgaggcctgggttgaaagtgggctcatcaccttggctgcgtcggtgatttccgcggcccttggtctggcgctggccttcctcatgcgctcagataccgccttcgcggtgattaatggtgtcgttgtcttgggtgctttccttgcgggaatgttcattccgatcagctccatggggtcgatatttaagacgctcgcgccctctagccccttctacggactcttcaacctctcgcagctgcccctgtacggtttcgataattttgaatggaaatgggtgatttccacggtcgcgtggcttattcccatggcactgcttgcgatctgggcacagcgcagggacactgatcgctaagacgcctgacgcaatcgggcgcgctcttgcactacttttaacgcaattactggggaaggacaggaatgagcaccaaaactcaggggacagatgcctcgtggtcacagcgccacccgcgcttgtccgcggtgttgtgggcactgccctacctggctttcttggcctttcccttggggatgattcctaccattgaatcccccgggatgatcgcgctgatcctcaccctgaccttttgggttgccgctgctgatattgcaatttacatcgtcaatccgacccccgaatggggagcgcgcatcaccaagaaaatgtggatctcgcacgggatcctgctggctctggtgattgcactgggactcgtcctggttgtcgccggcgcatcgcgagtcacctcggcccttttcatcacctactcgattgcaggctggaaccttcaagcccccaggaaatatgtggttcccggcctagtggcacttgttggctgggaagtcattgccatcttgctgcccattggcagtatcgacgcagtgaccttgagctatgcgatcatcgcgctgctgatggttttgggattaacccttgcagtgcgccgcagtttcgataatcgccactcagagcaacaacgtcaacgccaagcaatcagcctggttcgcgagcgcgagcgcctgcgttttgccggtgatcttcacgatattcttgggcactcgctgacggtcatcaccatgaagaatgagcttgcccagcgcttgctttccgtgggaaagattgccgaggccagtgagcaaattgcgcagaccctggagttatcccgccaggcaaaagaagatctgcgtgggattatcgccgcttcacgaagcttatccgccgaggaagaggtcgagtcggcccgtgaactatgcgagcaagcggggatcgaatttatcgctgacattcagggcgaaatcccacccggtcccagggcaactttggctgcacatgtcatccgagaggggactgccaacgcgattacccacgctcgtccctccacaatcagtgtccgcctgactcctgatgaggtcctggtggaaaacgacgggtattcacgcagctattcggaggcctcggcagggggaggagccggattggaaggactgcgtgagcgggcggcctcggaaggggagatgacctgggggagccaggggaatacgtggatactgcgcctgaccttccgcggggaatcctcctaagcggaagatagaattggctggtcaagtactggcgcgcaaaaggaatgccaatgattcacgtgattgtggccgatgatcaggccttgattcgtggtgccttgagcgcgcttattgacttggaagacgatatgcgcgtcgtcgctcaggccgctgatggtcgcgaggccatcgccgcagtcgaggcatataccgccgagaattcccgtggtgaagaggcttcgaaaagtgcctcgacactggtcgtcattatggacgtcgaaatgcccgtcatggatggaatcagtgcggccgcggccttgaaagagcgcggggcaaatgcgcgagtcctcatggtgacaacctttggccgtcccgggtacgtccagcgcgcattggatgcgggagccgttggattcgttgtcaaagacgcgccggccgagcagctcctggaagcaatccgacgaacctcccaaggactgcgcacggtcgatcctgcgctcgcggtcgatgcgctcacgaaaggtcaaagcccgctcagtgcgcgcgaagttgaagttctgcacgcttttgagagcggggggaccgtggaggatgtggcctcggagcttatgttgtcggcggggacggtgcgcaactacgtgagctcggcgatggataaaacccacgcgcgaacgagagctgaagcactcaaggtagcaacagaaaacgggtggttgtaaactgagattccatggtaaacagctatggacgtcgccaagagacgcaggaaaacgttactcgccacatcttcgtcaccggaggtgtggtttcttcattaggtaagggtttgaccgcttcctcgctggggcgtctgctgcgttcgcgcggtttgagcgtcgccatgcaaaagcttgatccctatatcaacgtcgatcccgggacgatgaaccccttccagcacggtgaggttttcgtcactgaagatggcgcagaaaccgacctcgatatcggccactacgagcgcttcttggacgtgaatctgtccggcgccgcgaacgcgaccaccggccaggtgtactccaccgttattgccaaggaacgccgcggcgaatacctgggtgacaccgtccaggtcatccctcacatcaccgatgaaatcaagcgcgttatgcgcgcccaggctgtgccggactctgagggcaatgcccctgatgtcatcatcaccgaaatcggtggcacggttggcgatatcgaatcacagcccttcttggaggctgcgcgtcaggtgcgcgccgacctgggccgcgacaatgttgcctttgtgcacgtggcactgatccccttccttcccgctgccggtgagctcaagaccaagccgacccagcactctgtggccgcgctgcgctctatcggtattcagcccgatgcgctggtgctgcgtacggatcgcccgctgcccgagggaattaagggcaaggttgcactcatgtgcgacgtcgaccgggatgctgtcatcgaatgtaaggatgcggcctcgatctacgaggtccccccgacactgcatcgcgagggcttggatgccttccttgtccagcgtcttggcctgactttccgcgacgtggactggagtgaatggaacgagctgcttgagcgcgttgaatcaccgaagtaccgcgttgaggttgcgctggtcggtaagtacattgacctgcacgacgcctacctctctgtttccgaggccgtgaagcacggtggttttgcgaataatgctcgcgttgacctgcgttgggttgcctccgacacctgtgaaacccccgagggtgcgcaaaaggctctgggtggcgttgatgcgatcatcgttcccggcggttttggtatccgaggcattgaaggcaagttgggtgcgctgcgttgggcgcgcgagcacaagatcccaaccttgggattgtgcttgggcctgcaatgcatggtgatcgaggccgctcgtgatctgctgggcttgactggagcttcctcgacggaaatggatcccgagacgccggatccggttgttcacaccatggattcgcaggtcgacattgttgagggcgatggtgatctgggtggaaccatgcgactgggcgcataccccgcggtccttcaggaaggttctattgttgccgaggcctatgggaagacccaggtttcggagcgtcaccgtcaccgctttgaagtgaacaatgattaccgcgatcagctggaatcggttggtctgcacatctcgggtacctcacccgatggaaacctggtcgagtttgttgaactggatcgttccttgcacccctactacgtggcaactcaggcgcaccccgagttcaagtcgcgtccgacgaaggctcacccgctattcgcgggtctggttcgcgccgcacttgcgcgtcacgcagagaactacgctgcgcgcggcgggcgtaagtaaggacggttgaggtttggggtcggtgaaataaccggctctatcacgccgatctcacggggtcttgagctgttgtgactcagggccccgtgggctatttctggggaagtatgcgttgtttcaaaaagtgcttgcgtgaagtgctgatcagggcttatagttgtgccaactgattctcaataaggcgtcgacaggttagcgacgctgattgctccaccggcctgcgggccggtatttttttgcccgcgatgctcgtggttgaccaggttaacatggctttaaaattgctgaaaaatacctgcagaaactgtacgaaagtgcttattgtctgtggcatgatttcaccatgacaaagattaacgatgatcttcggtatcgtgtcggcattgacgtcggcttgaaatcaattggtttttgcgcggtggaagtcgatgaaaacgaccagccacttcgactgctgaattcaatggtgttcgttcatgacgccggtgtagatccaaatgaaaataaggcggcaaagagccgtaaactcaccgcgggtgtcgctcgacgtactcagcgcggaaccgctcagaataggcgccgacttgctgaactcgatcgcgctttgtcagaggaattaaattggcccttgccaaaccttgaggactttgaggattcctacgagccatggcatactcgagctgagctggttgagcactatatcaaggacgatgctgaacgggctgaagccttggcgatcgccattcgtcatattgcaaggcacaggggatggcgcaatccttatttaagcgttgattctcttcttactcctcaagaacccagcaaatttcttcgaggtttgaatgagcgcgttactcaagcgcttgggcgcgaatttcccgccgacgcgactcctggtcagctgatctgcgcgtatatcgatagtccgaaatacgccgaaactcaaggaatccgcggagattccggcatcctgagtggaaagctccatcagtttgataacgtgggcgaaattcgaaagatttgcgaagttcaacgcctggaccacgatgtcttcaagctcttggtccgcaaagttttcttcgccaagtcgcccaggggtagtgccgcgggacttgtcggacatgaccagatccccggtcagggtaaatacattcgtgcagagaaagcgcaccctgatttccagttgttcagaattgttgcggtgctgacgaatcttcgaattcgtgagggtaaagcagagcgttgcttgactcctgatgaactgcgtgggttggtggattacattctcgaagtgcagttaaagcagcaggtgacctgggcggatcttgcggacaacttgggaattgagcgcactgacctgcgcggaacggcgcgagcatcctttgatggttcacccgcattgcgcttccctcccactgatgtcacagcagaaaagatcatggcatcgaaggtcaagtggctcaaagactggtgggataaggctgatagtgaacgacgtgggttcatggttgatgcgttgtcgaattcgggtggctccacgggggataacgacattgatgatgaagttgcagcgcttcttgaggcagcaacggaagacgaacaggctgaactggaaaagatccagcttccgcaggggcgtgcagcctattccttggatagccttcgtcgattgacgaagcggatgcttgaggaaggggttgatctacataccgcgcgcaaggaagagttcaacgtcgatgatgattggcggcctgagccggagccgatcgaggcgccggtaggaaaccccgctgtcgaccgtgttcttaaacaggttgcacgttggttgaatatggccacggatcgttggggtgttcccgatgtcatcaatattgagcacacgcgtgatggtttgggttcagagaaggtcgcgcgagaactcttgcgtgagagccagaaacggcaagatctcaaccagaaggatatggataaaatgatccgagaactggggatctcaggtaaggctcgtcgttcttctttgattaagtaccaggctattcagcgtcagaattcgatgtgcttgtactgcggtaccgagatcggttttgaaactgcagagatggaccatattgttcctcgagctctgtccggatcaaccaatgatcgatcgaatcttgctgcggtctgccgtgcctgtaaccaccaaaagggtgcggtgccctttgctgtatgggcgacgtccggggaggcgcatgcgggtgtatcgctagaagatgcaatcaaacgggttcgattgtggcaaaagggccccggaatgagtcccaagcagcataaggccttccaaaatgaagtgatttcacgactcaagtcgcgcaagccagatgaagaatttgatggtcgttcaatggagtccgttgcatggatggcagttgaattgcggacgcgcatcgatgggtattacaggaaagtcaattcagactctgtgcccaaggttggaatctacagaggccagttgacggcggaagcacgtaaggcctcgggattcgaaaacagggtcaacctgattggtggaaagggaaagacgcgttttgatcgcagacaccatgcgatggatgccctggtaattgcgatgatgaaccagtctgtttcccaaaccctggcattgcgcgtcaatatgcgggagtcgcagcgcatcaccggacaggaagaaacctggaagaacttctatgggaagccgggtcaagccagtgagcgttttgaaaagtggcgtgaaggaatgctccgggcggtagaacttttcaatattgagcttgcgaagaatgccattcctttccatgagaatgtccgtttgcgcgttggttcaagtaaggttcacgacgatacggttcgtaagttcattcatgcaaagctgggtgaagctctgtctgttgcgatgatcgattgtgcggaaactcccgcgttgtggactgcgctgaccaggcttccagactttgatccgaaggatgggcttcctgaagatctatcgcgggaaatctatattcacagtcggaagatcactgcggatgagcaactgaacttcttcaattcgccgtctgcctgtttgaaggttcgtggcggctacgtggagattggaagctcaattcaccacgctcgggtctacaggatcgatgggaagaagacaacgtattccatggtgcgcgtttttgcgacggacctggtgaagatgactcacgaggatgtcttcaccacgccgctgaaaccatcgacgatttccatgcgaacggccgacccgaagattcggaaggcactggctgatgggaccgccacccagatcgggtggctagttgaaggtgatgagctgcagcttgagacggataagtactctggcggcctcatcggcgaggtccttgctgaatacccgcaactgacgagttggcgggttgcgggtttctacggtgtgacgcagttacgactacgcccttacatgctggctgcagaagggattccatctgacgcctcagagagcttgagaaaagttattgaggggaaaggctggcttcctgcaattaatgccctgcttagtagtggctgcgtaaaggttgttcgacgaaattgtctcggggaacctcgttttaacgcaaaatcttcacttccggtcagtcaattactgaggtagatcatgacagaacagtggcgtgtgattgacctctgtgaatttgagggaacgcttcattccacacgaggtgggatcgaggtgtgccctgaaggtaaggaaccggttactcttcctgttgcagagcttgcggtagtccttatcggaatgaaggtcgatctcagcgccgctgttctgcaccgtctagcggaggcagatgtagcagttctcttctgtgattggcgtggaattcctgaaggggcctgttattcgtggtcgaatcatgggcgagtggcggctcgtcatcgagcgcaggcagacatgactcttcctcgaaagaagaatgcttgggcacgaatcatcagagcgaaaattgagggacaagctaatgtccttcagaatcttggtcgttcgggcagcagtgagctctttgcgctcgcggaccaagttcgctcaggcgatccggaaaacgttgaggctcatgcagcgcgtttttactggtcacgagtattgaaagatggcaggcaaccgggtgcaggacaactcattggttcaaatgcgtgtcttgactatggatatgcggttctccgaggacaccttattcgggcaattctttccgcgggtttagctccagcaatgggggtattccatcggggaaggggaaatgcttttgccctcgcggatgatctgattgagccgtttcggcctgcgattgatgaggttgctttacagttctcgccaactgcatcaccttcagatagtggtgtgaaaagactgctagttgccgctgcatcgcagaaatttgatagtgacgggtacgggataccagcagtagcgcaaggtctggcgcagcaatacgggcgttacgttgaaggggatgaggatcgtcttcgcgttttagcgtggcaggggccagcttcagtcgatgtgagtggctgaaatggttgatggtccaatgtggtgcctggtcatgttcgatttgccggttgaaacaaaagatcaacggcgagaggctactcgcttcaggcaaaacttgcttgactggggttttagcatggtccagttttctgtctatgtaaagtattggccgaccggcggacagaatcatgcgactcttcggcagattcaatctcatcttccagagggtggtcaagtgcgagttattggaattacggatcgccagtgggcgacagggcttcattttgaacaagcaaagaaaaagaaaacggaaggggctcctgagcaactcactatcttctgaattaaaatcactgctcttgatagacttcagcgggcttgatcgagacggcgacgggttttgggaatcagttaccaatcctcttgataagctttgcccgcgatctggctattgaccaggtccgttgggaatcggttaccaatcctcttgataagctttgcccgcgatctggctattgaccaggtccgttgggaatcggttaccaatcctcttgataagctttagcgctggcatatcataaggaacttcaagttgggaatcagttaccaatcctcttgatannnnnnnnnnnnnnnnnnnnaatcagttaccaatcctcttgataagctttcacgatgacatctgcgcagtgattcgtttttgggaatcagttaccaatcctcttgataagctttccgacagtacgtgcccgcctcggacggttttgggaatcagttaccaatcctcttgataagctttgtccggcgtgcgggtcttcgggccgtgcgttgggaatcagttaccaatcctcttgatannnnnnnnnnnnnnnnnnnnaatcagttaccaatcctcttgataagctttcgtgcgggccgctctctcgtaagaggattttgggaatcagttaccaatcctcttgataagcttttttcccttgaggcagtagcgaaaaaacttttgggaatcagttaccaatcctcttgataagctttttgcgcggcaaaatcgcgagtttgccgggttgggaatcagttaccaatcctcttgnnnnnnnnnnnnnnnnnnnnaatcagttaccaatcctcttgataagcttttctcagacctggtcgcacagatcgagattttggtaatcagttaccaatcctcttgataagcttttggaaaacgcggtccaccactccgcccttttgggaatcagttaccaatcctcttgataagctttccgacgcctgcttggatgatctgcgggttttgggaatcagttaccaatcctcttgataagctttctcgagtcgagaaggattacctcgaacttttgggaatcagttaccaatcctcttgataagctttcccttcttatcctggccaccgagtaggagttgggaatcagttaccaatcctcttgatnnnnnnnnnnnnnnnnnnnnatcagttaccaatcctcttgataagctttgcggtgagcgcggcaagcgccttgaacttttgggaatcagttaccaatcctcttgataagctttgatccatgatgcggcgatcgcaccgcattttgggaatcagttaccaatcctcttgataagctttcgcgaacggatcgaagctctcacagttttttggtaatcagttaccaatcctcttgataagctttaggagcccgatgaaggcgcagatctgtttttgggaatcagttaccaatcctcttgataagctttaaaccgatgtctaagggcgtgcattgtttttgggaatcagttaccaatcctcttgataagctttcctcaaagcgtaacgatccgcccagccttttgggaatcagttaccaatcctcttgataagctttgcacctggtttaagggcacgctttcgcttttgggaatcagttaccaatcctcttgataagctttttcactgtctggtgagcactgcgacgcttttgggaatcagttaccaatcctcttgataagctttgcataagacacccaagcgcgttaaacgttttgggaatcagttaccaatcctcttgataagctttggttaatcccgcgcgtgccgcttggatcgttgggaatcagttaccaatcctcttgatannnnnnnnnnnnnnnnnnnnaatcagttaccaatcctcttgataagctttggcgacagtgccagtgaggtgcagcggttttgggaatcagttaccaatcctcttgataagcttttcatcgacagtgagaatggctccgaggttttgggaatcagttaccaatcctcttgataagctttccgtgtaaaagccctctgtcgtccatattttgggaatcagttaccaatcctcttgataagctttaccgaatttgaaggatacatccgagctggttgggaatcagttaccaatcctcttgatannnnnnnnnnnnnnnnnnnncagttaccaatcctcttgataagctttatccgagacgtggaagtagagcgcgcgttttggtaatcagttaccaatcctcttgataagctttagaggattggtttttccttggaatagcaaggttttctgggcttcgaacgattcaaattcggagcccagaacgctattttcggcatttttcggggtctacaaaagaaaaactgaaagccgaacaagccctcacgctacgaccgatcagctccaataaccgtatttccaggcacgaagattggatcaagcaaggtcaatccgtgcacggggcgacggatcttggcctcgacattttccgcagggacagtctcatgtccctcaatatcggtatctgcgtccgcttccttcctgggttccccatcgatctgggcaaccagcatctcaaccgctcgtctcaaaagctcatccggccgggtatcaaaatgatcgacatcgaaaaggcagtgggctcgctccgcatgccatccgctggcaaccagcgagacatcgcgccccggtctaattcccaaatccatcagcgcattgcaccagtcatcagcggaaatcgttggccccagaatgtaggaatcaacccgtccctcgccggcaatttggccgaccaagtggcgaattgcctgaattccagtcccgcaggtgcgtgacagaaggggaatccccagctcgccggcagtatccacaaccgcctgcttaaactgcgcgacgaagttcaaggactgcacatctgcgctggccgagtgtacgaaagcaacattccgcgcccccgcatcccgaatgcggtgcactgcctgggtgccggcctcgtaatagtccacgtcaatggactggatcggtgacctaaagggtccaggcccgggagtgccaacgaaaaccgtgggaatctttccctcggccacgacctctaggcgggggtcattgaagcgaacttccatgatgaacagaccatcacacagcgcagtcgtcatgacacggcgcagcccagccgccccctcgttcgcggtgatcaaaagcagatcaaaatcatgttcgcgcaagagctgtgccagtgagatcagcatgtagtgctggtccgccccatccgcaccctcgtggtaggggatgacaactcccagtactcgcgacttgcgtgagcgcagtgaacgagcacccgcatgaggctggtaacccagttccttcattgcaatttggacacgtttttccgtctccggagacactgtccgtctgccgctcatgacgtaggagaccgtggtttgtgagactcccgccagttttgcgacatctctactggttggctggcgtgccatcagttcctcctgctctcttgacaggaacgcttttacaacttatcttgagtttcacatcacacgcgagcagcgatgctcgcaaaaaatttttacatgacgaatacgtatgcgtaatggatattaccagaaaatctcctgcatagaagcatggagcgaatacgtattcgtacacttcgctaaggagtcataggtgtatacgaagaaggagtacccgggcgcagtcgaactctcctatgcgcacgagttcatccgcattgaggcctggggtcgcaatgcacttcgcgtgcgcataggccccaatgcgaacttcccccagggactgggcgcgctcgaggccgcaccccttagtggcctcggcgcgacctctggagcatccgcggacccgcttgccctggcttcggcagaggctaccgggaatgaaccttgctctgtcagtgaaatccccggctacgaccgccccgaagaagtcttttccaatggacgaatcagcgtggtcgcaaaccttgacggcggaaccggaattgcccgattccttctggacttccaaaaggacggcgaatccatcctgcgtgaagcccccgaacacttctggtggccgggcgcccacggaatctacccgggcttcggtggccacgaagtgcaccaatgctttgcctcggaccccgccgagcgcttctacggaatgggccagcactcctacgacttccttgaccacaagggtgtcgtctctgatctggtccagcgaaacggcgaagtttccatcccctttgtcctctcagacaagggctatggattcctgtggaacaaccccagcgttggccgcgtggaattcgccaaagaagccacacgctgggtcgcgcaggcaagcgaatggatcgactactgggtgtgcgtaggagacactcccaaggaaatcctccagtcctatgctgacgcggtgggccacgcaccccgaattccccagtgggcactgggcctgtggcaatccaaactgcgctacaccagccaaaatgaacttatggaagtcgcccgcgaataccaccgccgaggccttcccctctctgtcatcgtgactgacttcatccactggccggccatgggggagtggcgctttgacccgagcgaataccccgatcccgaagcgatgatggctgaactggaagagatgggcaccaagctcatggtttccgtgtggcccacggtctcaccccttgccgaaaccgacgcggaaattcgcgcaaaaggtctattggtcgggaccgaggccggagttgaataccaccaaaccttccgcgataagggaatggatcgcccgcttcccgtcgccttctatgaccccacgaatcctgccgcacgcgactacgtgtggaacaagctcaagaacaactacttcgatctgggtgtgcgcgtgttctggctggatgcctgcgagcccgagcttaatcccggtcatccctcgaacctgcgtttttatgcgggaaagggcctgaacgtctcgaacctctacccgcgcgagaatgcccgcatgatctgggaaggcatgcgtgaacagggcgaagacgaattccttaccctgtgtcgcagtgcttgggcaggacaggcaaaatacggcgccgccgtgtggagtggagatatcggccccacctgggaggccctctacacgcaggtccgtgccggacaatccattggaatcgcaggaatcccctggtggaccagtgatatcggaggcttccacggaggcgacgccagcgatcccgcatatcaggaactcttcgctcgctggttcgaattcggaaccttctgcccactcatgcgcgttcacggacatcgcgaaccccgcgaagacgtggcctcggaaaaccccggcggccccaacgaaatctggtcctacggcgaggaagttgcggatatctgctcccgctacatcctcctgcgcgaaaccctgcgcccctacctcactcgcgtgatggacgaggccagcgagcgcggaatccccgccatgcgcgccctcttcctcgaattccccgaggacgggcgctgttggagctgggacggggagttcctcttgggtcccgacctcttggtttccccgattaccgaggccggctcccgcactgcccgcgtctaccttccccgaggtgcgcggtggcgccaacttctcatcgccccaagccgcggtgatgaggatcaagaggccacggcctcgtacatgcttggtgagactttcgaaggcggaagtgaactcaccatagatgcaccactggagtgcatcccattattcatccgtgaaaacacggatctagatagttggttgacggacaactatcgacactcaaaggagagaaagaatggcatacgcatctaagcgcgcaatgcgcgggattgccttcttcggtgccggagttatggcactgggactggcagcatgctccgggacgaagacggattcggccgactccggcagcgcatccggcggtcaagtgaccgttgagatgtgggactacctgagcggtgaaaccgccaatgactcgatcaatgcagcgatcgctgagttcgagaaggccaaccccgacatcaaggtcaagcgcaccacctttgcgtttgcagacctgtccaagtccatccttcagggctcggtcggcggccaggttcccgatgtcgcagtcgtcgacgttgtcgacaaccagaacttcgcatccctgggaatgctcaaggatctgagcaacgacgggatcaacaagtctgacttcttcgaaggcccctggtcctcggtcgtttacgagggcaagacctacggcattccgctgaactccaacaacctggctctgtactacaacaagcagatgctcaaggatgcaggcgttgaggttccgaccgactgggcatccctcaaggaggtcgcaaagaagaccaccaagggtgatgtgaagggcatcgcgatctcggccgtgaagtccgagtccgctaccttccagattctgcccttcgtgtggcagaccggcggtgacctgaaggattacgccacctctggcgcaaccgctctggcctacctgcgtggtctgatcgacgacggttccatgtccgaggccgtttcgaactacacccaggaagacgcacgtacccagttcatcaccggcaagtccgccatgatgatcaatggcccctgggagctggcaaccctgaccaaggacgcccagtttgactgggatgttgcgcctctgcccaaggacaagcgtgctgcaacctcgatgggtggcgaaaacgttgtcgtcatgaacggtgccaagcagtctgatgcagcagttaagctcgcaaagttcctgaccagcgcagaaggcgccaagatctactgcgatggctccggccagctgtcctctcgccccgacctgcagggcaagctcaagctctcgaacgatgcaaagctcaaggtcttcgaaagccagcttgctgacgcacacgcacgtgcatacggcaaggattacccgaagatttctgaggccatccagctgtccatgcaggaagctctgacgggcgcatcgacccccgaggccgcagcaaagaaggccgcggactcaatcaaccccttgctgcccaagaactgagtagcgcaagaaaccggtttgcttggggcgatcgcgcctaggcaaccaacacacacataaagttccccgcgcgagtgggaacgcaacgatgagcaacggcttgaagccgcagcgaatctcccgctcgcgtggggaaacatccctgttttggtgctggcaggccactgagcccgccaggccacaacagtattcccacacaaacttcggatctgtgagtgaatttcgatggcgcgaacgaaaacagcgggccacgacgacggatcacgttctttggcgcgaacacggcgcctaggactgcttctggcgttacccgcactgatttacataacgatttttcttgttgtccccctgatctataacatctggctgtccatctctgacgcgaacggcgcaaacctcatttcgggtaactatcaccccacgggcctggcgaactatgaagcgatggtgaagagcccaggcttctggaatggcgtgaagctctccatcatctggacagttgcctcacttgccctgcaattccttgttggttacgcgctggccttgttcttccgcaaacctttcccgggtaatggcatcattcgcgcgctcctattggtcgcgtggatccttcccgctgttgtcacgggcacgatcttccgctggatgttcgactctgacttcggcgtgatcaactacttcttgacgaccctgcacattgttgaccacccggtgatgtggctgaccggcccaacaaccgcaatgattgcaatcgtcgttgcaaacctgtgggttggcatgcccttcaatatgctgctgatcctttcgggccttcacaccatcgatgacggcctgtacgaggccgcagaggtcgacggtgctggcccgattcgtaccttcttctccatcaccgaacctctcatgcgccccgtggtgatttcactgctcttgcttggcgtcatcaatacctacaaggtcttcgacctgatctacacgatgaccaagggtggtcctgttgaggcgaccacaaccctgccgatcttcacctacctgcaaaccttcaaggtttttgacttcggtaatggtgctgcggcttcaatgctgaccatggttttgccgctggctctgtcgtggttctacgttcgttcgctggataaggaggaccagtgatgtctgaaaagaccgctgaagttcaagaaaaagtccagaccgtgacggacgaaagtgcacccaagggcggagcgctttccgcggcctcgggagcaaagggcttagcgaagacgaagcgcgaaaagcgcgagggacgcgtccggattgggaaatccgcatttgcgtgggtcatggcaattttctacctgttccccgtctactggatggtgtgtacggccttcaagacgcagatggaaacctttgcgcagcccccgcacctgattccgcaaaacccaaccctggcctcgttcagggtcgctttcagcgataacttcgggatctggaaggcgctggggaattcggcgatcatcgcagccggatgtttggtgctgacgctgcttttcgcaattcccgctgcttacgcaattgcgcgaatgagaagcacaatcacaacgggcatgttgatcttgctcagcgtcgtccagctgcttcccgcgatcgcaatctctattccgatgttcgtgcttttccgtcacgctggaatggtcaacacccttccctcgatcatcttggcggatgtgacgggaac

SEQ ID NO: 4353 - DNA, 23312 bp, synthetic construct
  misc_feature 1..23312: note = Synthetic
  source 1..23312: mol_type = other DNA
gaacttcaaaggcaaggggatctgtccagggtcggcggggcctcgtacatccacagcctgatcgcatcggttcctaccgcagcaaacgcgggctactacgcgcgaatcgtgaaagagcgcgcgatcttgcgtcgcctcgtcactgcgggcacgcgagtcgtccaactcggttacgcggacgctggcggcgatgtcgatgaaatcgtcgacaaagcccaggcggagatcttcgccgtcgcagaacgccaagcgcaaaccgactatgtgtcgatggccgatatgtccgaaaacatcctcaccgagctcgaaaagatcgaacttaaccagggtaaggtcgccggcgtccccaccggattcgtcgaccttgatcgaatgaccggtggtctgcgaggcgggcagatgattattgtcgcggcgcgtcctgcgatgggtaagtccacgctggcacttgatttttgccgctccgcctccatcaagcacgacatcacatcggtcatcttctcgctggaaatgtcccaaaacgacatcgccatgcgtatgctctccgccgagtcctcggtcttcatgagcaagatgatgaagggcgagatgaccgaacgcgattggcgcaaggtttcggaaacgaccgggaagatctctgaagccccgatcttcgtcgacgactcagcgaatgtcaccatgaccgagattcgctcgaaatgctaccgactcaagcagcagcacaatctgggcttggtcgtcgtggactacctccagctcatgacaacgggcaagcaggtcgaatcacgtcagcaggaagtttctgtcctgtcgcgaaacctcaagctattggcaaaagacctcgatgtcccggtcatcgctgtcgcgcagctgaaccgcggtcccgaagcgcgaaccgataagaagccgatgatgagtgacctgcgtgaatcgggttcacttgagcaagacgcagacatcatcatcctcttgcaccggcccgaatactacaatcccgaggatcgtccgggcgaagccgacattatcttggcgaagcaccgtaacggtgaaaccggaacaattcgcgtcctcttccaaggacacatggcgcgctttgcgaacttcacctctcgcgaggaacccgcctaatgtacgacctcaattcgatcacccccgcccaagctcaagaccccacgatgccgcccgaactcatggcgcaactcgcggccgagcgccctgaccttcgtcggcatctgctgaaaaatcccagcttgtatccgcaattgcgccagtggatccttgactcctctgggggaacgctcgaaccgcagattcagtacacctcgagcatgccgattggcccgagcgcttccgaaatgggtatgcccccggccatggggacaccgatcatcgattacggcgtccaggcagcgccaacagcaccgcagcagcttcagccacctcagtctgaacctgcccaaaccacagcgtcgcagtacgctccaacgccgattcccaccacggcctcgtcaggtgaagccgtggattggagctggcgggaaacggcgaatagcggtccactcagcgacctcgaggccttcgcaaacggaatgcgctcgcgtaagtctcgcggggaaaagagcgtgcgaaaccgcgtgatcgcggggatcgtggtggcgattatcgtcgcggtgggcgtcgttattgcctggcgcgtcgcattctgatcacgccgtcgacactgagcagagcaagagcgacccagacaattccggtcgcaatccagcgcgtcggctccatgtactcgtggaagatgcacacgccaataaccagctggatgctgggggaaatgtactgaagaaagcccaagagacccagtgggagtccctgcgatgccttggcgaatgtgatgagcggaatgacggtcaggattcccgctccgatgagcattgccaggtgaagctgccaggacatcgcaccatcgccggcacgctgaagggtatggaatgacgtcgattggtgggcaacaaggtaggcgtaataaatccctaaaatcgggatgacgaccgcggtttcaatggccattccatcgaggggagcaaccttgagtgcgaccttctttttcaccagtgagtacaggccgaaggatgcgggaagtgcgagcgaaatccacgggagccggccgagccccacgatgatgacaatcactgcaagaatgcctaggccaagagcaacgccttgaaggcgcgagattctctcgtggagaacgaccatccccagggcgaccgtgaagaggggattgatgtaatagccgagcgcggcatcggtcgtgtggccgatgaggatcgcgtaaatataggtggtccagttgatgacaaccaagaaacctgcagcggcaagtggcgccatgagcgcgggggttcggatcacgcgccacattctgggcagggagcgagtcagtgccagtgcaatcaagcaggcgatgaaggcccacagcgctcggtgaacgatgatttccagcgagccggccggttcaagaaggtggaagtacagcggaaaaaatccccacatgacgtgagtgccgatacctaaagcaaggtattttccgaagtgctcgtttcgtgtgggatgttcgctggccataggtgcagcgtaacggtttggatgaatgggtgcccggtggcgaagggggaattcgtgtgtgagctaccctgatggcatgttcatacgccccgccactactaatgatgtggattttatcgagtctgcttttgaccacgcccgcgaattcatgcgggcgaacggtaatccgacgcagtggcccagcgattaccccaaccgcagtgatgcactcagtgatattgaaaaaggcgagtgcttccttgtttgtgatgaacaggggcctttggcggtgtttagtttcgctcgcgggccggaagaggagtattcccagattgatggtgcgtggcacttcgatgatgagtatggcgtgatccatcgccttgccagcgtccgaggccgtggggtcactcgcgtggtcatggacttttgcgcgggacaagtcccgtatttgcgctgcgatacgcatcttgacaatgcgccgatgcgccgagcgctggaggcttatggctttgagccgtgcgggatgatttcggtacgaggccagtgcccgcgaattgcctacgatgggttgttttctcaactatcgaaatagtgacgagtaattacttgctgaatcagctttcttcgttaggctgaggttgccctcaacgacggcgaggaggtgtggtggtgtctgacccgacggtgttgattcccaacgaccaccgcgacctaccagaccctctcgcatagctgcggcctcggcctcggctattccctcatgccgacgtggatggtggggatgaagaccggcatggtcaaagacgaaaggagctcctcaagggctccacacaatacgcctaaatccttgtagcgctgcgctgttgcaccttcgtcgggaagcagcgcgggtaggtagagcaagatctcgtagttctcgtcctcataattcgtaaacaacccagtctcatcgaagccattgcgctgatagaaagccagtcgcctctcgcgctggtgaaaattctcggcatcgcgaagcatcggttcaatttccagcgcaatcgcgtgttcggggtagtgctccttgagttgggacaggatgcgcgaaccataccccttggaacgtgcggaacggtccgttgccaggaagatgacaaagagtagatcttcagagtgaatcgtgagggtaatcccgcaaaaactcgatttttgagcgggatcaaagtaagccagaaaatcaatggaacgacgcagtgcgaaggtgttgagtacccattcaggcacgagttcagaagaggggaaagcctcggtgagtagcgcgcgaacttgaggatagaagtgtgaaaaacggcggacggggagagtaattaaatgggaatcgcaagaactcaccccttaatagtagaagaagcctcataaagatctcatgacaagtgtcatgtgaaacttcgttcaaacgccactgttgccctttgcgcctcgatggttgactagaggcatgaacacaaacacggatcactcaaccacaccggcgatcttcgccgaaggcctcgtcaaaacctacgggcaggttcaggccctcaaaggaatcaacatgcgcgtcgattccggcgaaatcgtcgcattcttgggccgcaatggcgcaggaaagagcacgacgatcgacattatcttgggcctgcaagaggccaatggcggcacggtcgaagttttcggcatgagcgccaaggaagcgattcgtcgccgccttgtgggagtcgtgctgcaaaccggcgcactgcccaatgactacaccgttgccgaactcctcaagctcttcgcccgcgtctacaagcgcgaagaatccatcgaccccatcgttgacgagacctacctccgacacctcctcgcgcgcaagattcgcaagctctccggcggcgagcagcagcgcgtccgcctcgcacttgccctcctgcccgaccctgaactcatcatcctcgacgagccgaccgccggtatggacgccaccatgcgcaaggagttctgggagctcatgagcgcccaggcctcgaaaggcaagacgatcctcttcgccacccactacctggccgaggcgcaggactacgccgagcgcaccatcatcgtcaacgccggcgagatcaccgccgacgccccgaccgaggaaatccgccgcgcccactcgacaacgcgccttgccttctctgttccccgtgcgcgcctgggcgaggtccgcgcctccttggctgctcgcgccgaagaattgggaacgacgtgggagctgagcgaaattgccgaggccaaggtccgccagtccgataccgaaagttccgcgagggagggcggcaccgatgagcagtggctgcgcgtagagttccgcacgaccttctccgatgaggcagcgcgctttgtcattggccttgagaatgcacgcgagtttgaggttgtcttctccagcctcgaggacgttttctcggagctcacccagtaaagaagcgggcagtacgtcggtgcccgactagccgcggtatccgacgagcctcgcgcacatttccccacagctttttacgtatataaggattcaaaatgacaacgcacactcacgcagaaaccaacccctggagcaaacgcaccgcagttagctcatgggaaggaatcgggatgctcacctggaaggctttcctcaaactggtggcaaacccggccatgtttggtttcgcactgattctgccgatcttcctctacatgatgttcggtgccggacaggaatactcgaaggagtgggcggtcaacgccaatgtcggtgcaactgtcctagtctccatgaccctctacggcgtgatgatcgccggggcatcagctgcaacggtcgtcgccctggagcgcacgtccggaacatctcgcctcttcgcgcttactcccgtgagctccggagccttcatcttctcccgcctggtcgcagcaatctccatgagcgccgtcgtcattgctatcacctacggcgtgggttatgcgactggagcgcgcatgactcccgcagcctggatccaaagcgccctgattgtcctggctgcggccatgatgtcagcaacgctgggtctggcactgggattcctcctgcgttcggatacctccttcgcagtgatcaacggcgtcgttgtcctgggcgcattccttgccggaatgttcatcccgattgattccatgggaagcttcttcaagagcatcgcgccgggaagccccttctacggaatcttctacctctcgcaactacccctgtacggtttcgattccttcaagtggacctgggtaatttctgcagcggcctggttcattccctttgtcgtgcttgcagtttgggcgcagcacagggacactgatcgctgacagactcacgtgccacaggaagaattccaggaaatagccgggagagggaagagcatggataccaccacagccaaagcatcgtggacacggcgccacccgcgcttgtccgcagtgttgtgggcacttccctacctggctttcctggcattccccctggtcatggtcccgagtgtcgaatctttcggcatgacggtagtgatcctggccctcactcttgcagtcgcagtcgccgatatcgcgatctacgtcgtgaacccaacccccgaatggggagcacacatcaagaagcagatgtggatctcgcacgggatcttgctggttttggtggttgcgctggggctagttctggtcgcagccggcgcatcgcgagtgacctcggcacttttcatcacctactcaattgcgggctggaaccttcaagcacctcggaattacgtggtccccggcctggtggcgctcgtcggctgggaagtgatcgccatcttgctgcccattggcagcattgacgcactggccttgagctacgcgatcatcgccctgctcatggttttgggcttaaccctggccgtgcgtcgcagtttcgacaaccgccactcagaggaacaacgccaacgtcaagcaatcagtctggtccgcgaacgcgaacgcctgcgtttcgccggagatctacacgatatcctcggccactcgctgaccgtcatcaccatgaagaacgaactcacccagcgcctgctttccgttggaaagattgacgaggccggtgaacagattgcgcagaccctggagttatcccgccaagcgaaagaagacttgcgggggatcattgcggcctcgcgcagtttgtccccggaagaagaagtgaatttggcacgcgaactgtgcgagcaagcggggattgaattcaccgccgatatccgaggcgacattccacccggccctcgcgcctcccttgctgctcacatcatccgtgagggaactgccaacgctattacccacgcccaccccgagagcatccgcgtgcgcctgactcccactgaggtcctcgtacgaaacgacggatactcgcagaagtactccttggcctcgcgaggtgggggaacgggacttgagggactacgtgagcgcgcggcctcggaaggggatgtgacctgggggagtgaagggagcacctgggagctgcgcttggcttttaagggcgaggcgctctgagctgcgtgtacgattgacgagtcaagtactcgcgcttcgaaggacgccgcatgattcacgtgattgtggtcgacgaccaggccctgatccgtggtgccttgagtgcgctcattgacctcgaggacgacatggaagttgtcgctcaggtgggtaatgggcacgaggccttggctgcaatcgaggcccacacgagcgcacatccgggcagcgaggtcccgctggtcgtgatcatggacgtggaaatgcccgtcatggatgggatcagtactgccactgcactgaaagaacgaggatcggccgcgcgcgtactcatggtgacaaccttcgggcgccccggctacgtccagcgcgcactcgatgcaggagcattgggtttcgttgtcaaggacgctcccgctgctcaactgctcgatgcaattcgtcgaacctcacagggacttcgcgtcgtcgaccccgcactcgcggtcgatgcgctcacgaaaggccaaagcccgctcagcgcccgcgaagttgaggtactgcgcgctttcgaaagtggcgggaccgtggaggacgtggcctcggagctcatgctgtcggcggggacggtacgcaactacgtgagctcggcgatggataagacccacgcgcacacgcgcgccgaagcgctcaaggtcgcgactgagaatgggtggttgtaaactgagattccatggtaaacagctatggacgtcgacaagacgcacaggaaaacatcactcgccacatctttgtcaccggaggtgtggtttcttctttaggtaagggtttgacggcctcgtcgctggggcgcctgctgcgttcacgcggtctgagcgttgccatgcagaagctcgatccctacatcaatgtcgatccgggaaccatgaatcccttccaacacggtgaggttttcgtcacggaagatggcgcggaaaccgaccttgatatcggccactacgagcgcttcttggacgtgaacctctccggcgcggcgaatgcgaccaccggtcaggtgtactccactgttatcgcaaaggaacgccgcggcgaatacttgggtgacaccgtccaggtcattccccacatcacggatgagatcaagcgcgtcatgcgcgcgcaggccatccccgatgccgaggggaacgctcccgatgtcatcatcacggaaattggcggaaccgtgggcgatatcgagtcccagcccttcttggaggccgcgcgtcaggtgcgcgccgacctgggtcgtgacaatgtcgcattcgttcacgtcgcgctgattcccttcctgcctgcggctggtgaactcaagaccaagccgacccagcactcggttgcgaccctgcgttcgatcggtatccagcccgatgccctagtgttgcgtacggaccgcccgctgcccgagggaatcaagggcaaggttgcgctcatgtgcgatgttgaccgcgatgctgtcatcgaatgcaaggatgcggcctctatttatgaggtccccccgacactgcaccgcgagggcttggatgcattcctggtccagcgactgggcttggcgttccgcgatgtggactggagtgagtggaacgagctccttgagcgcgtcgagtccccgaagtaccgcgtcgaggtcgccttggttggaaagtacatcaacctgcacgacgcttacctttcggtttccgaggctgttaagcacggtggttttgcgaataatgcgcgcgtagacctgcgttgggttgcctctgacacctgcgagactcccgagggagcgcagaaggcactcgaaggcgtggacgcgatcatcgtccccggtggtttcggcatccgaggcattgaaggcaagctgggtgcgctgcggtgggcgcgcgagcataagatcccgacccttggcctgtgcttgggcttgcagtgcatggtgatcgaggccgcgcgtgatctgttggggttgacgggggcctcgtcgaccgagatggatcccgagacgccggatccggtcgttcacacgatggactcccaggtcgacattgttgagggcgatggtgatctgggtgggaccatgcgactgggcgcctaccccgcggtccttcaagagggttctgttgtcgccgaggcctatggcaagacccaggtttcggagcgccaccgtcaccgtttcgaggtcaacaacgactaccgcgatcagctggaatcggttggcctgcacatctcgggtacttcccccgatgggaacctggtcgagtttgtcgagctggatcgctccatgcacccctactatgtagcaactcaggcgcaccccgagttcaagtcgcgtccgacgaaggctcatccgctattcgcgggcctcgttcgcgcggcacttgagcgtcacgtcgagaagtacgccgcgcgaggcggacgcaagtaaggggtgtagggtctgagggctttggctccggctttggctctgtctttggctccctcactcctggtttcctgctctacctccgtctttagctccctctttcctggtttagctcacagattcctggcctatgaacgctcatacgtcaggaatcaacgagctaaaccaggagatggggcgggggcagagcggggaattgatgttgtttgaatagttgcttgcgtgaagtgatgaccagggcttatagttgtgccaactgattctcaataaggtaccgacaggttagcggtactgattgctccaccggccttcgggccggtatttttttacctcgatgcgcatggttgacacggttcacacagctttaaaatcgctgaaaaatagctgcggaaactgtacaaaaatgcttgttgtctgtggcatgatttccccatgacaaagattaatgatgatcttcgctaccgtgtcggcattgacgtcggcttgaaatcaattggtttttgcgcggttgaggttgatgacaaggatcagccattgcgcctgttgaactccatggtgttcattcacgacgccggtgttgacccgaatgagaataaggccgcgaagagccgtaagctcactgcgggcgtcgctcggcggactcagcgcagaaccgctcagaataggcgccgtcttgcggagctcgaccgtgtgctatctgaagaactgcattggcccctgccgaatcttgaggattttgaggatccctacgagccgtggcatacccgcgcggagcttgtcgatcactacattgaggacgaatccgagcgcttggaagcactgtcgattgcggtcaggcacatggctcgacatcgtgggtggaggaatccatatatcaaggttgattcgctcctgactccggtggagcccagcgaattccttcgcggtctaaatgaacgcgtcggtgaggcgctggggcgggagtttcctgaggaaacaacgccgggccaattgattagcgaatacatgagcgatccgaagtacagggaaagcaacggtatccgtggagacgatggtattctccagggcaagcttcaccaatacgacaataccgctgaaattcgaaagatctgcgaaatccagagattggaccatgatgtgtttaagctcttggtccgcaaagttttcttcgcaaagtcacctagggggagtgccgcgggacttgtcggtcatgatcaactcccgggtcagggcaaattcatccgtgcagagaaagcgcatcctgatttccagctcttccggattgtttcagtgctgacgaatctgcgtgttcgtgaggcaggagcggaacgttgtctgacacccgaagaactgagcgggctgacagatttccttctcgatgcggggctgaaacagcaggtgacttgggccgatctagcggataacttgggtatcgagcgcgctgacttgcgtggaacggcacgtccctcagttgatggagagcccgcattgcgtttcccgccaacagatgtcactaccgagatgatcatggcttcaaaggtgaagtggctcaaggaatggtggaagtctgcggatagtgagcgacgcggattcatggtcgatgctctgtcgaattcgggaggttcgacgggtgacgacgacatcgatgatgaagttgcagagcttcttgaggcagcgacggaagatgaacaggctgaactggaaaagatccagcttcctcaaggacgagcggcctattccttggatagcttacgcaagctcacggagcggatgctggctgagggcgcggacctgcacactgcacgaaagcagctttttaatgtcgatgatgattggcgaccagaacccgagccgattgaggctccggttggaaaccccgcagttgaccgtgttctcaagcaggttgcacgttggctcaatatggctacggatcgctggggtgaaccggtcgttatcaatattgagcacacgcgtgatggtttgggttcggagaaggttgccagagagctattgcgtgagagccagaggcggcaggatctcaaccagaaaaatatggatgagatgatccagcaactgggaatttcaggtaaggcgcgccgttctgctctagtgaagcaccaggcaattcaacgtcagaattcgatgtgcttgtactgtggaaccgcgattggctttgaaacggcagaaatggatcatattgttccgcgtgcaagttcaggatcttcgaatgagcgttcgaatcttgccgctgtctgccgtacctgtaaccatcaaaagggtgcagtgccctttgctgtgtgggcgacctcgggtcaggcgcacgcaggtgtttctttagagggtgcaatcgagcgagtccgtgcgtgggaacgcgatccggctatgagtccgaagcaatatgctcatttccgtaaggaggtgatttcccgcctgaagtcgcgtaagccggatgaagagttcgacggacgttccatggagtccgttgcatggatggcgattgagctccgtacgcgtattgatggcttctaccggaagctcaaagcagagtcggtcccaagcattggtatttatcgcggtcagttgactgcggaagcgcgcaaggcctcgggatttgaaaatcgcgtcaacctgattggtggaaagggaaagacgcgttttgatcgcaggcaccatgcgatggatgccttggtaattgcactgatgaaccagtctgtttcacagaccttggcgttgcgcgtcaacatgcgggaatcgcagcgcatcaccggccaggaagaaacttggaagaacttctatgggaagccgggtcaagccagcgaacgttttgagcaatggcgtgaaggaatgcttcgtgcggtcgagctcttcaatattgagctcgcgaagaatgctattcctttccatgagaatgttcgtctgcgtgtcggttcaagcaaggttcacgacgatacggttcgaaagttcattcacgcgaagcttggcgaagctctgtctgtcgcaatgatcgatcgcgcggaaacacctgcgctgtggactgcattgaccaggcttcctgactttgatccgaaggaggggctacctgaagatcagtcacgggagatctatatccacggtcggaagattaccgctgatgaggagctgaacttcttcaattcgccatctgcctgtttgaaggttcgtggtggctatgtggagattggaagctcgattcaccacgcgagggtctaccggatcgatgggaagaaaaccacctacgctatggtgcgtgtttttgctacggacctggtgaagatgactcacgaagatgtcttcactacgccgctgaaagcatcgacgatttccatgcgtactgctgagccgaagattcggaaggcactagctgacggaacggccactcagatcggctggctggttgaaggcgatgagctgcagatcgagacggataagtacacgagcgggtctgtcggtaatgtgcttgctcagtatccacagctcataagctggcgggttgcgggtttctacggcgtgacgcagttgcgactacgcccttacatgctggctgcagaagggattccatctgacgcctcagatagcttgagaaaagttgttgagggaaaaggctggcttccggcaattaatacgcttttgtcgtcgggtgatgtttgggttgttcggcgaaattctcttggtgaagtgcggttcagcactaaggattcacttccagttactcacctgctgaggtagaaccatggctgaacagtggcgcgtgattgacctctgtgagttccagggaacacttcattccacacgaggtgggatagaggtgtgtcctgagggcaaggagccagtcactcttcccgttgcagagcttgcggttgttctcatcgggatgaaggttgatcttagtgctgctgttctgcaccggcttgcggatgcagatgttgcggttctcttctgtgattggagggggattcctgaaggtggttgttattcctggtcggatcacggacgggtagcagctcgtcaccgggctcaggctgacatgactcttcctcgaaagaaaaacgcgtgggcacgcatcattagagcaaagattgagggacaggcaaacgttcttcagaatctcggtcgttcagggagtagtgagctttttgcactcgcggatcaagttcgctcaggtgaccccgacaatattgaggctcgtgcagcgcgtttttactggtcgcgtgttctaggtgaggggcgacagcccggtgctggtcagctcattggttcgaatgcgtgtcttgattatggatacgctgtgttgcgtggtcatgtgattcgggcggtactgtccgctggattagctccggcgttaggtgtctttcatcgtggaaggggcaatgctttcgcgcttgcagatgacctcatcgaacctttccgcccggcgattgatgaagtcgctctgcaattgtctccaactgcatctccttcagatagtgatgtgaagcgggtattggttgctgcggcttcacagaagttcgatgcggttggttacggcatttcagcagttgcccaagatcttgcgcagcaatacgggcgttatgttgaaggagaagaagagcgtctaaaagttccctcatggcagggacccgcatccactgatctgagtggttgagatggtggatagtcccatgtggtgcctggtcatgtttgatcttccggttgaaacaaaagcccagaggcgggaagcgacgcggtttagacaagcgttgctggattggggattcacaatggtccagttcagtgtttacgcaaaatactggccaagcggtgggcagaaccattccacccttcgacaaatccagtcgcatcttcccgaaggcggtcaagtgcgggttatcggtattactgaccgtcaatgggccacgggactgcattttgaacaggctaagaaacagaaaacggagggggctcctgagcagctcactatcttctgaattacgagtcaatcctcttgatagacttcgggtataggcagtggggaacacgctgcagttgggaatcagttaccaatcctcttgatagacttccacgcaccgttgagtgcgagcatctggcgttgggaatcagttaccaatcctcttgatagacttcccggctgcgcgcattgcctcgccaagcggttgggaatcagttaccaatcctcttgatagacttccattgagcggtttgttccccggaatcaagttgggaatcagttaccaatcctcttgatagacttccgcgagatgtctgagaaaatggtattaggttgggaatcagttaccaatcctcttgatagacttctggggaccatcgaggccgcgcgactcacgttgggaatcagttaccaatcctcttgatagacttcgctacggcgcgccactccccgcgcataagttgggaatcagttaccaatcctcttgatagacttctccacgtgcctaaaccacaggtcgcccggttgggaatcagttaccaatcctcttgatagacttccgcctgcggttaggacgaagatcgtcgcgttgggaatcagttaccaatcctcttgatagacttcaaggcatggctgagcgcgacctggcggggttgggaatcagttaccaatcctcttgatagacttcaggcaactcgtcaaccttactagcatccgttgggaatcagttaccaatcctcttgatagacttcgccacgcaagatcgtccgcttcctcagcgttgggaatcagttaccaatcctcttgatagacttcggttccttgctctgctacgcgccgtttagttgggaatcagttaccaatcctcttgatagacttcatgcagttgcttgaggtcatcgaggctggttgggaatcagttaccaatcctcttgatagacttcgttggggtttgtggagtgtggggccaaggttgggaatcagttaccaatcctcttgatagacttcctcgcccgcctctagggaacacaaaaaggttgggaatcagttaccaatcctcttgatagacttcaacgagctgatcggcctcggcgccgaccgttgggaatcagttaccaatcctcttgatagacttcaaagggcagtgcgtcacgccgcgattctgttgggaatcagttaccaatcctcttgatagacttccaacctcagaatccaactcaatatgaacgttgggaatcagttaccaatcctcttgatagacttctgacctcggcgctgcataccatccgcgagttgggaatcagttaccaatcctcttgatagacttcaaatcgaaagatttataaccacccccgggttgggaatcagttaccaatcctcttgatagacttcccagaagccatcatgccaataagcggcagttgggaatcagttaccaatcctcttgatagacttctgcaagtctggaaagaaggaaccgcccggttgggaatcagttaccaatcctcttgatagacttccgctccacctccacgtctcggatgcagtgttgggaatcagttaccaatcctcttgatagacttcagacaatccttcgtaaataaccgctgcagttgggaatcagttaccaatcctcttgatagacttcagtcgatgcctcagctctcgaatgctttgttgggaatcagttaccaatcctcttgatagacttcccatccgcccgcttcgctagaatcaaccgttgggaatcagttaccaatcctcttgatagacttcggttaggggcggtttgacttctttaagtgttgggaatcagttaccaatcctcttgatagacttccccatccgccaagccctgcaaaagctgcgttgggaatcagttaccaatcctcttgatagacttcataattagggccaaggttgcggcctgatgttgggaatcagttaccaatcctcttgatagacttcggttaatcccgcgcgtgccgcttggatcgttgggaatcagttaccaatcctcttgatagacttcaccgaacaactcttaacccgcgaatacggttgggaatcagttaccaatcctcttgatagacttcttgcgttgaccccgcacgcatcggcggcgttgggaatcagttaccaatcctcttgatagacttctgatctattgaggttatcctgcgcttgggttgggaatcagttaccaatcctcttgatagacttcaccccagcagccttccaagaatcagccagttgggaatcagttaccaatcctcttgatagacttccgccgacgcgatcaccgcctacaaggtcgttgggaatcagttaccaatcctcttgatagacttctgatgatgatgtatccgacagtcactccgttgggaatcagttaccaatcctcttgatagacttcagctgacctgcttcgaggtctcggatctgttgggaatcagttaccaatcctcttgatagacttcccctgtcgcttctttcacgatcgcgtcggttgggaatcagttaccaatcctcttgatagacttccgcgacggtgataccgagcgtgacgatggttgggaatcagttaccaatcctcttgatagacttctcgcaggtcatcgatgagatcggagtcggttgggaatcagttaccaatcctcttgatagacttcaaagacacggccgacggactcgaaatcagttgggaatcagttaccaatcctcttgatagacttccggaccagatcgaacgctacaaggacgagttgggaatcagttaccaatcctcttgatagacttccgcacttctttgcagatcgcacgagcgcgttgggaatcagttaccaatcctcttgatagacttcggattgaatgggcacaaggtgtgccgtggttgggaatcagttaccaatcctcttgatagacttccatcgcgtgctcggggcgatgacgctgcgttgggaatcagttaccaatcctcttgatagacttcagaggattggttttcccttggaatagcaaggttttcggggcttcgaacgattaaaattcgaagccccgaacgctatttttcgcacttttcggcatctacggaagaaaaactgaagcctacatgcggcctcacgctatgtccgatctgccccaacaaccgtatttccgggcacgaagatcggatcaagcagggtcagaccatgcacagggcggcggatcttcgcctcggaatctgccgacgtcacggaaccggcggctacagcttccgcggccgcttccttttggggctcgccatcaatttgggcgaccaacatttcaaccgcacgcctcaatagctcgccggggcgcgtatcaaagtgatcgacatcgaataggcagtgcgcgcgctcggcagaccagccgctggctaccagcgagacatcacggccgggacgaatctccagatcgatcagggcgttgcaccagtcatccgcagagatcgtcggccccaaaatgtaggaatcaatccgattatcaccggcaatttgcccaacgagcttacggatttcgcgaattcccgtcccgcacgtgcgcgagagcaaaggaatcccggactcgcccgccgtatcaacaaccgcctgcctgaactgcgagacgaagttcaacgattgcacatcggggcttgccgaatggacgaaagcaatgttgcgcgctcccgcgtcacgcaggcggtgaaccgcggcgcgcccggcctcgtaataatcaacgtcgatggactggatcggtgcattaaaaggcccagagcccggggttccaatgaaaaccgtggggatcttgctctctgcaacgacgcccaaacgagcatcattgaagcgcacctccatgatgaacaggccgtcacacagcgcggtctgcatgactcttcgaagcccggcggcgccctcgtcggcggtgatcaacagcaggtcgaaatcgtgctcgcgcaagagctgcgccaaagtgatcagcatgtagtgctgggccgccgcgtccgctccctcgtggtaggggaccaccactcccaggacgcgggactttcgtgaacgcaaggatcgggcacccgcatggggctgataccccagctctttcattgcaatttggacacgcttttccgtctcgggggagacggctcggcgtccactcatgacatacgagaccgtggtttgcgagactcccgctagttttgcgacatctctgctggttggctgacgcgccatctcaggtcctcccggtatcttgacaggatcgcgtgaacaacttattgtgagttccgcatcacatgtgcgggcgtcgatgcccgcaaatattttttatccgacgaatacgtatgcgtaatgaataataccagaaaaactcctgaaaattgtcattaaacgaatacgtattcgtccggtcaaaaaggagcacaggtgtacacgaagaagcagtaccccggcgcagttgaactctgcttcgcgcacgagttcatccgcattgaggcatgggggcgcaatgcgcttcgtgtgcgcatcggcccctctgcagacttcccacaaggactaggagccctcgaagcggggcctgccaccggcctcgggacaagcacggaagaagcaaaggtcaccgagatccccggctacgacacacccgaagaagtcttcaccaacgggcgtatcagcgtcgttgccaaccttgacggtggaacaggaattgcccgcttccttctggatttccgcaaggacggcgaatctatcctccgcgaagcccccgagcacttctggtggccaggcgcccacggaatctaccccggtttcggcggacacgaagtccaccagtgcttcgcctccgaccccggcgaacgcttctacggaatgggacaacactcctacgatttcctcgatcacaaaggaatcgtctctgacctcatccaacgcaacggagaagtctccatccccttcgtcctctctgacaagggctacggattcttgtggaacaacccctccgtcggccgcgtcgaattcgccaaagaaagcacccgctgggtcgcacagcaaagcgagtggatcgactactgggtgtgcgtgggcgatacccccaaggaaatcctcgaggcctatgccgacgcggtcggccacgcgccgcgcattccgcagtgggcactgggcctgtggcaatccaagctgcgctacaccagccaagaagaactcatggatgttgcgcgcgaatacaagcgccgcggcctgcccctgtccgtgatcgtcaccgacttcatccactggcccgcaatgggggagtggcgcttcgacgaaaacgaatatccaaatcccgaggcgatgatggccgaattggaggaaatgggtacgaaactgatggtttccgtgtggccaacagtgtcacctctggctgaaacggacgcagaaattcgcgcaaagggcctcttggtcggcaccgaagccggagtcgaataccaccaaacattccgcgataagggaatggatcggccgctccccgtcgccttctacgacccgacaaaccccgcggcccgcgagtacgtctggaacaagctgaagaacaactacttcgatctgggtgtccgcgtgttctggctcgatgcctgcgaacctgaactcaaccccggtcacccctccaacctgcgcttctacgccggaagcggcctgaatgtctccaacctctacccgcgcgagaacgcgcgcatggtctgggaaggaatgcgcgaacagggtgaagacgaattcctcagcctgtgtcgcagcgcgtgggccggccaagccaagtacggctcggcggtatggagcggcgatattgcccccacctgggaagcgctcttcactcaggtccgagcaggccaatccattggaatctcggggatcccatggtggaccagtgacatcggcggcttccacggaggcgaccccagcgaccccgcgtaccaggagctcttcgctcgctggttcgagttcggtactttctgcccgctcatgcgcgtccacggtcaccgcgaaccccgcgaggacgtggcctcggacaaccccggcggacccaacgaaatctggtcctacggtgaggaagtcgcacagatctgcgcacgctacatccacctcagggaagcgctgcgcccctacatcggccgcgtcatggacgaggccgccgagcgtggaatccccccgatgcgcgcactcttcctcgaattccccgaggatccgcgcgcgtgggaagaagaaggagaattcctccttggtcccgacctccttgtcgcccccattgtcgaggccggcgcccgcagcgcccgcgtctaccttcccgcgggagtgcgctggcagcagctgctgatcgcaggcggcgaagaaaaggcaggtacggcctcgtacaccctgggagacgtcttcgagggtgggcaagaggtcaccatcgatgcaccacttgagtgcatccccgtatttgtccgtgaaaacacggaacttggtagttgctgacggacaactatcaacactcaaaggagagagaataatggcacacacatcgaagctcgcaatgcgcggcgttgcccttttcggtgcttcagtgatggcactgggactgggcgcatgttcaggaggaaagtcggattcttcgtctggcgcctccggtggacaggtcaccgttgaaatgtgggactacctgagcggtgacaccgccaacagctcgatcgaagcatcgattgcagagttcgagaaggcaaaccccgacatcaaggtcaagcgcaccacctttgctttcgctgacctgtcgaagtccattctccagggctcggtcggcggcgaggtccccgacgttgcagtcgtggacgtggtcgacaaccagaacttcgcgtctttgggcatgctcaaggacctcagcggtgatggcatcaacaagtctgatttcttcgatggcccctggtcctcggttgaattcgatggaaagacctacggtattccgctgaactcgaacaacctcgccctgtactacaacaagaccatgctcaaggaagccggtgttgaggttccgaccgactgggagtccttgaaggaagttgcaaagaagaccacaaagggcgacgtcaagggcctggcgatttccggtgtgaagtctgagtccgcaaccttccagatcctgcccttcgtgtggcagaccggtggcgacctgtccaactacagcgagtccggcgcaaccgcactggcctacctgcgcggcatgattgaagaaggctcgatgtccgaggccgtctccaactacacccaggaagatgcgcgtacccagttcatcaccggcaaggccgcaatgatgatcaatggcccgtgggagctctcgaccctgaccaaggatgccgagatcgaatgggacgtcgctccgcttcctaaggacaagcgcgcagcaacctcgatgggtggcgaaaacgttgtcgtcatgaacggtgcaaagcagtccgaggcagccgtgaagctcgcgaagtacctgaccagcgcagaaggcgccaagatctactgcgacggctccggccagctctcctcgcgccccgacctgcagggcaagctcaagctctcgagcgatcctaagctcaaggtcttcgaagatcagctccagtatgcacacgcacgcgcatacggaaaggactacccgaagatttccgaggccatccagctgtccatgcaggaagccctgaccggtgcgtcgactcccgaggccgcagcaaagaaggccgcggacacgatgaaccccttgctgcccaagaactgagcggcaaaggacacaggtccggcgagtatcgtaggcctcgtcaaggaccgcacaatacctagtggcaccccacgcgagtacgaacgcaacaatgggagcccgtggcaaagccacggtatccctactcgcgtggggagcccgcaactctgagtaagtgaatttacgatgacgcgaacaaagaaagcgggtcacgacgcaggatctcgttccatggcgcgcactcgtcgcctggggttcctccttgcgctacccgcaatcatctacataacaattttcctcgttgttcccctggtctataacatctggctgtcaatctctgacgccaacggttccaatctcattacgggcgactaccacccgacgggctttgcgaactataaggaaatgctggccagccccggtttttggaatggcgtcaagctttcggcgatcttcaccgtcgcgtcccttgctttgcagttcctcgtcggatacgcgctggcactgttcttccgcaagcccttccccggaaacggcattattcgcgcgctactgctggtcgcctggattcttcccgccgttgtgaccggtacgatcttccgctggatgttcgactctgattttggcgtcattaactacttcttgacctcaatgcacctggtggacaaaccggtcatgtggctcaccggtccaacaaccgcaatggttgcggtcgttgtcgcaaacctctgggttggaatgcccttcaacatgctcctgatcttgtcgggattgcacaccattgacgatggcttgtacgaggccgccgaagttgatggtgcgggccctatccgtacgttcttctccatcacggaacccctcatgcgtcctgtcgtcttctcgctcttgctcttgggcgtcatcaatacctacaaggtcttcgacctgatctacacgatgacgaaaggcgggcccgttgaagcgacgacgactttgccgatcttcacctacctgcagaccttcaaggtcttcgatttcggcaatggggcagccgcctcg

SEQ ID NO: 4354 - DNA, 23309 bp, synthetic construct
  misc_feature 1..23309: note = Synthetic
  source 1..23309: mol_type = other DNA
ctcgaaggtcatgctcaagctgtcctaatcagaacagttcgcggtgagggccgggtagctcaggtgctacccggccctcagtcattcttgctcattgtgtgggctaccctgatgacatgttcatgcgccccgccacttccgaggatctggatttcatcgagtctgcttttgaccacgcccgcgaattcatgcggacgaacggtaacccgacgcagtggcccagcgattaccccaaccgcagtgatgcgctcagggatattgaaagaggcgagtgtttccttgtttgtgatgaacaggggcctttggcagtgtttagtttcgctcgccggccggaagaggagtattcccagattgatggggcctggcacttcgatgatgagtatggcgtgattcatcgccttgccagcgtccgaggccgtggggtcactcgcgtggtcatggacttttgcgcgggacaagtcccctatttgcgctgcgatacgcaccttgataacggaccgatgcgtcgagcgctggaggcttatggctttgagccgtgcgggatgattgcggtacgaggccagtgcccgcgaattgcctacgatgggttgttttctcaaatatcgaaatagtgtcgagtaattacttgctgaatcagctttcttcgttaggctgagactgacctcaacgacggcgaggaggtgcggcaatggtgtcttggtcagaggttcagaagtggaatgctggagtttttacgagtcttgcacagcaggtgggagcctccgcagaagattgcaagtctaatctcaagcgttttgtggatgttcttgctggtttcaatcttgagggtgctaccgccagtgcggctcgtgatcaggggcactttcggatcgaggcggcccgccgtcaggtggaagaccttcgtgctttgcaggagattttcttgtgggctgagcacgaggtcagtgacatcgcggccgatgtgacgagtattcatgagattgagcggacaacgaatattacgatttttgagtcaggtacggtagctccgcgcgatccgatggtgttttatggccgaaataatccgtttgtagacgatgaaccggcgttgcagtttgcctccacccggatcgcgagccttctttcacgcgctgaggccttcattagtgagctggaagctcgcttttcgcgagtgaacagcggagaggctggtgcagaacatgcatatcagacttcggataacgaagaagctcaacttcctccgcatggttcaaaccccaggcagattgccgcatggtggggttcgttgagtcctcaacaacaggaagagttaattaaaaagtatccagcgattattggaaatctggatggagtagatattgcgacacgtgaccgggttaaccgtagtctcgttgacggaatgctggcggaagctcgagatagggaacgtcaaacccatgaagaccttgtgcaccggggaatgacttcacattcgtatgcaaatcgctattcgaaggcacttgacgatgtagaagatatcgaagttcttcaggaggttcttaaggatcgcgaacgaaagttgttggtatgcgatcgcagtggtgagcggctcaaggttgctattggtattggtgattttgataaagctcagcatattggcgtttttgtcccggggatggggacgacggttaggggtaaacttggggattatttcaagaagtcggagagtttgcggttgacggcttccgacgttgctcataaaccagccctagactatgcaacagtagcttggctggggtatgacgcgcctttgagcatcccgaatgtggcaaacacgcatcgtgcgaatgctggtgcagatagacttgtaaatttccttgaaggccttcgggtgatacccagggataatcaggaaaaattacatctaactcttctcggtcattcttatggctcaacaacgtcagggattgcagcatcgcatgtttcgccaaatgtggttgatgatctcgtgctgtttggctcccctggttcgggggttcaacttggtgctgaataccgtgtcccggaaggacatcgatgggtcagtgctgtcccctatcctggagatatagttcaggggataggtacggatataaactttggccgaaatccaaccgaaatgcaagcatttagacacattagcggtgatgcgacaaagggggaaacctaccacacaattccgcggggtccctttggcaatcactcgacgtatctagaggatggtactgagacgcagaaaaatatggcggagatcgtggctggtttggagccaagctcatgaagttttgttggcgtgtggttgcggtgcttgtgtgcgctgttgtggggtttgttggtttttcgttttatgcgttgttgcatgatgatggtttgccgtcgatggatgggcgtcttcctttggagaagcgtgtgtcgattgaggcgtttcagcgtgatgtggagccgcatattctctctgctcggcaggcactatttgaagataccggtggagtacgccccttctcggagggcagtaggataagtacggctgtgggtgagtcgtggactttgtatagtcagaacaccgatggggctaaagtgtctgtggacaaaatttatgcggtgatgcacgaatttgtcgaaagtcaaagctatgttcttgctttggatagcgtgagcaaggatggtagacatagctttatatggcgcgactatgacaatggcggtgcggtttacgtcaccctacgtgagcagctgacgagttttcgttatgagagtggcgaccgtccttctgatggttctgtgcctgatccgcgggtgttgattcctaatgattctcgggatattgccggatacgtgagtcctagtcttcccagtattcgggtttttgatagggacgcgccttttttcccagagactgatggcagtgagttggagaaggaacgtcagtcggttgaggtgtttgagcgtgaggttgagccggggattttgagtttcagagacgaaattgttggtgattcgccgtattacgtggctcccagcagccctagcgagatggaaacgaggaagagctatccccctccagagtattggcttgaaagccagcgtgttcagtgtggtccgcgtgatgtggggcgggttattgagatggggaatgctcatttgaatccgctgggctatgagttggtgtatgactatgccagttcaaaacctggggttggccactacctggcgtggaaggatgagaagaatggcgggattgtgacggttattcttcgccaggagaacacggagtttagttatgagagtggggctcgtccttctgatggttctgtgcccgacccgacggtgttgattcccaacgaccaccgcgacttaccagaccctcttgcgtagccgcggcctcggcctcggctattccctaataccgacgtggatggtgggaatatagactggtatggccagtgacgcaagaagctcctcaaggctactgcctaaaacccctagatctgcatactgcataccctgatgcgcctcacccggaagacgagagggaagatagcgcaaaacctcgtactgatcaccttcatagtccgtatacaatccggtttcgacgaagccgttgcgctgatagaaggccagtcgcctttcgcgctgatggaagttagaagcatcggtagtcattggctcgatttccaaagcaatggcaaaaccggggaaatgctccttcagctggtcaagaattcgtgttccatatccccgcgagcgaaccgcgggattcgtcgctaagaacacgacaaaaagcaaatcatctgagtgaatagtgaaagtcactccgcaaaagcccgagggttcttccggatcaaaatacgcagtgaaatcaatagaacgacgtagtgcaagtgcattcatcacccattcaggaatgagttcggcgggtggaaaggcctcggcaaggaggctacgaacctgcgggtagaagtgggaatgacggcggatgggcaaagtgataagggacgactcgcttgaactcacccttccatactaaatttcgcccgcatcgcctgcctcatgacaattgtcatgtgaaacttcgtaaaaacgacactgttgtcgatgtccctcacaggcttgacttaaagcatgaacacggacactcaaaccacgaccccagtgatcctcgcgaaagacctggtgaagacctacgggaatgtgcacgcactcaagggcatgaacctacgcgttgattccggtgaaatcgttgctttccttggccgaaatggcgctggaaaaagcacaacaattgacatcattcttggccttcaacaagcagatagcggaagtgttgaagttttcggcatgagtgccaaagaagcaatccgccgcggattgatcggtgtcgttctccaatcgggttcgcttcctggggactacagcgtcgcagaaatcctcaaactcttctcgcgcgtctacaagcgcaccgagtccattgacccccttgtcgaggaaacccaccttcgacaccttcttggccgcaaaatccgcaagctatccggtggtgagcagcaacgcgttcgcctagcaatggcgctaattcctgacccagaactcatcattctcgacgaaccgaccgccggaatggacgtcaccatgcgcaaggagttctgggatctcatgagtacccaggcctcgaaaggtaagacgattcttttcgccactcactacctggccgaggcgcaggactacgctcagcgtacggtcatcgtcaatgcgggccgcgtgagcgccgacgcccccaccgaagaaatccgccgagcgcactcgtcgacgcgcctggccttctctatccctgcttcctctcttgagggagtgcgtgcaggactggccgcgcgtgcggctgagcttgggacagtgtgggaggtttccgatattgccgaggtcgattcccccgattccgcctccgcttccttgggcgaagaggagttggctgccgatcactggctacgcgtggagttccacacgaccttctctgacgaggccgctcgacacattgtcgctattccccaggcatgcgaattcgaggttgttttctcgagcctcgaggatgttttcgccgagctcacgcagtagaacgcagggcacgaagtcctgtttttcactttggccacctcgtacctcttctctaaggattcacaatgacgactcacactcacgcagcaacaaacccctggatcagccgccgggcactgagctcctggcagggatttgggcttctcacctggaagtcattcctgaagctggttctcaatcccgctatgttcgctttcgcgctgatccttccgatcttcatgtacatgatgtttggagcaggacaggagtactcgaaagagtgggcgatcaatgcaaatattggcgcaacggttttggtgtcaatgaccctgtacggcgtaatgatcgctgccgcatcggctgcaaccgttgttgcacttgagcgaacctctggaatctccaggctctttgcactgtctcccgtgggttcgggcgccttcatcttttcccgtttgatcgcggcgatttccatgagcgccctggttattgtcattacctataccttcggatacgcgaccggagcacgaatgagacccgaggcctgggttgaaagtgggctcatcaccttggctgcgtcagtgatttccgcggcccttggtctggcgctggccttcctcatgcgctcagataccgccttcgcggtgattaatggtgtcgttgtcttgggtgctttccttgcgggaatgttcattccgatcagctccatggggtcgatatttaagacgctcgcgccctatagccccttctacggactcttcaacctctcgcagctgcccctctacggtttcgataattttgaatggaaatgggtgatttcaacggttgcgtggtttgttcccatggcactgcttgcgatctgggcacagcgcagggacactgatcgctaagacgcctgacgcaatcgggcgcgctcttgcactacttttaacgcaattactggggaaggacaggaatgagcaccaaaactcaggggacagatgcctcgtggtcacagcgccacccgcgcttgtccgcggtgttgtgggcactgccctacctggctttcttggcctttcccttggggatgattcctaccattgaatcccccgggatgatcgcgctgatcctcaccctgacctttggggttgccgctgctgatattgcaatttacatcgtcaatccgacccccgaatggggagcgcgcatcaccaagaaaatgtggatctcgcacgggatcctgctggctctggtgattgcactgggactcgtcctggttgtcgccggcgcatcgcgagtcacctcggcccttttcatcacctactcgattgcaggctggaaccttcaagcccccaggaaatatgtggttcccggcctagtggcacttgttggctgggaagtcattgccatcttgctgcccattggcagtatcgacgcagtgaccttgagctatgcgatcatcgcgctgctgatggttttgggattaaccctggccgtgcgccgcagtttcgataatcgccactcagagcaacaacgtcaacgccaagcaatcagcctggttcgcgagcgcgagcgcctgcgttttgccggtgatcttcacgatattcttgggcactcgctgacggtcatcaccatgaagaatgagcttgcccagcgcttgctttccgtgggaaagattgccgaggccagtgagcagattgcgcagaccctggagttatcccgccaggcaaaagaagatctgcgcgggatcatcgccgcttcgcgaagcctgtccgccgaggaagaggtcgagtcggcccgtgaactatgcgagcaagcggggatcgaatttatcgctgacattcagggcgaaatcccacccggtcccagggcaactttggctgcacatgtcatccgagaggggactgccaacgcgattactcacgctcgtccctccacaatcagtgtccgcctgacgcctgatgaggtcctggtggaaaacgacgggtattcacgcagctattcacaggcctcggcagggggaggagccggattggaaggactacgccagcgggcggcctcggaaggggagatgacctgggggagccaggggaatacgtggacactgcgcctgactttccgcggggagtccgcctaatcggaaggtagaattggcgggtcaagtactggcgcgcaaaaggactgccaatgattcacgtgattgtggccgatgatcaggccttgattcgtggtgccttgagcgcgcttattgacttggaagacgatatgcgcgtcgtcgctcaggccgctgatggtcgcgaggccatcgccgcagtcgaggcatataccgctgagaattcccgtggtgaccaggcttcgaaagccgcctcgacactggtcgtcattatggacgttgaaatgcccgtgatggatggaatcagtgcagccgcggccttgaaagagcgcgggacgaatgcgcgagtcctcatggtgacgacctttgggcgtcccgggtacgtccagcgcgcattggatgcgggagccgttggattcattgtcaaagacgcaccggccgagcagctcctagaagcaatccgacgaacttcccaaggactgcgcacggtcgatcctgcgctcgcggtcgatgcgctcaccaaaggtcaaagcccgctcagcgcgcgcgaagttgaagttttgcgcgcttttgaaagcggggggaccgtggaggatgtcgcctcggagctcatgttgtcggcggggacggtgcgcaactacgtgagctcagcgatggataagacccacgcgcgaacgagagctgaagcactcaaggtagcaacagaaaacgggtggttgtaaactgagattccatggtaaacagctatggacgtcgccaagagacgcaggaaaacgttactcgccacatcttcgtcaccggaggtgtggtttcttctttaggtaagggtttgacggcctcttcgctggggcgtctgctgcgttcgcgcggtttgagtgtcgccatgcaaaagcttgacccctatatcaacgtcgatcccgggacgatgaaccccttccagcacggtgaggttttcgtcactgaagatggcgcggaaaccgaccttgatatcggccactacgagcgcttcttggacgtgaacctctccggtgcggcgaacgcgacgaccggccaggtgtactccacggttattgcaaaggaacgccgcggcgaatacctgggcgataccgtccaggtcatccctcacatcaccgatgaaatcaagcgcgtcatgcgtgcccaggctgtacccgacgccgagggcaatgcccccgatgtcatcatcaccgaaatcggtggcacggttggcgatatcgaatcacagcccttcttggaggctgcgcgtcaggtgcgcgccgacctgggccgcgacaatgttgcctttgtgcacgtcgcactgatccccttccttcccgctgccggtgagctcaagaccaagccgacccagcactctgtggccgcgctgcgctctatcggtattcagcccgatgcgctggtgctgcgtacggatcgcccgctgcccgagggaattaagggcaaggttgcactcatgtgcgacgtcgaccgggatgctgtcatcgaatgtaaggatgcggcctcgatctatgaggttcccccgacgctgcatcgcgagggcttggatgccttccttgttcagcgtcttggcctgactttccgcgacgtggactggagcgagtggaacgagctccttgagcgcgttgaatcgccgaagtaccgcgttgaggttgcgttggttggtaagtacattgacctgcacgacgcttacctttctgtttccgaggccgtgaagcacggtggctttgcaaataacgctcgcgttgacctgcgttgggttgcctccgacacctgtgaaacccccgagggcgcgcaaaaggctctgggtggcgttgatgcaatcatcgtccccggtggctttggtatccgaggcattgaaggcaagttgggtgcgctgcgttgggcgcgcgagcacaagatcccgaccttgggattgtgcttgggcttgcaatgcatggtgatcgaggccgcgcgtgacctgcttggcttggctggagcttcctcgacggaaatggatcccgagacgccggatccggttgttcacaccatggattcgcaggtcgacattgttgagggcgatggtgatctgggcggaaccatgcgactgggcgcataccctgcggtccttcaggaaggctctattgttgccgaggcctatgggaagactcaggtttcggagcgtcaccgtcaccgctttgaagtgaacaatgattaccgcgatcagctggaatcggttggcctgcacatctcgggtacctcacccgatggaaacctggtcgagtttgttgagctggatcgttccttgcacccctactacgtggcaactcaggcgcaccccgagttcaagtcgcgtccgacgaaggctcacccgctattcgcgggcctggttcgcgcggcacttgcgcgtcacgcagagaactatgctgcacgtggcgggcgtaagtaaggggtgtagggtctgagggctttagctccctcattcctggtttagctcactgactccgggcctatgaacgctcatatgttagaagtcgacgagctaaaccaggagatggggcaggggcgggaagtttgcattgtttcaaaaggtgcttgcgtgaagagctgatcagggcttatagttgtgccaactgattctcaataaggtgtcgacaagttagcggcgctgattgctccaccgggttccacgggacccggtaattttttgcccgcgatgcttgtggttgacctggttaacataacttcaaaattgctgaaaaatacctgcagaaactgtatgaaactgcttgttgtctgtggcatgatttcagcatgacaaagattaaagacgatcttcgatatcgtgtcggcattgatgtcggcttgaaatcaattggtttttgcgctgtggaggtcgatgaaaacgaccagccacttcgactgctgaattcaatggtgttcgttcatgacgccggtgtagatccaaatgaaaataaggctaagagtcgaaagctaactgctggcgtcgcgcgacgcatccagcgcagagttcgtcagaataggcgccgacttgccgaactcgatcgcgctttgtcagaggaattaaattggcccttgccgaaccttgaggactttgaggatccctacgagccatggcatacgcgtgcggagcttgtcgatcactacattgaggacgaatccgaacgtttggaagcactctcgatcgcgatcaggcacatggctcgccaccgtggatggaggaatccctacatcaaggttgagtcactcttgactccgatggaacccagtgagtttctgtgccgattgaatgaacgcgtcagcgaggctttggggcgggagttccctgctgatgcaacgccggggcaattgattagtgcatatatcagcgctccaaactacaaggaaacaactggtatccgtggcgacgatggcattctccaaggcaagctctatcaagacgacaatgctgctgaaatccgaaagatttgcgaagtgcagcgactggacctcgatgtgtttgagctcttggtccgcaaagttttcttcgcaaagtctcctaggggcagcgcagccggtttggttggtcatgatgagcttccggggcaggaaaaacatattcgtgcagaaaaagcgcatcctgattttcaactcttccgaattgtttcagtactgacgaatttgcgtattcatgagggaggcgtggagcgttgcctgactccagacgagttgcgtggactgacagatttccttcttatcgcaggattgaagcagcgggtaacttgggcggatcttgcggataacttgggaatcgaacgcgctgacctgcgtggaacagcacgtccttcagttgatggagaacccgctttacgcttcccaccaacggatgtcaccaccgagaagatcatggcttccaaggtcaaatggctcaaggagtggtggaagtctgccgatagtgagcgacgcggatacatggtcgatgcgctttcaaattcgggcgggtcaacggatgacaacgacctagatgatgaggtagtagaactccttgagcgggcaaccgaagttgaacagacagagctcgagaagatccagcttcctcaaggccgggcagcctattccttggatagcttgcgcaagctcaccgagcgaatgctgagtgaaggtgtggacctgcacaccgctcgaaagcagcttttcaatgtagacgatgattggcgacccgagcctgaggcgatcgaagctccggttggaaaccccgcagttgatcgtgttcttaagcaggttgcacgttggttgaatatggccacggatcgttgggggactcccgacgtcattaacatcgagcacacgcgtgatggtttgggttcagagaaggtcgcgcgaaaactcttgcgcgagagccagaaacgtcaagatctcaaccagaagaatatggatgagatgattcggcagctggggatctcgggtaaggctcgtcgttcttctttgcttaagtaccaggcgattcaacgtcagaattcgatgtgcttgtactgcggtaccgacatcgattttaaaactgcagagatggaccatattgttcctcgcgcgaattcaggatcttcgaatgagcgttcaaatcttgctgctgtctgtggtgcctgtaatcgccagaagaacgctactccttttgcagcatgggcgacctcgggacgggctcgtgcgggggtttctttggatggggcaattgagcgagtccgtgcgtgggaacgcgatccgggaatgagttcgaagcaatacgctcacttccgaagggaagtgatttctcgcttgaagtcgcgtaagccggatgaagagttcgatggccgttccatggaatctgttgcatggatggcgattgagcttcgtacgcgtattgatggcttctaccggaagctcaaagcagagtcgactccgagcattggtatttaccgtggccagctgaccgcggaagcacgtaaggcctcgggatttgagaatcgcgtcaacctgattggtgggaagggtaagactcgttttgatcgcaggcaccatgcgatggatgcgctggtgatcgcgttaatgaatcaatctgtttcgcaaaccttggccttgcgcgtcaatatgcgtgaatctcagcgaattaccggcaaggaagaaacctggaagaacttctatgggaagccggggcaggccagcgagcgttttgagcagtggtgtaattcgatgcttcgcgcggttgagcttttcaatactgagctcgcgaagaatgctgttcccttcgttgagaatgttcgactgcgcgtcggttcaagcaaggtgcacgatgatacggttcgaaagttcactcacgcaaagttgggggctgcgctctcgactgacgtgatcgatcgggctgaaactccagcactatggacggcgctcacgcgacttcctgattttgatccgaaggatgggcttcctgaagatccatcgcgggaaatctacattcacggtcggaagatcactgcggatgagcaactgaacttctttaattcgccgtctgcctgtttgacggttcgtggcggctacgtggagattggaagctcaattcaccacgctcgggtctacaggattgatgggaagaagacaacgtattccatggtgcgcgtttttgcgacggatctggtgaagatgactcacgaggatgtcttcaccacaccgctgaaaccatcgacgatttccatgcgtactgctgagtcgaagattcggaaggcgctggctgatgggacagccacccagatcgggtggctggttgaaggtgatgagctgcagcttgaaacggataagtactctggtggctttatcggagatgtccttgctgaatacccgcaactgacgagttggcgggttgcgggcttccctgatatcgcaaagttccgtttgcgcccctacctactgtcagcggaaggtattcctgctgatgcttcagatggtttacgagaaattattgagcgaaaaggctggcgtccagcagttaatgttttacttactagcgggactgtgaaggtaatacggcgaaattgtttaggtgaacctcgctacagctcagttaattcactgcctgtatctcagttgttgaggtagagccatggcagaacagtggcgcgtgattgacctctgtgaatttgagggagcacttcattccacacgaggtggaatagaggtgtgccctgaaggtaaggaaccggtcactcttcccgttgcagagcttgcggtagtccttatcggaatgaaggtcgaccttagcgccgctgttctgcaccgtctagcggaggcagatgtagcagttctcttctgtgattggcgtggaattcccgaaggggcctgttattcctggtccgatcacgggcgagtagctgctcgtcaccgggcgcaggctgacatgactcttcctcgaaagaagaatgcttgggcacgaattatcagagcaaagattgaaggacaggctaatgtccttcagaatcttggtcgttcgggcagtagtgagctttttgcgctcgcggaccaagttcgctcaggcgatccggaaaacgttgaggctcatgctgcgcgcgtctactggtcacgagtgttaaaagatggcagacaaccaggtgcaggacaacttattggttcaaatgcgtgtcttgactatggatatgcggttctccgaggacaccttattcgggcaattctttccgcgggtttagctccagcattgggggtattccatcggggaagaggaaatgcttttgcgctcgcggatgatctgattgagccgtttcgtccagcgattgatgaggttgctttacagttctcaccaactgcatcaccttcagatagtggtgtgaaaagactgctagttgccgccgcatcgcagaaatttgacagtgacgggtatgggataccagccgtagcccaggatctggcgcagcaatacgggcgttacgttgagggagatgaggatcgccttcgcgttttggcgtggcaggggccagcttcagtcgatgtgagtggctgaaatggttgatggtccaatgtggtgcctggtcatgttcgatttgccggttgaaacaaaagatcaacggcgagaggctactcgtttcaggcaaaacttactcgactggggttttagcatggttcagttttctgtctatgtgaagtattggcctaccggtggtcagaatcatgcgactcttcggcagattcagtctcatcttccagagggtggtcaagtgcgagttattggaattacggatcgccagtgggcgacagggcttcattttgagcaggcgaagaaaaagaaaactgagggtgctcctgagcagctcactattttctaaattacgggtcaatcctcttgataagctttgtaagccttggaagcttgggacgacgttgttgggaatcagttaccaatcctcttgatagacttccccgacatcgaatccttaccacgtagaagttgggaatcagttaccaatcctcttgataagctttgacggttaaaactgtgtcgtgggcgcaagttgggaatcagttaccaatcctcttgataagctttagagatgggagagcaaagcccgcgagctgttgggaatcagttaccaatcctcttgataagcttttgccggagccggttccgtggttgcttcagttgggaatcagttaccaatcctcttgataagctttcactccatcgcgcagcagcgtgtagaccgttgggaatcagttaccaatcctcttgataagctttgttccgcagatcacccattcacgcgttggttgggaatcagttaccaatcctcttgataagctttgccaccgtcgctgacaacgcccagactggttgggaatcagttaccaatcctcttgataagctttcagaccaccgaaacctatccaatcattagttgggaatcagttaccaatcctcttgataagctttccccatgtgatcgtgaggcgatcgagtggttgggaatcagttaccaatcctcttgataagctttacgaagcctgctttctccccgctgccctgttgggaatcagttaccaatcctcttgataagctttgctcaagcaagcagagagggacgtcacagttgggaatcagttaccaatcctcttgataagctttagaggattggtttttccctggaatagcaaggttttctgggcttcgaacgattcaaattcggagcccagaacgctatttttggcatttttcggggtctacaaaagaaaaaactggaaccctaaaagccctcgcgctacgaccgatcggccccaataaccgtatttccaggcacgaagattggatcaagcagggtcaatccgtgcacggggcggcggattttggcctcggaatgttccaacgggacagcctcatgtccctcagcatcgatatctacgtccgcttcttttcgaggttccccatcgatctgggcaaccagcatctcaaccgcgcgcctcaaaagctcatccggtcgggtatcaaaatgatcgacatcgaaaaggcagtgggctcgctccgcatgccatccgctggcaaccagcgagacatcgcgtcccggtctaatccccagatccatcagcgcattacaccagtcatcagcggaaatcgttggccccagaatgtaggaatcaacccgtccctcgccggcaatttggccaaccaagtggcgaattgcctgaattccggttccgcaggtgcgcgacagaaggggaatcccaagctcaccggccgtatccacaaccgcttgcttaaactgcgcgacgaagttcaaggactgcacgtctgcgctggccgagtgcacgaaagcaacattgcgtgcccccgcatcccgaatgcggtgcactgcctgggtgccggcctcgtaatagtccacgtcaatggactggatcggtgacctaaagggtccaggcccgggagtgccaacgaaaaccgtgggaatctttccctcggccacgacctctaggcgggggtcattgaagcgaacttccatgatgaacagaccatcacacagcgcagtcgtcatgacacggcgcagcccagccgccccctcgttcgcggtgatcaaaagcagatcaaaatcatgttcgcgcaagagctgtgccagtgagatcagcatgtagtgctggtccgccccatccgcaccctcgtggtaggggatgacaactccaagcacgcgcgacttgcgtgagcgcagtgaacgagcgcccgcatgaggctggtagcccagttctttcattgcaatttggacacgtttttccgtctccggagacactgtccgtctgccgctcatgacgtaggagaccgtagtttgtgagactcccgccagttttgcgacatctctactggttggctggcgtgccatcagttcctcctgctctcttgacaggaacgcttttactacttatcttgagtttcacatcacacgcgagcagcgatgctcgcaaaaaatttttacataacgaatacgtatgcgtaatggatattaccagaaaaactcctgcatagaagcatggagcgaatacgtattcgtactcttcgctaaggagtcgtaggtgtacacgaaaaaggagtacccgggcgcagtcgaactctcctatgcgcacgagttcatccgcattgaggcctggggtcgcaatgcacttcgcgtgcgcataggccccaatgcgaacttcccccagggactgggcgcgctcgaggccgcaccccttagtggcctcggcgcgacctctggagcatccgcggacccgcttgccgacaccccagcgccgacagaggctaccgggaatgaaccttgctctgtcaccgaaatccccggctacgatcgccccgaagaagtcttttccaatgggcgaatcagcgtggttgcgaaacttgacggcggaaccggaattgcccgattccttctggatttccaaaaggacggcgaatccatcctgcgcgaggcccctgaacacttctggtggccgggcgcccatggaatctacccgggcttcggcggacacgaagtgcaccaatgctttgcctcggacccgaccgagcgtttctacggaatgggccagcactcctacgacttccttgaccacaagggtgtcgtctctgatctggtccagcgaaacggtgaagtttccatcccctttgtcctctcagacaaaggctatggattcctgtggaacaaccccagcgttggccgcgtggaattcgccaaagaagccacacgctgggtcgcgcaggcaagcgaatggatcgactactgggtgtgcgtaggagacactcccaaggaaatcctccagtcctatgctgacgcggtgggccacgcaccccgaattccccagtgggcactgggcctgtggcaatccaaactgcgctacaccagccaaaatgaacttatggaagtcgcccgcgaataccaccgccgaggccttcccctctctgtcatcgtgactgacttcatccactggccggccatgggggagtggcgctttgacccgagcgaataccccgatcccgaagcgatgatggctgaactggaagagatgggcaccaagctcatggtttccgtgtggcccacggtctcaccccttgccgaaaccgacgcggaaattcgcgcaaagggtctattggtgggcaccgaggccggagttgaataccaccaaaccttccgcgataagggaatggatcgcccgcttcccgtcgccttctacgacccgactaatcctgccgcacgcgactacgtgtggaacaagctcaagaacaactacttcgatctgggtgtgcgcgtgttctggctggatgcctgcgagcccgagcttaatcccggtcatccctcgaacctgcgtttttatgcgggaaagggcctgaacgtctcgaacctctacccgcgcgagaatgcccgcatgatctgggaaggcatgcgtgaacagggcggagaggaattcctcaccctgtgccgcagcgcctgggcaggacaggcaaaatacggcgctgccgtgtggagtggagacatcggccccacctgggaggccctctacacgcaggtccgagccggacaatccattggaatcgcaggaatcccctggtggaccagcgatatcggcggtttccacggaggcgacgccagcgaccccgcataccaggaactcttcgcccgctggttcgaattcggaaccttctgcccactcatgcgcgttcacggacatcgcgaaccccgcgaagatgtggcctcggaaaaccccggcggccccaacgaaatctggtcctacggcgaggaagtcgcggatatctgctcccgctacatcctcctgcgcgaaaccctgcgcccctacctcactcgcgtgatggacgaggccagcgagcgcggaatccccgccatgcgcgccctcttcctcgaattccccgaggacgggcgctgttggagctgggacggggagttcctcttgggtcccgacctcttggtttccccgattaccgaggccggctcccgcactgcccgcgtctaccttccccgaggtgcgcggtggcgccaacttctcatcgccccaagccgcggtgatgaggatcaagaggccacggcctcgtacatgcttggtgagactttcgaaggcggaagtgaactcaccatagatgcaccactggagtgcatcccattattcatccgtgaaaacacggatctagatagttggttgacggacaactatcgacactcaaaggagagaaagaatggcatacgcatctaagcgcgcaatgcgcgggattgccttcttcggtgccggagttatggcactgggactggcagcatgctccgggacgaagacggattcggccgactccggcagcgcatccggcggtcaagtgaccgttgagatgtgggactacctgagcggtgaaaccgccaatgactcgatcaatgcagcgatcgctgagttcgagaaggccaaccccgacatcaaggtcaagcgcaccacctttgcgtttgcagacctgtccaagtccatccttcagggctcggtcggcggccaggttcccgatgtcgcagtcgtcgacgttgtcgacaaccagaacttcgcatccctgggaatgctcaaggatctgagcaacgacgggatcaacaagtctgacttcttcgaaggcccctggtcctcggtcgtttacgagggcaagacctacggcattccgctgaactccaacaacctggctctgtactacaacaagcagatgctcaaggatgcaggcgttgaggttccgaccgactgggcatccctcaaggaggtcgcaaagaagaccaccaagggtgatgtgaagggcatcgcgatctcggccgtgaagtccgagtccgctaccttccaggttctgcccttcgtgtggcagaccggcggtgacctgaacgattacgccacctctggcgcaacagctctggcctacctgcgtggcctgatcgacgacggctccatgtccgaggccgttacgaactacacccaggaagacgcacgtacccagttcatcaccggcaagtccgccatgatgatcaatggcccctgggagctggcaaccctgaccaaggacgcccagttcgactgggatgttgcacctctgcccaaggacaagcgcgcagcaacctcgatgggtggcgaaaacgttgtcgtcatgaacggtgccaagcagtctgatgcagcagtcaagctcgcaaagtacctgaccagcgcagaaggcgccaagatctactgcgatggctccggccagctgtcctctcgccctgacctcaagggcaagctcaagctctcggaggacgcaaagaacaaggtcttcgaaagccagctcgccgacgcacacgcacgtgcatacggcaaggactacccgaagatctccgaggccatccagctgtccatgcaggaagctctgacgggcgcatcaacccccgaggccgcagcaaagaaggccgcggacacgatcaaccccttgctgcccaagaactgagtagcgcaagaaaccggtttgcttggggcgatcgcgcctaggcaaccaacacacacataaagttccccgcgcgagtgggaacgcaacgatgagcaacggcttgaagccgcagcgaatctcccgctcgcgtggggaaacatccctgttttggtgctggcaggccactgagcccgccaggccacaacagtattcccacacaaacttcggatctgtgagtgaatttcgatggcgcgaacgaaaacagcgggccacgacgacggatcacgttctttggcgcgaacacggcgcctaggactgcttctggcgttacccgcactgatttacataacgatttttcttgttgtccccctgatctataacatctggctgtccatctctgacgcgaacggcgcaaacctcatttcgggtaactatcaccccacgggcctggcgaactatgaagcgatggtgaagagcccaggcttctggaatggcgtgaagctctccatcatctggacagttgcctcacttgccctgcaattccttgttggttacgcgctggccttgttcttccgcaaacctttcccgggtaatggcatcattcgcgcgctccttttggtcgcatggatccttcccgccgttgtcacgggcacgatcttccgctggatgttcgactctgacttcggcgtgatcaactacttcttgatgaccttgcacattgttgaccacccggtgatgtggctgaccggcccaacaaccgcaatgattgcaatcgtcgttgcaaacctgtgggttggcatgcccttcaatatgctgctgatcctttcgggccttcacaccatcgatgacggcctgtacgaggccgcagaggtcgacggtgctggcccgattcgtaccttcttctccatcaccgaacctctcatgcgccccgtggtgatttcactgctcttgcttggcgtcatcaatacctacaaggtcttcgacctgatctacacgatgaccaagggtggtcctgttgaggcgaccacaaccctgccgatcttcacctacctgcaaaccttcaaggtttttgacttcggtaatggtgctgcggcttcaatgctgaccatggttttgccgctggctctgtcgtggttctacgttcgttcgctggataaggaggaccagtgatgtctgaaaagaccgctgaagttcaagaaaaagtccagaccgtgacggacgaaagtgcacccaagggcggagcgctttccgcggcctcgggagcaaagggcttagcgaagacgaagcgcgaaaagcgcgagggacgcgtccggattgggaaatccgcatttgcgtgggtcatggcaattttctacctgttccccgtctactggatggtgtgtacggccttcaagacgcagatggaaacctttgcgcagcccccgcacctgattccgcaaaacccaaccctggcctcgttcagggtcgctttcagcgataacttcgggatctggaaggcgctggggaattcggcgatcatcgcagccggatgtttggtgctgacgctgcttttcgcaattcccgctgcttacgcaattgcgcgaatgagaagcacaatcacaacgggcatgttgatcttgctcagtgttgtccagctgcttcccgcgatcgcaatctcgattccgatgttcgtgcttttccgtcacgctggaatggtcaacacccttccctcgatcatcttggcggatgtgacgggaacactaccctttgcgattatcatgctgcgccccttcttcaagcagttccccaaggaagttgaagaggccgcgcgacttgatgggctaggcatcattggaaccattgtccgagtcgtcatcccgacgattcgtcccggtgtcattatgatcggttccttctccttcttgatgacatggggtgaatttacctttgccttgaccttgctcacgaaggcggatctgcagcctttgacggttgcgttgaaccgactcattggccagtacgcaacgaactggaatgacctgatggccgtcgcaacggttattgcgatccccgtcttgatcctgttcgtcgcccttcagaagtacatcgttgccggccttgccggcggcgcgacgaaggggtgaaaccctgaccctaaaagttgggtggtgagttgcttgggggcgtcggtgtgtgggccgatgcccccaagtttgtgcctgaaaggcaggaagagggcgttgccgaggctgggccgagttgctcttaggagcggcgcttggacacgtagccctggagcccgataaccgctgctcctcggcaccaggtttcattcgctggcgaggccaattcgatcttgaccagcgaggctcgtgggtcgcgggtttccgctaagccctggcgcatccatcgattgctcagcgatgccaaggcaacgccttcgccgccgataatgacgacttccggagccgtgaggttggcgattgcgccaatgagacgcccaagtgccaatcccgatgctcgcaagacagcggaaaccgcggggtcttcggcctcggccaacgagatcacatcgctccagctgagctcacggcccagagcttctgaaatagagcgggtaatcgcgggggttgtcagcattgattctgcgcagccgcgatgcccttgcgaacacagcgggcccagcgggtctaggggccagtgcccgaccaaaccgatccctgaatcctggttttccagcggccgtccatttgccacgcagccatagccggtgccgacgcccaaggtcaggaccgcgaaattccggtgctgtgcacccagatcaaaccagtgctgcgcctgtgtgtaggccgttaggtcatttgcgacgaaaacagggattgtgatgtgttcgcgcaaaagaccgacaagatcgacatcttcccattccaagaagggcgcggatcggatgatgccctgatctgtgacgacaccgccgatgcccacgccaatcgcgtcgatgcggaaagtcttttcggcccggcttaccaaggaggcaataccctcaacaacgtccttgggggagtgtgtgggaagaggaagctgatcgtagcttaagacctgtgccttcaggttaatgaccgcagcggtgaggcagtcgtcggcgactttgattcccag

SEQ ID NO: 4355 - DNA, 23306 bp, synthetic construct
  misc_feature 1..23306: note = Synthetic
  source 1..23306: mol_type = other DNA
atcttcgggctcatttccctgctccaggcaacgttctcactgggaggcagccttctcttcctcgaagtcgatgccgttcacccgtggctcttcatgctctcaggctgggtgagtgctctggtgtattccttcttcctgtacaccgtgaccgtgagctttgggaatatcggcaaagccatcggggtcatcatgctcgtcattcagatcaccggttcgggcggcagctatccgctggtcatgctccccaaacccatccaggcaatcagtcccttcttaccgatgactcactccatcgatgcgatccgcgcggccatcgcggggatctaccacgctgacttctggtggtcgatcggcggactgctcgccttcattccaccgctgctcctgctcggcttggtcctgcggcgcccactgatgcgctttaaccgctggtacgttgacaaagtcgaggaaacgcggatcatctcctagacagcatctcctggcagcggtgaacgccgaggtgaagctgtttcgggatgaaccttctaggcgaagtgagcggcgatctgtgcgagggcgtcctcccacatcccctgttcgttttcccagatctgacggaccacagcctcgtctgaatccaaggtcgaaatgccggactcttcgatgtgaactgcggttccgccgtcttcttcggacagggaaatctcaatgcgcgtgcactgatccgaatccagttcatcggaggctcgcggatcccagcggaatgaaatcatgtccatcgggtcctcgtcctcacgttcaaccagccactcaccggcgtcgggatcctcgacgtggtaaaccccgtcttcgtcacgctcaacctcgtgatcgtcaagcggcccgtcattcatccaccacccgggttcagagaccaccgcccacactgcttcctgtgtggcggcgacgacaacgtcagcttcaacgcggtcgacatcggtttctacctgggcatcttcagcttcgtaggtttccatatatcaacggtaaacggtgagttcggcttgggcgagtgcttcgggaagtttccccgatcaacacatgcctcctagcaatcttgctggcgagctggatcaggatacgcgagtgatgcggtaacgccacgcctcggggccggcttccagagtctcaacacggtagtgcgattcggactgctggagatgctcaaatagcggatcgggctgatgcggggtacggatcacgaggttttcgcccacgggcagctgatcaaccgcggcaaagagcagggcgcgtcggatgatccgcgggagggagtggaccaccagttcctcgacctcggtttcgctgggatgggcatcggcatgtccgtgtccgtggccgtggcccttaccgtgaccgccgcaaccgcagccaccgccgtgtccatgacccttcccgtgtccaccgcagccgcaaccgccaccgtttccgtgaccctcggcctcaccgtgcccgtgtccgccacagccacatccgccacccgatgccgaggtcgtcgcatgagcgtcgacgagcttaaacgtctggtgatcgccgttgggagcagcttcgggaagagtgtcaaccatgatcgtgtccttcgattgcggtcggatgagcaactgaaaatatcgtcagaagatacccggtgggggtacccgaccagtgtacggcggaacgcggttcgcggccagagcgcacaggctacccggtacaccaacgagggtcgtgtcgacgcagtctttcacgtgcccggcgcagtctttcagttctcgcggagggcgaactcgacctcgacctcgacggaacaattgagggggagggcggcaacacccaccgctgaacgcgcatgcgaggtgccaaaaatctccccgaatagctccgatgctccgttgatgacgccggcctgtccatagaagttgggacgcgaagcaacgaatcccacaaccttgacaacgccggccaagcggtcaatcccacctgccacatcagccgcagccgcaagagcattgagagcgcagatccgcgcggcatctttggcgtcatcggggtcggctccgtcctcgcccacagcaccgatacagacgacttcaccgccgacaacggggatctgcccagaagtccgtacaacaccgcggtcaagaaccgcgggaacatacgcagccacgggcgcaacgacctcgggaagctccactcccagctcagcaagtttttcggacggcagtgtcatggcaattcctttcgggcaacaggccgatcgccggttccggcgacgaacgcgggcacgatccatgcccgacccgcttaaatgtagtcgggtcaacaggccgggctcgtcctcgtccatccgtcaccgcactgacgtgggtcgcaaacgggttcccaggccggactcgtcctcgtcaatgattgacaacggggtcactcacgcgaaagaaaccacgcccgcgcagctcccagcaacgtgaaatgtgtgcagccgcaggtcgattctggaggactcaggagaagctgaaacaccgtattacggaagcattgcgtggcgaatttcagcgaaaccccggcaaagtttccacatcgtgacccgcactctccccacggtttcacaggatttaccacagccgcacacgaggtcccacgaatcgtcttaccgtcgaagacatggttgaagtgagaatccacggccgaggaggacaaggagtcgtcacggcgtccgatctgctggcgatggctgcctacacggacggacaccacgctcaggcctttccttcgttcggttcggaacgcatgggcgcacccgtcgtctcgttctgccgcatcacgcagtcagagattcggacacgcgaacccgtcctcgaacccgacgtcatcattgttcaagatccgacgctgctgcccgtcatggacgtattcgccggcatcaaacccaatggatacgtgctggtgaactcaacgaagagtttcaccgaactcggactgggtgacatggtcaacgcacttcccgctgggcatgcgcaaacgatccccgcgttcgatattgccaaagagttcgttggcaggcccgtgccgaacgccgtcatgctcggcggatttgcggctctcaccgggttgatccgcctcgagtccgttgtcggtgcaatccgcagtcgttttcccgggcgggtcggtgaggcaaacattgccgccgcaacgcacacctttgatctgatagctcaggctctgggttccacgcaggagacgccgtctggtgatgccgaccagcccaagtcgcagcccggcgaccacgacacacccgctggccacgaacaggagagaaccgatgcgtgaacaaattgaaggttcgcaggccatcgcgaaggccgttgctgcctgtcgtccagacgtcattgccgcctacccgatcagcccgcaaacccacatcgtcgaagcgctatcagcgctggtgaagaagggtgacctgccgggggcggaatacctcaacgtcgaatctgagttcggcgcgatgtcggcgtgcatcggtgcgtccgctgttggggcgcgcacctacacggcaaccgcatcccaaggtttgctcttcatggtcgaggccgtgtacaacgcttccggtctgggaatgcccatcgtcatgacggtggcgaaccgggcaatcggcgctccgattaacatttggaacgatcacacggacgcgatgagtcagcgcgactccgggtggcttcagctgtatgccgaaaccaaccaggaagccgctgacctgcatgttcaggcgttccgcatcgccgaggagctgtccttgcccgtcatggtgtgtatggacgggttcattctcacgcacgcaatggagctggtggacgttcccgaggccgaacaggtcgcgaagttcctccccgactacgagccacgccaggtcctcgaccccgagaaccccgtatctatcggcgcaatggttgggcctgaggcctacaccgaggtccgttatctggctcatcaccgccaaatgcaggcacttgagttgattccgcaggttcagaaagaattcgccgaggtcttcggacgtgattcgggtggtttggttcgcccctacctgttggatgatgcagaaaccgtcatcgtgtcgatgggttccgtacttggaaccatcaaggacgttgttgacgaacgccgcgagcgcggtgagaaaatcggtgttctcgggatcacgagcttccgtcctttccccacggacgcagtccgtgaagccctatcgggttgccagcggttcgtcaatgttgaaaaggcgttctcggtgggtatcggcggcatcgtgtcgtcgcattgccgtagcgccgttcgcggcctcgacctggagaactttgaggtgatcgcagggctgggtggccgccccatcacgaaggcgtcactgcacgggatgctcgatgacctggcggcggggtcgctcgccgagcaaacgttcctcgacctcgaccgtgatcttgtcgaggaagagttggcccgcgaagcacattcgcgcaggtcaggaccattagctgagaaccttgtccgcgcctcgcaagctcggacggacgcggtccttgaagagaacgaaggcactgacccggcccgcggcgcagctcgtgcccgcgcggcaagtcccttagcgaacggaagcgaagccggcgggctagtcggaaccgccaacgtgccggtgtccaccgacgccaaatccgaagagaagtgagcgactcatgagcacaccattgggaatccccggcgttcggcaaaccgaaattccggcgcgcgagcacgtgaagttctatcaggtcggctcctacgcggtaggtaaccgtctggctgaagagggcctcagatccgttcaatccgacccgaaccggtggaacaccctcaccagtggacaccgcgcctgtcaaggctgcggcgaagccctgggggcacgctacgccctcgactcagccgccgcagcgtccgacggcgacctcgtggccgtaaatgcaaccggctgccttgaagttttctccaccccgtaccccgaatccgcatggaccgttccgtggctccactcccttttcggaaacgccccggccgttgcggcgggagcagcagcgggcctacgcgcaaaaggcaagtcaacgcgcgtcatcgctcaaggtggcgacggcggcaccgtcgacatcggcatgggcacactgtcaggaatgttcgaacgcaacgacgacgtcctctacatttgctacgacaaccaggcgtacatgaacacgggagtccagcgttcaggcgcaaccccacccaccgctcgcacggcaacgacacagcccgttggccccaagcccggcaatcgcttcggtcagggcaaagacatggcccgcatcgcgatggcccacgaaatcccctacgtcgccaccgcaagcgttgcagacctgcgtgacctggaatttaaggtgacgaaagcaatgagcatgcacggtgctcgctacatccacgtcctcgttccctgtccactgggatggggatccgcatcgaacctcaccgtcacactcgcacgcctcgccacacaaaccggacttttcccaattttcgaggccgagggcggcgaaatcacctccgtcatgaagatccgccggccagctcccgtcgaggaatacctcaagccacagcggcgcttcgcacacctcttcaagggcggcggcgaacccgaggtcattgcgcgcctacaggccatcgccgaccgaaacatccgcaggtacggactcatcgacgaagatcagcttgacgacgacgtcctcgcccgtgtcctcgccgcacccgaggatcccgagggacgctacgaggcgatcctccacgcggcctcggaaacgaaacaggcacaagcgcaggcgcgcactcgcaatgcagccaccgaaaacccttcggacagagaagaccagtgacatgacgattgaaactcaaccttttgcgatcacgctgaacgtcggcagttcgctggcgaacgaaaccgggtcatggcgcacggaacgccccatgtacgtcgacttactccccccgtgcaacaagggctgtccctcgggggaaaacattcaacaatggctctaccacgccgaagaaggcgactacgagggtgcgtggcgtcagatcatgcgtgacaacccgctgcctgcgacaatggggcgcgtctgctaccacccgtgtcagacggtatgcaaccgcgcacaagttgacgaggccgtcggaatcaacgcgattgaacgtttcctcggtgacaaagccattgaggaagggtggaccgttcccgtcctcaacccaccgaccggcaaacgcgtcctcgttgtcggcgccgggccctcgggtctgtcggctgcgtatcacctggcgctcgcgggtcactccgttcacatcaaagaggccggtccgatggccggcggcatgatgcgtttcggtattcccgcctaccgtctgccgcgcgcagtgcttgacgcggagattcagcgaatcgaagacatgggtgtgactttcgagttcaacgccaaagttgacaatatcgaggacgaggtcggccagtgggatgccgtcttccttgctgtgggcgcacacatcggtaagcgcgcgtacattcccgcggggtcgtccgcgaagatcatggatgccgtctccgttctccaggacgtcgagaccggtgagaagccgatgcttggacgccgcgtcgttgtttacggcggcggtaatacggcaatcgacatggcgcgcaccgccaagcgcctgggggcgtccgaggcaatcattgtgtaccgtcgcacccgcgatcgcatgcccgctcacgacaccgaggtgatcgaggccgaggaagagggcatcatgatgcgttggctctcaaccgtcaagcacgttgatgagggcacgctgacgattgagaaaatggagcttgacgaaaacggattcccccagccaaccggcgagtttgaggagcttggcgccgattccctggtgatggctctcgggcaggaagctgacctgtcgctcattgagaacgcttccggcatcaccatcgaggacggcgtcgtccaggtatccaaccagatgatgacgggaatcgagggggtgttcgccggcggcgacatggtgccgtccgagcgtaccgtgaccgtggcgatcggtcacggtaagaaagcgtcgcgttacattgacgcgtatctgcgtggcacaacctacacgcccgcgcctaagcacccaaccgccgagttctcccgaatgaccccctggtactacgcggacgctccccatcaggtgcgcgaaaaacttgagggtgctcgccgagcttccacttttgacgaggtcgtccagggccttgatgagtcctcggctgtgtttgaggcacgccgctgcatgtcatgtggcaactgctttggctgtgacaactgtttcggtgtctgccccgacaacgcgatcacgaaaatcaagcccggcgaatatgaattcaagtacgactactgcaagggctgcgcggtgtgcgcacaggagtgcccctgcggtgcgatttcaatggttccggaggaggtgtaggggcagggggatcgtcatgtcagggtactgtcaggaatgggcccctcgacacccgcgaacaaacaccgtgaatttatgtttcaacaatccgacctgggataatcgacttattaccttctgatgcgaaaggcaccgacatggactcaacaagcgatcccaacgacttaacaggtcgatttctcaacgccgtcgaagaagcgaaaaaagcacttgagaatcaatacggcaggaagttcagcggactcaaaaccgccataatacatgcggatgaaaagaaacattccgtcgtgcgaaactaccgggatatattggatactctcgttgacctcaggaacgcaattcaacacggaaactacaacgcaggtaaacctatcgctgtgccacgcgaagacaccgtcgaattcatggagaaactcgcacgctggattgagcgggcaccccacatctccgactacatgatcagaaacgtcgatgtcttaaccccgaccgccaccctatctgaagcggcgaatagcgtcatcaagcacgacatctcccagatgcctgtctatgacggcaggaaatacatcggtctgttcaccacgaacgctatggcccggtggctcagcacaatcattgactcggatggcacactccttgccgatggtgtcaccgtcgcgactatccttgaccacgctgaggccaccgagcgagaaaagttcttcaaaccaactgctccggtctacacggtatgcaacgccctgagttccggtgatgggccagttgccgccttgattacgacagacggcaaagaaacgggtgaactccaaggacttgtcacacgctacgacgtatcgagaatactcaaggcaacgacgttatcactgaagtagttgtcggccgggtatcaaacatcaactgaggctcaagtggcagtcccagctttatcactgaaaacagttccgttaatgtcggtgtatgtcctgatatttgtctacctctttaacctgacttcgatcagaaccttcgttgctgctccaaagagtgtcagcgaccatcaacacggtagacgtggcctcaatgtctcacctttatcgcaacaatgcttaactggtcattgatgatttcactgatcacccgatagtcacctacgcgggaacgtcaataggcacccgggtttcctgataatgctttttcatgtgatcgggggtcattgagcccggccacatcacccggtgcttgcagaaccccgtcacggatcggggcagtcgaacttcttgagttccttgatcgcggctttctgacgcagcttcttctgagccttttcaaggtcacggaattctggagcccagtatgggtcttctggcatttcagcgcgcagccgggccatgagatcatcagacagaatcacgtcaccattgatgagcgggatcatcagtccacccattgcctcttcttgatcgttgttgtatccccggtcgctcatcgctacgttgttatctgggtcaggaacctggatagcgtacacacgcagatcgtcgtacagccgccgatattcttcatcagtgagttcactatcttcgaacagcatgatcatctcctacagcactcctgaatgcgctgttttaatctccacggcaccggctttatttcgacgaatagccactgtaactatttcgcccttaatagtagccgggaaggagccaacggactccccgtcccaatgattttcgaggacttcccgtatggcattggtgatgtcacgttgcgtccatgactgtgaaaactcgctacgccacctcatccccttggccttccatccgtgaccgtacatgtgtccgccgcctcggcttggacgactcccatagaggatgtgctcgagcatcctcgcggtcaacatgcccacctccacgtcgatcacctcgaggtccttgaagggctcagccgcccctgccactaaacctgacgcgtgacaatcgcgcacaatcggtgacgaaagccattaggaaactcggatctccccagcgcaaggacctcatacaagtgaccacgccagaatctaagcatggccatccgtaagcacgacccctcccttacttgtgacctgtgacagaccaggctgcgcactgcctcgccccacatttgccggttaaggtgaactgattccggagattaaccccaggtttccactgcttggaagccatcagaagatgccctccgatcaccaggtgaagctatcttcagaggtccgatcgaaaatcgaggtgcgcgagtatttgcagatctcttcaccgacgagcagatctctgatctttgccgaaaagagctacgcttaaaaatcaaccaatgagggactggtatcaactggaatggctaccgctcctgtctcatagcgggaaatcggtactgaacgaaatccatacattgtgtttcacgggcctcagatgcaggtgacgcatggcacaattctcttatgggtattatcgaaaacgaagcaggcaatcacctacggtaccgaatcgggattgatgtcggtagccactcaaccggctacgctgccgttgaggtcgatgattcggggatgccggtatctattctcaactccgtcgtattcatgcatgactcggggatcgatccggatggcgcgaaatttgcgcaaactcgcaaggctcgttcaggttttgcccgacgcgctcgccgcttggttcgggctcggaagaaacgcctcaagaatcttgatgaaacactaatgcaactgggatatccactggtcgacttagaaaccctcacagacccgcacgctccgtggcacatcagggcagccttaacagaccactttatcgaggatccggaagagcgtctcaaatcgatttctattgcaattcgtcatatcgcacgccatcgcgggtggcgaagcccctacgcaaagattgaaaccctgtttgtgacagcagaaccatccgagttcctcgttgccctcaactcccgcgtcggcgcggctcttggacagacgcttccgccggacctcactcccggtgaagtcatctcgcaatacttgacagatttcccagagggccggattcgtggcgccgaagggatcctcagcggcaagctccatcaaactgataatgcccaggagattcggctgatcgcgcagactcagaagctttctgacgacgacctcaatattttgctccgtaaggttttctatgcaaagtccccacgtggaagtgcgagcgcactccgcgggaaagatgcgttacctggccagggggcattacctcgtgcagaaaaagcacaccccgtttttcagcttttcaggatcgcaggtgtcctgacgaatcttcgcattgtccaaggaggtgtttcacgccagctcgaccccgacgaactgtccctgctcgtagacttactcacggactcaaatcgatccgacgacctgtcgtgggcagatgtcgcggagacgctcggggtcagccgacgagaacttagaggtaccgcaaaggagggcgttgatggcgctccctcgctgagccggccccctatcgacgtgaccgaccgagcaattcgcgagtccaagattccttggttggttgaatggtgggatagcgcggacctcgttcgccgtggtctgatgattgatgccctttccaacagcggcggctctcagatcgacacggaaatcgatgatgagattgccgaggtactcgaacaagcaaccgaaacggatcaggaaaaatttgaaaagatcaaccttccctcgggccgcgccgcatactccctagattcaatgagtcgcctcaccgacgcaatgctcgagatgggaatcgatctccacgaggcgcgaaagtatgtcttcagagtcgacgacacatggacgccgccggccgatccaatcggtctccccgttggcaatcccgctgtagatcgagtgacaaagcagatcaaccgatggctcatgggaattgagtcacgatttggcactcctgaatcgatctacatcgagcacgttcgtaatgcactcggtagtgagaaggtacgccgtgaatatgaacgggacattgagcggcgccgaaaggcgaacatggccacctatgagagcatgcgtgaacagttgaacatttctgggcgcactcgtcgctcagagcttatccgctaccaggcaatccaaagacaaggtgggaattgcgcgtactgtgggtgcgccatcgatttcagaacagcggagatggatcatattgttccgcgcgcaggtgccggctcaacaaatactcgatcgaacctgctcgcagtctgtaggcgttgcaaccattccaagggcaaaatgccgtttgctgtatgggccgctactacatcaaacgacaaagtgagtctcgagaacgtcatacaagctattcgcgtctgggaacgtgacagcggaatgactgcacaggcatttaatcgctttaaacgcgaagtaatcgaacgacttacactcactacgcccgacgacgagatcgatggtcgttcccttgagtccgtcgcatggatggcttccgagctacgccaccgaattgacgcgcactttaaccgacaagaaagaattgttgacgttgcagtattccgtggttcattgaccgcatcagccagaaaggctagcgggtttgaaaaccgtgtaaatctcatcggcgggcatgggaagacgcgctttgatcgtcgtcaccatgctatggatgccgtagtaatcgccctgatggatcgctctgttgcgaagaccctcgccgaacgcgatagtatccgtgacgctcagcgaatatccggtgaagctgaaacctggaagtcatatacgggggccactgtcgccacacaacaacggtggaaccgttggaaggactcaatgcttcgagcagttgagctattcaacttagcgttaactgacgacgctattccgattctcgagaacatgcgtttacggcaaggaagtggcgcgattcatgaggcaactatcagtgagctaagcaaagtagccctaggcgcagaactctcttccgaactcattgaccgtgccgctacaccggcactttggactgcattgacgagacaccctgactacaatccgagtaccggtcttcctgcagattcaaaccgacacattcgcgtaaacggcactcatttccgcgctgacgacaagctcccattcttcaagagcagttcagcatcggtcatggtcaggggtggttctgcacaactaggaaacgcaatccatcacgctcgaatctatagaattgagggcaagaagaagcctatctacgcaatgcttcgcgtttaccaaatcgatcttgccaaagtacaagatcgagatctctttactgctccccttgcaccctcaacaattagcgttcgaacagctgagccaaagctgcgcacggcgttggctagtggtacagctagttacatcggatggttggttgaaggagatgaacttcgtttggacccatcttcattcaatactcatgcaatcggaacatttttcagcgagtaccctaggtgtcaatcctggcggattgcaggatttccatcaccatcaagatttaggctccgtccaatggttctttcaggagaggggctgccagagggcgctggtgaagcaatccaaacaattacttttgatcgaggatggttatccactgtcaatactctcctatcaacgacagaattacaggtagtgaggcggaatgcgctcggagaacgtcgtattacccagaagacgtcccttccttcctcatatgtgttgaggtgagtgatgagtcggcaatggcagatccttgatcttacggaattcgatggcacaatcacctcggatcgaggagcgatctccttgacaaagaaacccgaagttcataagcgaatccccgttgccgatctcgcagtcgttcttgtcggaatgcatgttcatttcagcgcggccacacttcaccggctttgtgaagctgatgttgctgtcctattttgcgactggcggggcgttcccgagggtggcgcattctcttggtccgatcacggtcgcattgctgctcggcatcaagctcaagctcggctttcggaaccgcgccgaaagaacgcgtggggacgaatcgtcaaagcaaaggtactagggcaagcagccgtgctggatgctgccggccttccagagacaaaaacgctcgcagccctctcaaaggaagtacgttccggggatcccggaaacatcgaagcacaagcagcgcgcatctattggcaagcgctttttgacggagacaaacgtactcctggcacaagaagtgatgacggtctgaacgcatgtctcgactacggatatgccgtcctccgcggatttgtaattaaatctattttgagcgcaggattgtcagcgcctctaggacttttccaccacggtcgcggtaacgcgttcgcattggcagacgacttgatcgagccgtttcgaccatgcattgatcacgtggtctttcagttggacactaccgcttctcctagcgaccgggccattaaacagctcttggtggctgctgccaaacaaccattttctgacgacggacgagggatccctgcagtcctcgatgactttgcacagcaactcggtcagtacatcgaagggcagcgtgaacggctaaatccaccaacctggagggggccaattcagaccaaggattctacacatgccggatgattctatgtggtgcctcgtgatgttcgatcttccggttgagacaaaaactcaacggcgtgaagcttctcgttttcgacacactcttctcgattggggcttctctatggtccagttctctgtgtacattaagtattggccagcgggtggctggaattacgccacgataaatgcaataaagacctatctgcccgagggaggacaggtccgaataatcgcattgaccgatcgtcagtggtccacggggctccgttttgagaacgcgaagccacaaacacccgagtcagaacccgaacagctcatgattttttaacggaaaatctttagttttccttgtaattccaagggaaaatcgtccccctgaagtctatcagggggaacgatgactgattcccagccaggacggggcagaaacatcgggaaaacgaagtctatcagggggaacgatgactgattcccagcgatacgcgcgtggggatcgttcacggcagaagtctatcagggggaacgatgactgattcccagctccgggcacacggatagcgtcgggagctgaagtctatcagggggaacgatgactgattcccagctgtgttgcggcgagtgttgttgcttggggaagtctatcagggggaacgatgactgattcccagcccaacaacaaaccagacgcggcgccgaagaagtctatcagggggaacgatgactgattcccagcatttcgactccatacatgctggcaagcagaagtctatcagggggaacgatgactgattcccagccgcgggcggcgcgggttgcgcctgatgtgaagtctatcagggggaacgatgactgattcccagcgaagcgcaggatgtgattgtgcgtctgggaagtctatcagggggaacgatgactgattcccagcgtcatacatgcggcgagactccagtctggaagtctatcagggggaacgatgactgattcccagccccggggatgttccttcggtttaccggggaagtctatcagggggaacgatgactgattcccagcaaacggatgcctgacgaatatcattctcgaagtctatcagggggaacgatgactgattcccagcaaaggcgttgacgaacatcgacgctcacgaagtctatcagggggaacgatgactgattcccagcaatgaaattctttgccgcttgcgtagtagaagtctatcagggggaacgatgactgattcccagcgttcacactcgtttcctgtgtaaccctagaagtctatcaggggaaacgacgactgattcccaactaggaattctctctactgtgtcggtcccgaccctatcagaacatattccgtacgcacatccgcgacaagcagatgcaccactctaaagcagtaagcatcaattcgcaccatctgaacccgatgcctcgcatgacgcggtactcatgtcaactgatgttgtgcatcaactgaccgtagacgttgacgcgctgcacggtcagattcagatccgaagattcaaaggtaaacatggagaattcctatcgaactattatagactttcctcagcattcacagtcctccctcgtcgctacgaatcattcatacggaaggtgacccgcgatgccaaagttgactctcacccaacttgcactctcgatgtccttgattgtcctgacaatcttcattgggttcctcattcccggaaaaggccgccaccgcaagggtcgacgctagccggtccgcaggtacatcacggatcaaacgaatcagctgtcatcggcgatccgcacgcgatacctcgtctccatcccaagtttctgcgtcagcagggctaatccgtatagagtcctcgtcagtgcggtcattgtggacaagtctccgcacccaccacaccaatccccggggccctcactcacatccccgaccggatcgcctccatgacgcgcacgccgtcaagtaacggcatgtagggcagcggatccgtgccggtttccagcacgtattcggtgagttggttgcggacgaccgcttttagcgcttcgggatcccagggtttcgcaatgtaatagtcgaggccagcttcgttgacggcgcggatcgtgtcctcttggttggcctgaccggtgacgaggacggtgcggacagcactcaagcgctcatcggccacgagttcgacgaggaagtcgactccggatcgacccgggagacggtgatcggaaagaaccagagcaagttcgtcaccatcagcttcgatttctttgataacggcccatgcgtcgtcgacgtcctcggccatctctaggcggaatcgatcaaggtaattctcaaggtcacgttcgagggcttcgcgaacgtccgcttcatcttcaagggaaagaatcgtcagtgtcatcgttactcctgagttcacttgatttcgtaggttattcactaggtgtggtttattccaaaatcgtcatctggaaagggacattcgttccccagggagacgagaacgcgagctggcgcgatcccattgtcatgttggagggggaagattcagttccccggccagcccgccagaacccccggtcgacccgtcaaaatccctaaccaacccaccagaacccccggtcgacccgccagactccccaaccagcccgccagaacccccagccaacccaccagactccccagccaagtcaatgggcagcctcacggaaatgcgggtgcacccgggccgcgaatcaatggtcagggttccagagtggtccgaaacaatcgactgaacaatggacattcccattcccagaccgaaccgcacgcgcccagctttcgttgtgaagtgtggctcgaagatcttgtcgatgagttcaggtgcgataccggggccgttgtcggcgatgatcacctcgatccacttacctgaacattcaactgacacggagcgcacgatcacatcaatatgcgcgccctcgccaatctgcccttccccttcaagggcttcggcggcgttgaccagcaggttcgtccacacttgctgaagtttcgcaggatgcccaatgatttcggggacatccgcatagtcacgttcaacgtcgattccacgcaatcggtggttcgtcaggcggagcacgtcctcgattccctcggcaacggacagcggacgtttctcgtcggcgtcgggccgggcataccctttgagggaatgagtcagtgtgatgacccgctgcgacgcagcaatcacggaacgcagggacgcacccagacgcgcgccagcctcgatggattcgaggtcacgtccggatcccgccagcacagcacgtgcttcctctggcgtttcaaccccaagacgaacgagccgccgagcgaggttccgatcctctccgacctcgggcagaatggtgcgaaccagttcgcgatcccgcgcagttgaccgaggtgcctgggtgagagcctgttccatagcgaccctcgcagacgcaagctcgggtgagcctttgaggaggcggtccgcgtcctcgccaacatgctcggcggctcgaacaagagctgtcacggggttgttcagttcgtgagcaatcccggcggacagttcaccgagcatcgcgaactttgcacgttcaaccaactgagcgcgagtgtttcgcaggtcttcaagcgcttcggcgagatgtgttttctgtgcctcaagatcctcagccagcatggcgttttgcaggtggaggtcttcggcgcgcatgagccggcgcgtgagtgagcgaatcgccagcgcggtcagagtcgacccgatcgacgggttattcgccagaacaatctgaagctgttcggttgtcagtcgcacgagggtcgtcggcgaggtcgtcacaccggtaaagaacgcagattcaccgcgtgccagggaaaccagtccgatcaggggtcctgacgacgcgtgatgagcgaggacctccccccgagcggaatcgcgatgaagggaaacgtctccatcgagtacgaggtgcaccgcgctcacccgctccccctgagtcaccagctgggttccgggcggcaccgtgagacgaggacgatggccgaggacgcgttcaacccctgcgaggaggtcgaggacgacgcggcgttcggaaatgcccaggccttcaagaagtggcccttgcacggcttcggcgggaggatgaccgatgagcgaaatgatctgatctcgggtgcgcccctcgccctgcatatgacgcaccatcgttgagtaggactgtccaatgagaagcggcaccgtccagggcacggtaacgatcgacgtaatgaggtctttcgtggtggcacgcgtcaggtcagaatgggtgtcacggtcggtaacaaccatccatcgggtcattgcgaggatcggcatgctctccgtgtccgcgagcgcagaatcaatatcctgcacctctgatgtgatgataccgagggccacgtgatcggacggacccaggctcgcgttgtagcgcggaaggtcagctggcccatcaatgtggtcgaggcagaggcgagggaacgcccgcgccatgtccagtgtgagtgcatgcgcgatcagcgatgagttgtcgccgatgacgagaacatggacgtcgaatcctggtcgatgtcccgtgtgaatggcgtcggtgcgttcccacaggcgctcgtcgtgttccccaaggacctgtgtccatccgaggtggccaacgtcaacatccccgtgcgtcgaagtcatcgtttctctccccgatttagatgattccgagtgcgccccatgtcaggggtgcaacgagggcgaggaggatcacgccgacaacaccgacaacgaggccgacgatcgtcatttctttcgtcggtgttgtccccgttgagtaggcgatggcgttcggcggggtggagatcggcaggcacattcccagggagcagccaagggcgaggacgatggcgatttctgcggttgaggagtcaacggttgttgccaagccaattcccatcgggatcaggagatttgccgaggccgagtgcgagatgacattcgaggttacccatccaacgagggcaaggaccagcaggaggagcaccgcgggaattgcttcccattcgattgatcccaggagccaggtgtccagcccggtggagccaactccactgccgagggcgatgccgccggcaacgagccacagcaccggccagtcaagggttttcaggtcgtcgccggtcatgactttgaggacgaggaggacaacaacggggatgaatccgacgacgtttgaggagagtccgtggatggcttcggtcatccacaagatgacggtgatcacggcggtgacgtagaagattgtggcgttgcgtgaggtgtcgaacttcgctgaagtgtcaacgacgaacgggacatctccggggatgtagcgccacgaaatgaagacccacgagacggcaaggacgacgagcatcagggggacggcggcaagcatccaatcaaggaaggagatcgacatgccgatggtgtcgagtgctcccagggcgatggcgttaggaggtgtcccaacgggggttcccatgcctccaacatttgcagcaaccgggatcgacagggcgatcccggtgcgtgctttcccttcgggtagccccaggatcaccggcatcatcacggcgaacatcgttgccgttgtcgccgtgttcgacatgaacatcgacatgagcgcggtgatcagcatgatccccatgacggtcagacgcggattgccgaggaagggtttaagcaagacagctgagagcgctcggtcaaccttgtactttgcggcaccgtcggcaagcatgaatccgccgaggaacagaataatcacgggattcgccagggccccgaagaaagttgtataggcgggcgcgtcctcggccacagccaggattgctttgtcggaaacgaagaggacttccaggagcatcaccagcgccgccgtggcgaacagcgggatggcttcggtgacccacaggaggatcgcggcaaggaaaatcccgaacattcgtgatcctgctgggtcgaggccgggaagctcaacgaagaggaacgtgacaacagcgatagcggcaccaacttggccgataattttcgccggactgattccggattcttttgttactggttttcttttcgtggttccacggggattgagcgtcagcgacgcccgcgatcgggtagccataaaaatcaagacctcgttgtctcggttaaaaaatagcatgaccagtctatgtcaacgctcacattttttctcgagatcccttcctcaataagaacgcaccgagcattttcccaggagttcctggcagactagcggacgtgccagccagaccctcccgtcctcacctccgcagccgcaaccacgccacatccgccgtgacgcccacccccgtccgaaagaccgccgcggcgctgagcccaacagacatcgcaacctgcggggcgttggcatccctcgcggtgacactggggatccttgccaccgtgatcaccccattcgcactattcctccaggtcggttcggcggttcctctggcgatgattgccgtgcgtttgcgcccccgagccaccgttgccgccgttgtcacaacactcctgatgacgatggcagttggtggattgtcctgcgtgtggacggttgcccagtcggcaatcgttggagtgatcgttggctccctcatgcgccgcgggatgcgctggccggggatcattgtcaccggaattgtcctcgggggaatcgttggtgcagccgtcacgggtgtcctgtggattctcgacgatctgcgcaccctatttcttgaatccttccgcaccagtctcaatggctacgtcacgctcctgggtaaaatccccggtcttcagggcgcctcaacatccctgtcacacgcaatctcagtgcttgtggatacctggtggatatgggttcccctcatgtcactgatctcaatggcactgctcgtcgtcattgcatattggcttctcggcgcgatcctgcgacgcattgatctggcctccgggtgggacccgctcattgcggcgacgtcctcgaccactcgcaccgcaccacaggattcctcgcttccgtcacgctcaccaggggattcgtcctcgttcatcattgacgaggacgaggccgcctcacctcttcccgtccgcgtcagtcacgcgtccttcagttatccaggatcgcagcagcccgcattatccgatgtcagcgtcacaatcaatgcgggcgagttcgttgttgtcgaggggccgaatggttcggggaagtcaacgctcgcgctacttctcgccggggcgcaaccaacggcgggaaccatcgaatatggcgagggcgaggcgcgcctggggcaataccgtggagtggccttcgtgtcacagcgctcggagttgcagatgctcggtgagacagttgccgacgatgtcctgtgggggctgtctgcccacgagcgagcccgcgttgatcttcccgctgttttggccacggtgggacttggaggacaagaagacgcgttgacgcggcacctgtcgggtggacagcttcaacgtctgtcgttggccggtgctctcgtgaggcgtcccagcctactgatcagcgatgaatcaacggcgatgattgatcagcagggccgccgggaacttctcgacatcctcgcttcacttccccagtcgggaacaagcgttgtccacatcacccatgacgtgaccgagactcagcgtgccgaccgggttattcatgtgcgcgagggtcgcattgtgtctggggaaaccgcgctcgtcctcgccaatgaatccgagaacgctcccgatccggcgacaccggtacctgacccctccaatccacaggccacggaaagggacaccccagatattcctgcgccaatgccggacgcgccgacctatcgtccacccggtgaacacctgtgggccaacggcgttgcccatacctacgacgtgggaaccccgtgggagaacccggtcctgcgcgatgtcacgttcattctctctcccgggcaggggcttctcatcaccggaggaaatgggtcgggaaagacgacgctgtcacgaatcctcaccggactcatcgagccgacgtggggcaagtgcacgctcggctcagacccgatgacctcaagaatcggagatgtcgcgctgtcgatgcaatttgcccggcttcaactccagcgcccatccgtgcgctccgacatccttgccgccgcaggtcacggccccgccattgggaacggctccgaaaaagatgccgtcgtgggtcatgatgacgccgccacgcagcctcgacgcttcaggcgccgaggagctgcccaccggcgccgaggcaggcaaagcacccgtgatgcggcagtgctcccacgcgaacagcaggacctcattgaccgagcgatgcgttcagttggtctcgatccagatcttgcgactcggagcatcgacgaactttccggtggtcagatgcgccgcgtggcccttgccgggctgctcgcctccgaccctcaggttctcgtccttgatgaaccgatggcgggccttgacacccaatcgcggtcactcctcattgacgttcttgccgagcggcgacgccagggcctcgccgtcctcgtgatctcgcatgacaccgacgggctggacgccctatgcaccgaccgcatggagctgaccgaagggatcctccgatgacccagcagatgtccatgcagcacggcaataacgaggacgaggcagcggcctcggctccggcaatgcgccacgcagaggcacccagcgatctcgcacctgaggtgacgcctcgtcctcgtcaatcgaaaccacgtaaacccgcatcatttgccccgccacgcacgctgccgtgggatagcggactgacgcgcacctggccgggcaccctgatcctcagttggactgtcctgacaaccattcttctcgtgaaacccacgtggatcaccgtcggagcgctggcgtcattgctcgcgattgcaacactgatcattcgtgttcccgcaagcgcactccctcgtcccccgatctggttctggtccgggctcatcgggggattcgtcggcgcgacc

SEQ ID NO: 4356 - DNA, 23288 bp, synthetic construct
  source 1..23288: mol_type = other DNA
  misc_feature 1..23288: note = Synthetic
cactgtcagtccttccgctatcactcagcatcagttgcgattgcctgaacgatatcagctaagaggcgcgcaattctgggagcggcctcctgaccggctgcgatcacctcggcatgcgagaggggttcaggtgagattcctgctgccagattcgtcatgagtgagatgccgaggatctccatgccggcttcgcgcgccgctatcgcctcgagcgtggtggacatgcccaccaggtcgccgcccaggatccctgccatcttcacttcggcgggggtttcatagtgtgggccggggaactggacatacacgccttcaggcaaggtcgggtcaatcgtgtgagcgacagtgcgcagacgctgcgaatacaggtcggtcaggtcgacaaatgtagcgccctccagcggggaagcgccggtgagattgatatggtcgcggatcagaaccgcctggccggggctccactgtgggttcagccctccacacccgttggtcaggacgacggtgcgagctcctgcggccgctgctgtcctcatcccgtgggcaaccgctcgcactcctttgccttcgtagtagtgcgttcgtgaacccaggacgagggcgactgtgtcagatccgtgcacccgaattgagcgcatgacgggaacgtggccagccactgcgggagcaaagaagcccggcacttctgctgcagggatttcgctgattgtttcaccgatcaggtcggctgctccgccccatcctgatcccagcacgagcgcaatgtcgtggtggtcgatgccggagcggcgcgcaatggtgtccgctgcgtgccgcgcaagttcaccaggtatggggtcggtagagtcgtcgcaggtgccgtgagtgtgaacgtcagatcgggtcatgaggataacgctacaacgaggacctattatttttctgtaaacaatcgggcaacgtcgctgacatgccgatcacaccaaggagaggttgatggaaagtcaggaaaaccatccccacaaacgcacctatatgcgcggccccgttatgctgcgaggaaaccagataccgaaggaaacctcggaaacgcgcttgctgcggccacagaaagacactgactgggtgcatgaagacccgtggcgcgtgctgaggatccaggcggagttcgttgaagggttcggagcgctgagcgagctggggccggctgtgtcggtcttcggttcggcacgcacgcaggaagacgatccgtattgggaatacgcgcagatgattggccgactgctggtcgaatcgggatatgccgtcatcaccggcggtggtccgggggcgatggcggcggcgaacaaaggtgcttttgaagcgggcggggcttccgtcggcctgggcattgagctgccgatggagcaggcaatgaaccagtgggtgaacatggggatcaacttccgctacttcttcgcccgtaagaccatgttcgtgaagtattcgtgtggattcatcgtcatgcccggtggttttggcacgatggatgaactgttcgaagcggtcacgctggtgcagaccggcaaggtccaggcatttccgttggtcttgatcgggtcagactactggggtgggctggtcgagtgggtacgttccacaatggtgactcacggtgcgatttcgcccggtgacccggacctgttcacgctcgttgacgatccgcgtgaagctgtcgccatcattcgtgaacgcacgaaagagtgatttttcagcgtaatttcgcctgtgcgcatcccattttgcggcagtcacggtagaatggatgtgtccactgccaagcgcagattgcgtgtcggcagcagtgaaaaccataccaaggagcgtgagacatggcagccatgaaacctcggactggtgacggtcccctcgaggccaccaaagaagggcgcggcattgtgatgcgtattcccagtgaaggtggcggacggctggtcatcgagctcacgcctgaggaggcgaaagacctctccgaggcactgtcacaggctgtgtgacgtgtagctggaccaaggggtctcatcgtgcggcagacgcatggtgagacccttcgtttatgcccggtcaggctttgacagcaaccaggacgccgtcaccgaccggaagcagcgaggtgacgaaatcctccgtttcacccatcacgcgaatcacttcacgcatgacaacggtttcctcgtcacggcgggccggatctgcgactcggtcatgccacaatgcgtgtaccaccaccgctgtgccgcctgggcggaggatgcgcagcgcatggtcgaggtattcaggcgtttccttcacgtcagcgtcaatgacgatcatgtcgtaggcgccggctgccatgcggggcagtacatcaagcgccctgccagagatcaggcgtgtgtggccggaaccccggccggccgattcaaatgcgcggcgggcatgacgatggaattcaggttccacgtcaattgtggtgagcacaccgttggtcggaatcccctcaagcatccacaggcctgacacacctgcacccgtgccgatttccaggacagctttcgctccggtgcacgaggcaagcatccgcagcgttgcgccgacacctgttgaaataggctcagctcccagctcgatggcaacgtcgcgcgcgcgccgaatggtctcagattcgctgacgaattcttctgaaaaaacccaggtttgcgctttatctgatgtcacgacgtcctcccacacccacatgaatcattcacgttgtcctcaagcctaccttgattgaacggcggctggtgatttcacgtgccgcgttatccgaggcgccctccctgtgcaggtgtcacgttcaggtgcattccggccagtccgtgcttgcgctgtcccagcagcgcgcccaccgttttcaagacggttgctgcgtcaccttcgccactcaggacgatgggggagccggagtcgccgccctcgcgcaagtgaatgtcgagcggaatctgggccaggagcggcacgtcgtatccgagttgtgcacttaggcgtgccgatacggattcgccgccgccggtgccgaacacttcgaggcgcgacccgtccggctggaccaggtaggacatgttctcgatgacgccgaggacgtgctgctgggtctgcgctgcgatggagccggcacgttccgcaacctctgccgccgcaacctgcggagtggtgacgaccaggatttcagaggttggcagcagttgtgcgatggagattgccacatcaccggtgccgggaggcatatcgatgagcagaacgtccaggtcaccccagaatacgtccgcgaggaactgctggagtgcgcggtgcagcatcggtccgcgccacacgacggcctggccgtccggaacaaacatgccgattgagacgaccttgacgccgccggcaccgatcggcggaatgatcatgccgtccagaacctgcggctcatgaaccacgcccatcatgcgcggaatggagaagccataaatgtcagcgtcgaggacgccaactttcaggccggcggacgccattgctccggccaggttcgccgtcatggacgacttgccaaccccgcccttgccggatgtgaccgcaatgatgcgggtgagtgaatcgggcttgttgaagaggatctcgcgttcggccttcccgccgttgagcttttcacgtaaagctttcttttgctcgtcattcatgacgcccatcgtgacctcgacggtttcgataccgtcaacggcacccaccgcagccttgatgtcgcgcgtgatcgtctcgtggaggggacagcccgcagtggtcagcaggacaccgatatgagcggtggtcccgtcgatacggacctcgtcgatcatgttgaggtcggtgaccgggcggtgcagttccggatccatcaccgtttcaagagcggagtggacagcgtgttcaatggacgtttcagacatgtaatccatcgtacttggccgacacaaactcgccaggtgggtcacgccacacggggacggataatgctaggcgtccttctgcccagccagttcggcgcggacctgttgggtcacttcctggcggacttcgtcctccagttcggcgcggatccgggcgcgtagggacgcctcgtcggttccgttgccttcctggagttcgtcgagcatgtcacgaagttcggagcgtacgaagtcgcgggtggccatatcctgcaggctcaaacgcaaaccggcgatctcgcgcgtgaggtattccgtgtccgtcaggttgcgttcggcgcgctgccggtcctgctcggcctgtacgcggtcacgatcgtcctgacggttctgcgccagcaggatcagaggtgccgagtacgatgcctgcagtgacagcatcagcgtcagtgcggtgaaaccaagttctgccttgtcgaattggagcctgtcgggcgccagagtgttccagccgatccacagggcgacgaacaccgtcagatagacgatgaactgcggggtgccggaaaaacgcgcgaggcgttcggctgcgcgccccattccttccgattcgaggttgatgcgcgggagcctgcggcggcggtcagcgggtgtgtccaaacggtcagccatcgatgctccttgccatcaacttgtcggtcacgtcatcatcaaagtcacgccagtcggtcggcagcaacgcgtctaggacgtcgtcaacggagacagcgcccagaagaacgtcgtcctcgtcggtgacgggcaccagagacaggttgtacgttgccatcagacgagtgaccgtcgcgatgtgaacggtgggggagacggcctcaatgtcatcatcgaggatcgttcccagcagtgtttggggtggttcacgcagtgcgcgctggatgtgcacaacccccaggaacgggccggtcggtgtttcctggggtgggcgcgtgacacacacgatggatgccagcgatgcgggcaggtcagtgcgccgcacagcggccagcatctgcgccacggttgcgtcagggccgaggatgacgggctcggtggtcatcagcgagccggccgttgattcggcataggtcagcagccttcgcacgtcctgtgcttcttcgggacccatccgagccagcagggattgcgcaatcggatcaggcagctcagagatcaggtcggccgcgtcgtcaggctgcatttcgtcgaggatgtcggcggcgcgtccagtctccaatgcggacacgatttgcacgcggtcatcatcaccgagttcttcgagcacgtcggccagtcggtgttcaggcagttcctgagcgaccgcgagctggcggtcagcgggcaggtcatgcaggaagtccgccaggtcagctgccttcatgtcctcggtgtattggatgagtgcggtggcggtctggtcggagtcggcaatgaagagtccggtggtttgtggaatatcgacggtcagggtttcgcctccgcggcggaatcccaacgtgttgaggcgctgacgctggacgtgcagtttggtgagcacccagtcacgagggcgacgctgctccatcgccacgtcgaggatttttgcttcgccgctgccatcgttcattgtgatgatgcggtcgaagagctgggaaatgacgagtgcttcagctggccgctgattgaagcggcgcagattcagcaggcccgtgatgataacagctccggattcgatggaggtgacgcgagtgaaaggcaggaagatcctgcgacgcggtccgacctcgatgacgaagccgatgacgttcgccggggtcttgagtcgcatggccacgacgacgtcatggatggtgccaactttttcacccaacgggtcaaaaacgcctgtgccggcaagcttggcgacgaagatgcggcgacgtccgggcgtcacggtggttggagcagcagtattcacacaatcagtctaggctgaattcatacgcgtcaggtgatgtgaggtttcacgaggcgtaggaaaactttatggtgtgatgtgaaagaggattaaaaatggcacgccgccacggttcggcgctccttgcgccaacaatgccatccggtacagaggttggctcatacaagacctatatggaagcgtcagatgcggttgactatctgagtgatcagggattcgatgttcagttcatcacgattgtcggcacggacctgcacatggtggagcgtgtgaccggcaagctgacgaccgggaaggtcgccgcgtcgggtgctgcgtcgggcgcattgtggggcgcgttcatcgggctgctgatgtccttttcactccaaagcaacatgttgccgttcatgctgctgtcgctgggtggtggcgcactgatcggtgtcatcatgtcggtgctgttctacgcgctgacagggtcgcgtcgagatttcacgtcgcattcacagaccgtagcctcacgctacgcggtgctggcagcggcgcagattgaagaggcctacaagttgctgcaaaatacgcgtggcaacctgatccagccgatccgtcagcgcaggcagcgcccggaaccgactggtccgactgagtacggctcacgtgctgatgaacagccacgtttcggtgtgcgcctggaagaaggacagcgcgagcaagaccaggaacaggcggacgaggctccacggaatgaatcggtcgacccgtgggcggcgcccagcaaagaaggcggggacaccgctcagcagtagcccccgccttcgtgcgaacggtcagcggttacttgccgctggcctgcacctcggcaatccatgcttcgacatcgtcgatggtgcggggaatgtcctcggaaatgcgggtcactgaaccatcagcgttgacctgcacgtcatcttcaatacgcacgccgattccgcgcagctcctcgggaacagcgaggtcgtcggcacggaagtacagtcccggctcaatggtgaaggtcatacctggctccagcagcgcatcctgatacagctcgcgacgagcctgcgcgcagtcatgcacgtcgagacccaggtggtgagacgtgccgtgcggcatccaccggcggtgctgctggccttcactggacagtgactccttcgcgctgaccggcagaatgccccactgctcgaggcgatccgccagtacctccatcgccgcgtcatgaatatcgcggaaacgggtgttcggttgccctgcacgcttcaaggctgcttcacacgcatcgagcacagcctggtagaccttcttctgcggttcggtgaaggtgccgttgacaggcagtgttcgggtgatgtcggcggtgtagagggagtcgacttcgatgccggcgtcgaccagaaccaggtcgccctcgcgaacgggaccgtcattgtcaatccagtgcagagtgtttgcgtgattaccggaagcggcgattgtttcatagcccaggccgttgccctcctcgcgggcgacagcaccgaatgcaccttcaatgacgcgctccccacggcggtgtccgactgcgcgaggcaggctgcggataatgtcatcaaaaccctgtttggtgacctcaaccgcgtggcgcagttccgacagctcgtattcatccttcttgaggcggatctcagacagatgctcctggagcttctcatcatcgggcagtgcgtccccgccgacgggtagccccgcctgctggcgctcttcgttaaccattgcttccacgttcccatcaacaccgggcacgatgcgcagctgaacctggccggcatctttagccagcgcgtcgcgcagcgtgtcgatatgtgcgcacttgaggccggtcattgcttccatctcagcgatcgacgggcgcgctcccacccagaattcgccgtagcgtgaatcagcgtagaactcctctgaagatcgtgaggcgcgcggcttgaagtacaggacagcttcatgggtagcgcccgacgcgtcaccctcgtcaatggggtcgaggacgaggacggtgtcaggctctttttccccacccaggccggacaggtgcgcgaacgctgaatgcgggcggaaacggtagtcgcagtcattggaacgtaccttgtaggtgccggctggaataaccaggcgctgtccggcaaagggtgctccggcaagttggtgccgggctgccaggtagtccgctgctccgcctcgttcgggcaggtcattgggacgaggaccccagttcgagccgatgaaagcgcggaacgcctctgaggtgggacggcgcgagcgcgtattgccgcggtcagccatcgtttgatcagttgattgttcagtttcggtttcgttctcactcatgcttctatgttctcactttcagcgatcaatgctgcgctgagcccgccagttttccttagcgcgcgtgtgccgatacggtacatacatgatccgcattgacccgcatactcactcggcctgctcggatgggacggacactcccgctcaactcatgatggctgcatcccgcgtgggcctggacgtggtggggctgactgatcacgacacgaccgccgggtgggaggacgcggcggcgatggtggagcgcaccggggtggcgctcatgcgtggcattgaaatgtccacagcgtcgaacgggatcagtgctcacgtgctggcgtacatgcctgaccccttgttccctgagctggttgagacgatgcggtgctcgcgggaatcgcgcgaggaacgggcacgcaagattgtgcagaacctgtcggcagactttccgatcacgtgggacgctgtcgttgcgcagacgcggggcgagaacgtgccggtggggcgccctcacattgctgacgcattggtcgaggcaggtgtgttccctgatcgcggggctgcatttgacggagccctgcatccctcgttgaagtactacgtgcactactgggctcctgacccggttgataccgttcgtctgattcgtcgcgcgggcggtgtccccgttctggcacatccgagggcgagggcgaggcagcgaatcctgagcgaagacgtcattgctgacatggcagaagccggtttattcggtctggaacgtgaccaccgcgaccacgacgctgctgctcgtgaggaagtggagcgcatcgcggatcggctgggactgcatgtgacaggatcgtcggactatcacggccagggaaagccgaaccagcttggagaaaatctgacatcagagtatgtttatcgggcagtggaagaacaagccagcctggaggtcgtacgcccgtgaacgtcgctgagatcctcaatatcggtttgctcgccacgacgtttacgaagctgtttgtcatcatggacccgattgggacggtcccggtgtttttgtcgctcacggggcgctattcggtggccgacaagaggcgcgccgcagtgcaggccacggtcacctcgctgggtgtgatcttgctgttcgctgcgatcggacagtacattttgcagttcctggagatttccactgaatcgctgcaactgtcgggcggtttcctgttgttcctggtggcgatggagttgctgacggaaaaagaccaggacgaacctgacaccggggatcacaatgtcaacgtcgcgctggttccgctgggcacgcctctcctggccggtccgggcgcaatcgttgccgtcatggtggcggtgacgaattcgggtaagacaatctcggggtgggtggcagttgccctggcggtcgtgctgatgcacgtggtgatttggctgacgatgcgtttttccgttgagctggccaaattcctgggccagggtggcatcatgatcctgacgaagatcgccggtttgctgctggcggcgattgccacacagatggtgatgacagcgatcttcacttttgtgcgtcatgcggggttgtagcgctgagctaattttgttgacatatctatggttgagtcattatcatgataatgactgattctcaataaggtttcgcctttgttcgcggaactgattgctccaccgggcgctttttaagcgcccggttttcattttggacccaaatgccatagggatgtgacaccctattcccatggaacaagaagcaatgacgcaacggcattatcgcgcaggaattgatgttggaacgaactcaatagggttttctctcgtcgaggtcgatgacgacggttatcctaccgatctaacaaattcggtggtcgttatacacgattcgggtgtcgatcctgatgcgcaagacgcaggagactcacgccgcgctgtttcaggcgtagcaaggcgtgcacgacgtctctataaacgggcgaagaagcgcctcgacaggctagatgcgtatattgaatctttaggatggccgcttattgaccttgagtcctatcaagatccacggcgggcgtggagcattcgggcagccttagcaaatgagcaaattactgattccacggtcctacatgagtatttgtctgttgcgatggtgcatattgctcaccatcggggctggcgtaatccatatcaacgagtggaatctcttttacgagagcaagagccaagtagcaaactggaaggcctgcgcaaacgcgttgagaatctgataggccgaaacctttcggaagatcttactgctgggcagcttattaatgaggcattgcgggtaaatccccaaacgaagcttcgaggttcttcaggattactgggtgggacactgttgcaatcagactatgtcattgaaatcagaaaaattcaggaaacgcagggtctgtccagagcacttgttgatgaattgattcgccgtgtttttgattctgtttcacccgtaggaagtgcccgggaacgcgttggtaaggatgctctgccggggcagcaacagaaaccccgtgcagaaaaagcccaacctgctttccaggtttttcgtattgtctccgttgttgccaacctgcgaatcggaaaaggcagggaacagcgcatactgagtaagcaggaaaaagacacggttgttgactttctgttgcattcgagcgtcccagaacagatcacgtgggatgcagttgcagagctcttgaagattgagagaccctccctccgaggggtggcacgagcaggtatagatggcgagaatgtcagtgggcggccgccaactgatgcaacaaatcaggtaattcgttcgttgaagatcccgacgctacaggagtggtgggaacaagcggatgaaattgctcaggaaactttcattgacctccgctcaaatgttggcagtgacgatcttgaccctgattctctgcaggaaattactcgcctaataagtgcgttttcagatgatgaaagagaaaagcttgaggaagcaactttccctatgggaagagcagtttatagcgtggattctcttcgcaggctgaccgaatgtatgcgggaagatggaattgatctctatgaggcgcgaagaaaagaatttggtgtttctgaagactgggaaccaccggcggaagatattggcgctcctgtcggcaacccatcagtcgatcgtgttacgaagcaggttgcccgttggctgagtgcggttgagaagagatggggcgttcctgattcaattaatattgagaatgtccgggatggttttagcagtgaacacgttactcgtgaaattatgctccaaaataagaaatcccaagagcgtaatgaacgaattgtccacgagatccatgagcgacgtggaattgatggtcctgttaggcgctctgacatcataagatataaggttttctcgagacaggaaggaatctgtctctattgcggagagcccctatcgatcgagaatttcgaggttgaccacatcgtaccgaggtccggtccttcatcgacgaacaagatgcataacctagcagcggtctgccggacttgcaatcatcaaaaatcaggaatgccgtttgctttatgggcagagaattctgatcgtgatggcgtgagccttgagggagcaatcaaccgggttggaatgtggttgcctgatcctggtatgagccgaaaagactttggacgtcagaaacaggaaacgatacgccgtcttaaacggaaacagatagatgagcctctggacgacagatcaatggaatcagtcgcgtggatggctaatgaactgagacgccggattgactaccatttcaaccatgaggagaaaaagacagttgtacgggttttccgaggaagtcttactgctgaggcgcgacgtgcttccggtcttgaaggcaaggtgaagttgattggcgggcacggaaaaacacgttttgatcggcgacatcatgccatggatgctctgacgattgctctcttaagaccttcagttgctcacactttggtactgcgccagaatattcgctatgcagagcgtttgacgcagtcgccacagacgtggaaggaattcacaggccttacgatcgctgatcgccaaatatggaatcactggctgcaagaaatggatttggctaccgaatatttcaattctcgaattagcgcagacacgattccggttatgcaaaatctacgtcttaagcttggaaatggagcggcgcacaaggcgaaaataggcaagcttgagcatgtcaaactttccgatgccatgccagtgcaatcgattgatcgtgcttcaacgcctgcgctttggtgggtcttgacgcaccaacctgattttgatcgtgaaagtggtcttccagcagatccgtcacgccgtattgtcgtgaatggagttcactacactggtgaaagtgcagtcgatcttttcccgaaacttgttccagcagtgaaagtacgaaatggatgggcaagcacaagctcttcaatacaccatgttcgcattttcaaagttgacgggaaaaaacccaaatactatcagctgcgggttttcaagacagatctcattccgtatgcccacgaagatcttttcacagtacaaattccagcaaaatcgattagtgtgcgaactgcgttgccagctttacgaaaggcaatagcttctgggcaggctagacaggtcggatggctcgttcggggcgatgagcttcgtttgcgcgcaacaaactttacgaaggggaagatcgctgatttctttcaagattttccggatatggtgtcttggagggtgactggttttgagagcacacggcagattaatctgcgaccatcattgttagcgctcgaaggagcgcctgagcagatctcccctgcagtgcttgaaatcttaaataggagctggcgaccaacctttagtgaccttttcaccaatgggaatccagtaatcattcgacgtaatgctctgggtgagccacgtgaagccagcaattccggactacctttgagcatgacattataggtggaaaaatgtcggggcaatggcgcgtgctggattttcttggtttccgcgggcaggttcgttcagttcgcggcggtcttgaagtttttgacgaaagtggtcacagcaggcgagtagcgtgtgcggatcttgcagtagtgttgtttggacccggagtggatttttcctcgggcgttatgaaccgtctaatggataacgcgacagtacttttctattgtgattggcgcggaattccacgcggcgcttcctatccttggtcaaatcattcgagagttggtgcgcgtcagatagctcaatgcgaggtatcactgcctaagaagaaaaacgcgtgggctaaaattgtccgtgcaaaaatcatggggcaggcgacgacgctgagattgaaaggagcatctggcgctggagagttggttgctctttctcgtcaagtgcgttcgggcgatccagagaaccttgaagcgcgtgctgcccgtatatattggaagtcttttcttccttctggggttcgacgagaatatggcgtggggagcgacaatattaattcgtgtttggattacgggtacacgattcttcgagggcacggaatccgatctgtcttaggcgcgggattgaatccagcctttggactgtttcatcggggacgcggtaatctgtttcatttggtcgacgacctgattgagccgttccgacccgccattgatgcagctgtgtgggatatcggtttgagcgcgcggcttgcggatccgagtgtgaggaagcagctggtggcggctaccacacaaaagtttcttgatgatggaacgtgtattccgacggcatttgacatgcttgcccagagttatggccgctatgttgagggggatggcgctcgatttgatgttccttactggcatgagttcgattgagcggattgtctgatggcggatggcccaatgtggtgcttggtgatgtttgatcttccagtcttgaccaaggtgcagagacgggatgccagtaattttcgtcattttctgctagatcggggtttctcaatggttcagctgagcgtgtatgtgaagtattggccaacttgcggaatcgatatggtcacagttaagtctattaaaggtgctctcccgcccggtgggcaggttcgtgtcatcccgataacagatcgtcagtggtcgggcggtttcagattccagtctgcaacggagtgtcctgtagaggacgaacctgagcagctaacaattttctgacggaattatctgctttttcggcaaaaataggcgggaaacctctccctttgaagtctatcaaagggaaaggtgactgattcccaacccatcgagccgaatccctcccgctccaggaagtctatcaaagggaaaggtgactgattcccaacccctcgaagaactagcctccaacgaccagaagtctatcaaagggaaaggtgactgattcccaaccgggtgcccatcgggtagtgtgcacagggaagtctatcaaagggaaaggtgactgattcccaactcattccgttccgctcggtctccgttcagaagtctatcaaagggaaaggtgactgattcccaacttccggtagcgtgattcctcgctcgcatgaagtctatcaaagggaaaggtgactgattcccaaccacgatcaccgaagaagctctaaaggccgaagtctatcaaagggaaaggtgactgattcccaaccttgcggtcaacaatccgcttgcactccgaagtctatcaaagggaaaggtgactgattcccaaccgctccgacgttttctcgcagcctgctggaagtctatcaaagggaaaggtgactgattcccaactatcggtgcatagcccgtcccacgtgtagaagtctatcaaagggaaaggtgactgattcccaacgcgagggaggtcacgagggctccgagacgaagtctatcaaagggaaaggtgactgattcccaaccgcgttgcggcggcttgtgcctcctgatgaagtctatcaaagggaaaggtgactgattcccaactccccgcccccgcctgcgctcggtcggtgaagtctatcaaagggaaaggtgactgattcccaactcaccggcctgcgctgggacacctcacggaagtctatcaaagggaaaggtgactgattcccaaccgtgaggcgaggccacacacgcagcgcggaagtctatcaaagggaaaggtgactgattcccaacttgcagccgtggcaaaggcgagttctgcgaagtctatcaaagggaaaggtgactgattcccaacacgccaaggcagcagaaatagctgcacagaagtctatcaaagggaaaagtgactgattcccaactagatttcgtgctcgatttgacagattcgaagtctatcaaagggaaaggtgactgattcccaacaagtccctatgcgtatagcccctagtgggaagtctatcaaagggaaaagtgactgattcccaactgccccatgcggttagcggcccggcgtggaagtctatcaaagggaaaggtgactgattcccaacgggtcggcggcatcacggttcttgagaagaagtctatcaaagggaaaggtgactgattcccaacctgcctttagcgcccaaagcgtcgcctagaagtctatcaaagggaaaggtgactgattcccgacaggagaagctaatgcgcacgactgacctgaagtctatcaaagggaaaggtgactgattcccaactgaacattgcgcagtaggggacaccgctgaagtctatcaaagggaaaggtgactgattcccaacagccacacaccgtaaggcgcgagcagttgaagtctatcaaagggaaaggtgactgattcccaacaccggcgcgtcatggggcgcgcgcgttagaagtctatcaaagggaaaggtgactgattcccaacccactcgtgcgcccctacccactcgataagaagtctatcaaagggaaaggtgactgattcccaaccgtcaggctggtgggaagtggattacgagaagtctatcaaagggaaaggtgactgattcccaacctcagccatgcagctggatactgagatcgaagtctatcaaagggaaaggtgactgattcccaaccgtagccatgcaggacgacgagctcgcagaagtctatcaaagggaaaggtgactgattcccaacctaccgagtacgaggccgcgccgaatgggaagtctatcaaagggaaaggtgactgattcccaaccccatctcgatcgtgacgtgtgagcagagaagtctatcaaagggaaaggtgactgattcccaacaagccaggcaagcctgcgcggggtgagagaagtctatcaaagggaaaggtgactgattcccaacacatgacaggcgcatacccgaacgcatcgaagtctatcaaagggaaaggtgactgattcccaactgcgcaagttcctataccggacgtttaagaagtctatcaaagggaaaggtgactgattcccaaccggccacgtacttttgcagatcttcccagaagtctatcaaagggaaaggtgactgattcccaaccgtagcgtggtgatctgcgtggcgaaccgaagtctatcaaagggaaaggtgactgattcccaacttcaggcgatttaatgaggcgaaaggttgaagtctatcaaagggaaaggtgactgattcccaactccaacttggcgtccacaccatgaaacagaagtctatcaaagggaaaggtgactgattcccaactgagttcgacgagatgagcgacaccatcgaagtctatcaaagggaaaggtgactgattcccaacaagaagcgcgcggaatattccgagtggggaagtctatcaaagggaaaggtgactgattcccaacccgatgacggtgattactggttctccacgaagtctatcaaagggaaaggtgactgattcccaacgccggtaagcgatatagcttcgggctgggaagtctatcaaagggaaaggtgactgattcccaacgacggttcgctatgtgccagcgcatgttgaagtctatcaaagggaaaggtgactgattcccaacggtggccgcatcgaccggcgcgatcatggaagtctatcaaagggaaaggtgactgattcccaaccgctgattcccattgcgagttcggctgggaagtctatcaaagggaaaggtgactgattcccaaccgagaaaggctcacaaaatggcacgcgagaagtctatcaaagggaaaggtgactgattcccaacgtaccagaaagcgccctcgacgcagccagaagtctatcaaagggaaaggtgactgattcccaacgcgcatgatctggatcgaggtcgacggggaagtctatcaaagggaaaggtgactgattcccaaccgtctcgccgtgcgccgcttcctcattcgaagtctatcaaagggaaaggtgactgattcccaaccgggtgcccatcgggtagtgtgcacagggaagtctatcaaagggaaaggtgactgattcccaactctgcgaggctgtcccagatcgcaaggtgaagtctatcaaagggaaaggtgactgattcccaacctcctgaactgaagcagctggccgcgcagaagtctatcaaagggaaaggtgactgattcacaactgtcacgtgtcgcgtgtatatatatagagaagtctatcaaagggaaaggtgactgattcacaactggcgaggatactgctgatttcgctgaggaagtctatcaaagggaaaggtgactgattcccaacagagggatcgggctttgactggtctgatggaagtctatcaaagggaaaggtgactgattccgaactatcttgcccgatgcatgctgcacagtagcgtaagaagctgatgctgtcttgaagagtattcgaattgcgaatccacgcgtggtgatcgaatcttagcaaaagccgtcctcatggtatttgtcctcgccgtcttcagcgtggtctgatctcaccatctcatcggtgccgtagtaataccgcagttgttgggagagcgtctgcatgattggctgatcggggtggtcgtgctgccactggcgggcgtacgtacacagtagtttcaataccggttggggcgagttttcctccaagctccacttgtcccgttcaatgcgctcaactgccagacggattgcctcgcaaggacgtggctggtccttgcttagagccagcatcatccaccggtcgttgacgccccagcgattggcatactcccacgcccgttccccatcaccttcagccagcgcaaggtcaatgggtgtgtccgcgtttgtccagggctgctgcgcaatccactcgatgacttgttggaggaccagagagcgcttatgcgcttgtctgccgcatgtgagcagaagattctggaactcgacacttggcgtcgacgtgaaagcggttcgtgcgatggcaagtgcggtgcgtatacgtttggctgtcagacagcactgcaccgcctcgcggacaggaatgaagaacggcgagtagccctggggcgcgtcggtgctgatggcgtgtgcttgatgggcgtgcgccacgacgtcagcggccagatccggccggtcgatggcctgtagatcgttaaagaacatgctgtaagcgaagcgatcgccctgcgtcgcgcacatgcgcagcaggggaatgtcatcctggcacagtgccaagtcgcgtaagagagagttctcggcgctttcgacctggattttctcatgtctgcattcgatcaggtagtcgcgataggcagccgtcgcttcctcgcccaggatagggatgatgtctctagctgaggcttcccgccattcgtaattctcgacgaaatagtgggctgttttacggccggcttccttttcgggcatcgtggccatccatatccagaccagcatcacttcgaaaatcgtctgcaggtgatcggcccattcacgagcgtcgtcgtgtggatcgtcgaagaccagtcgtttgaaatcggcaagtgcgttgtggcagatctgttccagcccgtcggttaatccaacggtgatcagcatcttcatctgcagaccgagtgacactatctcgtgtctgtttgcagcgaggtcgacccaggagggtttcccgtagcagagaaagatccggctatacgcctgctgtacgagcgccgcagactgctcgggggacccaaaattgaaactccacgctgtggcgaagagctggccgacaggaggaagtgcggccgccattttggagtaatgctggaggagttgctggtcgactgattgaatgagctttttggccaactctgacgtgtcaaggagttctcgaggcagtgaaggcgttccagaatctactgattggccgtgtttgagtagaaccagggcgagcgcgcattgatgtttgcagaagtgtccggcctcgccatgcgggcagctgcacgccccatccagggttccgtcatcttcccacagcagatcaacctcgtacagtgaggtgcctcgtacagaggcgtttgccccgtgctcttctatatgtacatccatcacgaaaggcatataggggcgtgcgcggtcgaaaaccttatcgcctgcgcgggcccgaacatcctcaacgctgaaggggaactcatccataaacgaagtatgacagcacccgtgtgcatctggagcccgtcggatttcagagatcgactattgccacccccatccaaactgtgttactgtattaatacagtgatacagatggagggagggagacatgcaaatgagcggagattctcggccaatctggatccaactggtcgaagagtttacgcagcgtattgtttccggccagtggaagcccggagaaaaagtaccgagcgtcagagaactggccgcagaattcacagtcaatccgaacaccgtccaacgagcactcacccgtgctgacgaggacggcctgacacaatcgaatcgcactgccggacgctttgtgacagacgaccaggacgtgatcaagcagcatcgcgacaaccttgcacaccagataacagctgaattcatcgcacagatgaaagcacttggatgtgacaagaacacgatcactgagctgatcaattcccagtggaatacgtatggacctgacacagtcgccctcggcaatgaacagaaacacgcaaaggatcctcatgacaacgcacgcaattgaggttgcgcacctgaccaaaaaatacggacaatggccggcgctcaacgatatatctttcgccattgagcccgggcagatcgttggcctgatgggggacaacgggtccgggaaaacgacacttctgaaaatcctggcaggaatactgtccggttacgaggggaacgtcgccatccacggccatgcgcccggcccgcagtccaaagccatcacctcctacctgccggacgaatcggcgctgccaaccagcctgacagccgatgaggcgatccgcatgtatgccgacttcttcgacgacttcgaccgcgctcaggcttctgagatgatcgatttcttcgaactgccacacaacaaacgcttccgagagatgtcaaaaggtatgcgcgaaaaggcgcaagtggcactcaccatgtccagacgggcaaaagtccacctgctggatgagccgatatcaggggttgacccggcggcgcgcgacattatcatgcgcggcgtgctcataggttttgaccccgacgccctcatgatcctgtccacacacctgatccgcgacatcgagccgatcattgactacgcaatcttcatgcgccaggggaagatcctgctggcgggacacgttgatgatctgcgagaagagcacggcacggacctcgacactctgtttagaaaggtgtatgcacgatgatctggacaattatccgctatgacgccaaagcaacgtggcgccagctgtgcgtcatgcctgtcgtggcagcattgctgctgggcacagcaatcggcgcagatgcgctgaaaattccagtgttgaaggaaatttccctggtactcgcagtggtggcaatcggcgggctgcttgcagtgcaggcgctgatatgcatcctcaactactggacatcaatgtatgggcgacagggctcattcacgcaaaccattccggtgcgcacatcaacacttctgagtggaaaactcctgtacgcatttatcgtcggcgtgctgtcactgatcgcgaccgccgtgttcacgctgcttgccgtcctgtactacgtcgacgccgaagttgcgcgctacgtcattgaccagattcttcagcaggcgtggaccaatgcggtcatactggtaatcgcaagcgtgctcctccagttagtctgctcactggtgatcgtatggtcggtgatcacaatcagttctgacgaaaaactctggtcgctcagatggggcgcaccggtcctcggcctgttctgcacatacgttgtttatgaagtcggagctgcgctgttcatgctgttcattccgatcggagtgcgtatggaagatcccggggtaggtgacatcgtcatggaaggaatgtggcccagcatcgtcaaactggtgcagtatgacgcagcatcgcctgaggtgttggggcttggatacgtcctgtgggcggttgttctggcagtgctgctgcttgtcctcgcgcggcgtcacgcggatcggcgcacatccgttcggtagcggattgccaggcagcccgcctccctcgtctgcttgtcgagggaggcgggcctgtgagaaagtatgaaggtcagtgtagcgtggatgtggaggtaccaatgtcggacccggtgcgacctgttggtggccaggtggagccgaatcgtcggccacggacggtgtgggcgctgctcctcctcacgttgatctattgcatcttcagcactgtcagagctatcaaggacgccctcacagcgtggccgcagatgacagacaatggtgaggatctcacgatggttgcagtggttatcgaccttgtcattatcggcctgtgtgtcctgctgctgctcggtgcactcctcgtcaccatgcgaatgacccggatcctgatgctggttgcagggatcatgacgatcggatgggagctgctgtccgttttcagctacgccgttttgctgcaggagtatcaccttggtcgatgggcgatcaaactgggccagcttggaatcgtgattgtcatcgtagtgctgacgctggttccacccacggctcgctggtttgcagtcgggttcccgcagcgcaggatataggcgttcgagggtggatgcgcgccctcgccatgcctgagaaagggatggtccagccagtcccgctaagacaactcagacacagatgcccaaggccgattcgtttgccttgggcatctgtatgcgtgaaacttcaggtgttgccgacttactcagcagcctcggaaccactggaacggcggcgtacacggcggcgagtgccctgagtgccctcacccttggcagatccagtgtcactcttgcggcgacgcacacgcgtacgttgacgacgcggtgtctcctcagatccaccgtcctgcgacgctgcgcccttacggcggccagaggacaggcgcccaccacctcgacgcccggatcctcgacccgaaccacgccctgatccgcgtctcggaccgtgatgcccgcgaccggtttctcccagatcctccaccttctcggcttgcagacccgcgcgcgtgcgctgtgaacgcggcaaacggtcggtgacatcggtcgggatatccaaatccgtgtacaagtgatccgacgtgtggtacgtctcaagggggtctggcacgcccagccccaacgctttcgagatcagtgaccagcgcggcacatcatcccagtccacgaacgtgacagcggtgccggatgcgcctgcacggccggtgcgtccaatgcgatgcaggtagattttctcgtcttcagggcactggtagttgaccacatgtgtcacgtcgtcaacgtcgatgccgcgtgc

SEQ ID NO: 4357 - DNA, 20579 bp, synthetic construct
  misc_feature 1..20579: note = Synthetic
  source 1..20579: mol_type = other DNA
gcagggccacgacgcacgcgcacacgatgaggatgacccactcgacgaagagcgcttgccagcgggtcgaacccaggaagcgggaggccaggccgcgcggtgaggagtcgcgcgggtggggcttggccagggacgagggcggggtgccgttcgggtcggccgcggcggcagcaccgtcgggatcgtcgttggacagggccgcctcggcggccgtgccgcgcccggcgtgctggcgcacgatcatgaggaggatgatgccggccaggccgccccacgcgaagacttcggtgagccactcccacggcgcgaagtggccgaggaggggcagcgtgaaggtctggatgcgcagctgcgcgtagcccgtgaccagggtgaggaagaggatcgggaaggacaccatgaccagccagtgagcggccttgatccaggggcggcccttgaactcgcggtgcgtgagcgccgcggagacgacaccccacgctcgcttgccgaccggacgcaggcgccccggatccggcgttcccgccgagaccgtgcgccacatgtgagtcaggcctcgcgcgaacgacaggatggccagagcgctcaccagcagggcgagtccccacatgatggcgctcagcgttggattggccacgtttcctcctctgttttttctgcactccattgtggcatctcgatccgcgagcgaccgaattccccggcaaagcgtgcgcaattacgcgccgagtggcctgcgcggaggcacagatgtgctcaccacaacgtggatatgcgccacgagctgtaaaaaagtgtgtcaaagtgagatcgtgcttcccgtctcgcagccagacatgacactgtccgaccaggaactcttcggggacgatcacccgcacgatcactgcggtgtcttcggagtatgggccccgggcgaggatgtttcccgcctgacctacttctccctctatgccctccagcaccgaggccaacagagtgctggcattgccacctcgaatggcaagcagatcctcgtctacaaggaccagggactcgtctccaaggtgttttccgagcagtccctccagggcctgcgcggccacatcgcgctgggacacgtgcgctacgcgacgaccggcgcggacgtgtggcgcaacgcccagccgacgctgggtcccacccccacgggcacgctcgcgctggcccacaacggcaacctgacaaacacggttgagctgcgcgagctggccgccgacatcgccgacgacggcgaggacttcgagcgcggagcctccaccgacacttccctcgtgaccgcgctcctcggcatggccgaccgtattcccggtccggcccccttcatcgcgacacccgccgtcacgcccggcgacgaggacacggacgaggtcacctcggcctcggcggtggtcgatcctgagcccgcgcccctcgtcggtgccgccctgaaggtcctgccgcgcatcaggggagcgttctccctggtcttcatggacgagaatacgctgtacgccgcgcgtgatccgcatggctatcgcccgcttgtgctcggtcgcctggcctccggctgggttgtcgcctccgagacggctgctctggacctgtgtggagcgaccgtcgtgcgcgagatcgagcccggcgagctgatttccatcgatgcctcgggcgtgcactcgcgccgcttcgccgtgcgccgcgccaacacctgcgtcttcgagtacgtgtacctggcccgccccgacacgacgattggtggacgccgcatcgtcgccgcgcgccacgagatgggggctgcgcttgcgcgagagaaccccatcgaggcggacctggtgatgcccacccccgactcgggcacgcccgccgctatcggctatgcgcaggaggctggcatccccttcgcgcagggtctcgtgaagaacgcctacgtggggcgcaccttcatcgaacccacgcagtcgctgcgccagctcggcatccgcctcaagctcaacccgctgcgcgaggtcatcgaaggcaagcgcctggtcgtcatcgacgactccatcgtgcgcggcaatacgcagcgcgcgctggtcagaatgctgcgcgagtccggggcagccgaggtgcacattcgcatctcgtccccgcccgtcctgtggccgtgcttcttcggcatcgacttcccgacgcgcgctgagctgatcgcctcctccatggacgtcgatcaggtgcgcgcccacctcggtgccgactccctggcgtacctctccatcgacggcatggtcgcggccaccgggcaggggacctctctgtgcttgggctgcttcaccggagaataccccgaggcgatccccgccgggacgcccgtgcccggaacccccgacgccaccccctgctaatcaccacgcccgcgacgcgccccccgcgtcgcgggctttgttactgtcccgatcacccagacatggcctcgtcgagcgccacccgcgaaaggcaccacccatgaccgacaccccccttgactacgcgactgctggcgtcgacacggcggcgggagaccgcgccgtcgagctgatgaagagcgccgtcgccgccacccacgactccaccgtgctcggcgcgaccggcggattcgctggcatggttgacgcgtcggcgctgctgggcatggagaagccgctcctggcgacctccacggacggcgtgggcacgaagatcgcgattgcgcaggccatggatgtgcacgacacgatcggccaggacctggtcggcatggtcgtcgacgacattgtcgtgatcggtgcgcgcccggttctcatgactgactacatcgcctgcgggcacgtcgtccccgagcgtatcgcttccatcgtcaccggcatcgcgcgggcctgtgaggccacgggcacgcccctcatcggcggcgagacagcggagcatccgggcgtcatggcgcccgacgactacgacatcgcgggcgcggcgaccggcgtcgtggatgcctcgaagctgctggggcccgagcgcgtggccgatggggatgtcgttatcgcgatggcctcctcgggtctgcactctaacggctactcgctggttcgttccgtcgtcgcgcgcgtcggcgcgtcgctggagtcccacgtcgccgagttcggccgcaccctcggcgaggaactcctcgagcccacccgcctgtacacgcgcctgtgccttgacctggtcgagcgcttcggcgtcggcggcattcacgcctactcgcacgtgaccggcggcggcctggccgcgaacctgtcgcgtgtcctgccccagggtgccatcgccaccgtggaccgctccacgtggaccgtgcccgccgtgttcgactgggtgcgccgcggcggcgacgtcacctgggtcggcatggaggactccctgaacctgggcgtcggcatggtcgccgtcgtctccgcgtccgtggcctccgaggtcctggccgcgatcaacgaggccggggtggcggcgtgggtcctgggttccgtgacgtcggccagtgctgacggcacggtggctggcttcgggttggtgtccgacctgagcgcggactcctccggcgtgcgcctcatttccggcacgaagggcgtccaagcgggtgccgtgctgctgcacggcgagtaccgcctcggctgattcttttgcgtctccgagcgcgagcgggcggggctggggccgggtggccttggccccgctgtgcttggggatggacgaggccttggcgcgaccaagcgggaaacttcggcgggtgcgcatgacagcgacgcatgcgtgacagcgatgcgcgcggtacgctgacgcgcgcggccgtgaaccgggatctgacgccaggtttcgggtacgccaaagcggcggaccggggtcggtccgccgaatggctcagccgttacttggtggaggaaccacccgtccagaaggactcatcgagctgcttcgggtcgatgtcgtcgtcctctgccggaatatccgcgaagtcggcgtatttcgagtagaggtcgtcgtcgattgcatcgtcctcttcaggctcgtccacggcactgttcgtcgtgtacgagtcctcatccgccagctctcgctgaagtgcgtgtaggtcggtgtcggggctgaagtacttcagcttccgagcgactttcatctgcttagccttttgacggccgcgccccatggcgtcgaccccctccgcgtcgttcgggtccgcatcaagcggttccctgggtgttcaaaatgtttcgtgggaccatcatagctaatggaacggcttgacctcaccttggatcggtttttgcgcgctgagcggattgacccgaagggggtgaatccccggcaacacgccgaaaacgtgcgcgacgcgcagcatcatgtgaacggtattacggattaatctgtcaggcgcgcagatgtgcaatcccctcgcgcgagcgggatgcccgggcgaggggagcacacggaaaggcggaggagtcaggcgtccactgcctcgtcggccttcgcgagcgcggcgagagtctgcttggcggcctcgcggccgatgcggcgagcctgacggcgtgcgcgacgcggcttacgcgtggccagcaggacgaggacgccgatggcacccaccgtggacagggcgacgacggcgaccttcttgatggcctccgcgttgccgccgactgcgtcctgaagagtcagagacgcgctctccttgaaggacttgaaacgcacggtggcctcctccttcgcttcctgggcgagggtggcgggctgcacgcgcgcgtagagctgatcgatcgtggcggccagctcggcgcgctgacgctcgaggtcggcctcaatctgggctgtggtgcgtgtgccggaaggctgagcggcgcgctcgccgacggtcacggtgcgcgggtcgacggagttgctcacttgcccagtcccttctcgatagcttccttggtagcggccaccgatgcggccggatccggacggtgcttctgcgcgctctggagggcgttcttacccgccagggccagggtcgccacgatgaccagcaggatcacgacaacaatcagcgacgccgcccacgccggaagcacgagggccaggagaacctcgaccgtgtggagagtccaacccagtaggaaaagcgcgaaaacggcggccgtgacgagcaggcccgcacccttaccactcttggcggcgaaagcgcgcgccttcgtcttattgagctcgatctcgtcacgcagaattcccgacagctggctggtcaccagtgcgacgaggctgccaatgctggggcgtgcctcggatgcgggagccgcgtgctgcggcgcgtgctgcgtgggggcctcgggcggcgggtattgcccgggctgggggatagactgggtcataggggctcctgcgcgtgcggggtaacgaggcgacggctcgcctgataagcctagtctctcatgaagagaggcggctcgcagtgacccgtacgctactcctcgcgttactccttcggcgcgatgggacccggcagatccgacaggatcttgcgggcgcgcacgaccagctcggagacctcatcctcggcctgtgctgggtcctcagaatcgaccgcggggatgtcgcggagcggcgcgttgtcggccgaaccagcgttcgtttcaaccggcgcaatgagcaccggctcgtccacaggggcctcgtcaaaagaaagatcctgagcgttcgtcgccgcgccaatcgagcggcgggcgggagccgacgagggaagggaaccggaggtgccagccacgacctcgtcaaagggggaggggagcgatgcgcggagggtgctctgatcctccgggttggcctccagggacgtcgcgatgatcacgggcgtggggttcggcgcgtcaagcgacactcgaccgttcgtgagcagaatcgcacggtccgtcgaggcggctagctccggggacggcgttgagacgacgaccgcgcagcccgccttggtcagcgacctcaggagcggctcgaactcggtgcgcgcctcatcgggcagggaaatcggatcctcaatgaggaacacctccgcaccggacacgatcgcgcgagcgatcagcgccttgaaacgctcccacggcgtcagctccgagggataccgatcaacgcgctgcgccagacccgtcacctggagcgaccccaccaggttatcccagtccgcgaccgaacccgtcgccgacaggggttcgaggatgttctggcggatcgtcagcgtctcgtccagcggggaatccatacggatcagcgccaccgagccgatgcggcccgccaggcgcgccacccacgaacgcgacggcgcagcgacaatgcggccagcctgcggctcttcgaggcccgcaaggatcaggaacagggcgcgagcgcggcggcccgtcggatccaggatcgcgctcagcgtgcgcgcgcggaaacccatgtccacgttcgccaggaggaccgcgcccgtcgcatgatccgtgtaggtcaggcccaggccgacgaccaggatcttgccgccgccgcccttcgccgcaaacgagcggcgtgaacggtaccacgggcgcggctcagtcgcgggcacgcgtgcaggcaccggcgcgaccatgaccttactctgcgtccggcgaggagccggtggctgcggagagtactggggggcctgcgcgccgctctgggggctgtgcgcgtacggggagttctggggctgctgagcgtcagtcaggacggcctcgtcctgcgcgcccctcgtcgacgaggccgtggccccctcgacggcagcgtcgaccgcagcagcggcggtcggctccgagacggcctgcccagcggcagccgtcaagtcagccacgtcctggccatccgtaccctgcaggttttcacgcgagtcgttcgacatgcccctattgtttcaggatcgtgtcgtttgtgccgtaatggcgcgcgggagctaggggagtggagctggtgatgttgctcgaaacttgctcgcaatgtggcttgcgtcgcgtgttgtgtggtgatacgctgtaagcgattgattctcagtaagggtcgactcgttagcggctctgaatgctccaccgggcgtttcctcgcgaaacgcccggtattttgtgaaatgagcgcaaatgtgtgtgcagtgtgacaccatgtgtctatgattgattcctcagaaaatgttccgggtatccgctaccgggtcggcatcgacgtcggcctgaaatccattggcttttgcgcggtcgaggtcgatcgcaacgatcagcctgtcaggatgctgaactctatggtgttcatccacgatgctggcgtcgacccgaacgagaacaaggcagctaagagtcgaaagctcaccgccggtgtcgcccgacggacgcgccgcctctaccgcacgcggcaccagcgcctcgtcaatcttgatcgtgttctgtccaaggaattcggctggcctctacccgatctcacttcttttaaggatcctcgagagccgtggcacgtgcgtgcaggcctgctggagggctacatcgcggatgatgagaagcgcaaggaagcactctcgatcgcgttgcgtcatattgcccgtcaccgaggctggcggaatccctacgcgaaggtggagacgctgctgcagccctccgaacctagtgacttcctgaagggcctcaacgagcgcatcagtacggcgctgcgcacgaccttctcagcggaggcgacccccggtcagctgatcgacgcctacctggcgcatcccgactacgtgggccgtgccggtactccgaagctcagaggcccccaggggatcctggctggcaaacttcaccaaagcgataatgcgcaggagattcgtcggatctgcgatgttcaaaggatcgaacccgcggaacgtgatcgtctgattcgcgttgtattcgaggcgaagtccccgaagggaagcgccaaggaacgcggcctcgtcggctacgacgaactgccgggacagggcagacacgtgcgcgccgagaaggcgcatcccgcattccagctgttccgcatggtgagtgtgctggcgaacctgcgcattcgtgagggacgcgaggaacgtcccttgactcccgacgaactccagggactcgttgacttcatcaatgaggtcagcctcaagcaggagatcacctggcaggacctggcagacaacctcggtatcgagcgttccgacctgcggggtacggcaaaggcgtccttcgatggctcgccggtcctgcgcaatcctccgaccgacgtgaccaccgagaagatcatggcctgcaaggtcaagtggctgaaggagtggtggaaggaagcggacgacgaacagcgtggctatatggtggacgcgttctcgaactccggtggatctgaggatgggaccgacgttaacgacgaggtcgctgagctgctcgagcaggcaactgaggacgatcagctcgagttcgagaagatctcgcttccgcagggacgagccgcgtattcgttggattccctgcgtcgtctcaccgacaggatgcttcgcgacggtgttgatctgcatacggctcggcgcctggagttcaacgtcggtgatgactggaagcccgccgtggagccgatcggcgcgccgacgggtaacccggccgtcgaccgcgttctcaagcaggtgagccggtggctgcatgctgccactgaacgttggggtgagccgacggtcatcaatatcgagcatgcgcgcgatgggcttgggtctgagcgtgtcgcccgcgagctcatgcgcgagaacgagaagcgacgcaaggcgaatgcttcagctgtcgctgagatggctgcaaagcttaagctctctggaaaggtgcatcgctccgaccagattcggtacttcgccttgcaacggcagaactgccagtgcctgtactgcggagcgccgatcacgtatacgaccgcggaaatggaccacattgttccgcgtgcggacggttcatcgacaaacgaccgctccaacctggctgcggtgtgccgtacctgcaaccacatgaagggcaagattccctttgccgtgtgggcatcgtcagacaaagcgaatcagggagtgtccctgacgggtgcgctcgagcgcgtcaatatgtggcagcgcgacaacggcatgtctcccaggcagctcaagcagctgcagcgcgaagtctgtgcgcgcctcaagtcgaagaagccggaccaggagttcgacggtcgatccatggaatccgtcgcctggatggctgtcgagctgcgcacccgcatcgaggggttctaccgctcgcgagacgaggagtcggttccctcggtgggcgtctaccgaggacagctgaccgccgaggctcgtaaggcctcgggcttcgaaagccgcgtcaacctgatcggtggtcgaggcaagacccgattcgatcggcgtcaccatgcgatggatgcgctcgtcatcgcgctcatgaacccgtcggtgtcgcggacgctggcgctgcgactcaacatgcgcgacgcgcagcgtctgacgggcgttgaggaaacctggaagcatttctacgggaagcccggcgaggcatcgaagcgtttcgagtcctggcgagaatcgatgctgcgcggcgtcgagctcttcaacattgcgctgagcgacaatgcgatccccttcgttgaaaatatccgcttgcgcgttggttcgagcgtcattcatgacgcgaccgtgcgctcgttctgcccgccgaagaccccagacgggaagcaaaccatcacaaaggggcgcggtgagcagcatgcgctcggttctgccatgcccgtcgaactgattgatcgcgccgagaccccggccctgtggacggcactcacccggtgccccgacttcgacccgaagaagggcctgcccgagaacccacagcgcacgatctcagtgaacggaacccgcgtggggccgacggagctggtgaacttcttcgagttttcgaagtcgggtccgaaagcctgtctgaaggtgcgtggtggttatgttgacctaagcggtgcgatccaccatgcgaggatctatcggattgccggtaagaagaccgcctatgcgatgattcgcgtcttccaggtagatctgctgcgcctcaaggaccacgacgtcttcaccacgccgcttaagccgtcgaccatctcgatgcgaactgcggaacctaagatccgcgaggcgcttgccaatgggacggcaacgcagatcggctggctggtggaaggtgacgagctcgtgatcgacaccagtaagtactccggtggctttatcggtgaggttcttgcgcggtatccagaggcgaccagttggcgtgtggccggttttatgacaccggcaaagctgcgtatcaagccgatactcctatcgaaggaaggctttgtggatgagacgcaggctgcgcttctggggattgaagcgacatccgaagctattcagaagactgtagataggccaggctggttacctgcagtaaatgttctgtttggtgcaggaggagtacgtgtcattcgccgaaattgtctgggcgaggaacgttaccattcttcggcgtcgcttcccgtatccatgacgctggagtgattccccatggcagagcagtggcgtgttgttgacctgtgtactttcgagggggatcttcgtgctgttcgtggcggtgtggaagtctgtccagatgaaggtgcgtcgacggttctgcctgttgcagagctggctgtggtccttattggcatgaaggtcaacctgagcgccgctgttctccaccgtctgtctgaggcggatgtcgcggtgctcttctgtgactggagaggcatcccagagggcggctgctactcgtggtcggatcacggtcgagtagcagcccgtcaccgggcgcaggcagaggtctcggtgccacggaaaaagaacgcgtgggcacgcttggttcgcgcaaaaatcgagggccaggcatccgttctcgagaacctgaagattcgaggcagcggcgagcttcttgcgcttgcggaccaggtgcgctcgggtgaccccggaaacgttgaggctcaggccgctcgtctctactggtcgcggacgctcggtcggggagtggggcgacagccagcggccggtcagctgattggtgccaacgcctgtctggactatggctacgcggtgcttcgtgggcatctcatgcgcgccgttctcgcagctggtctcgctccggcactcggtgtgttccaccggggacgcgggaacgcgtttgcgctggccgatgacctgatcgagcctttccgacctgcaatcgacgaagtagcactacctctccccgccacggcctccccgtcggatcgagaggtcaagcagcttctggtcgctgctgcgtcgcagcgttttgatgtggatggtcatgggattcctgctgtcgccgaggcgcttgctcagtcttttgggcgctatatcgaaggggatattgatcgccttcaggtggcgtcgtggcaggggccatcgcgggttggcatgggtgactgagatggcggatgacgcgatgtggtgtttggtgatgttcgatctcccggtggaaacaaagaaacagcgtcgtgaggcgacgcgtttccgtaacgatctgctggattgggggttctgtatggttcagttcagcgtgtacgtgaagtactggccgacgggtgggcaggaccatgcaacgctgagagcgatcaagactcatctgccggagggcgggcaggtgcgggtgcttgctctgacggatcgacagtgggcgacggggcttcgttttgataatgcgaagcctcggaaggaggctggagcacccgaacagctcatgattttctaaccaaaaatcccgaattttcggctattttctgccgaaaattcggggttctcagtatatcaaaggggattggtgattgattcccagcgcgtcctcgcgtcggtcctcaccgtcgccagtatatcaaaggggattggtgattgattcccagcatggtcgacgcgagctgggcgacgacatcagtatatcaaaggggattggtgattgattcccagcatggccacggtcacgtagcagtgtaggacagtatatcaaaggggattggtgattgattcccagcagatcccacatacacggatcgaaatgctcagtatatcaaaggggattggtgattgattcccagcgaatagacgagctcgcgcgtcggccagtcagtatatcaaaggggattggtgattgattcccagcgtcatccacggctgttcacgccacacctcagtatatcaaaggggattggtgattgattcccagcgcgggagagttcgccggggaggcgggttcagtatatcaaaggggattggtgattgattcccagcacggctgtcatcgcccgcatggtcaaggcagtatatcaaaggggattggtgattgattcccagcacaggaacggggtgtcctcgggggacaccagtatatcaaaggggattggtgattgattcccagcatcttttcgacgtgtccaccggcaagcacagtatatcaaaggggattggtgattgattcccagctgcgtgccaggcccgcagactcgctcgccagtatatcaaaggggattggtgattgattcccagcttgaagccggtcggcgtgatgtcgtagacagtatatcaaaggggattggtgattgattcccagcgcctcagtcatctcctgaccaaacagctcagtatatcaaaggggattggtgattgattcccagcacctgggaccgtgctgcctctgcactctcagtatatcaaaggggattggtgattgattcccagccggtgcggcttgatgtcatggttggtgggcagtatatcaaaggggattggtgattgattcccagcgcgccgccagcggtcttctcagacgcgtcagtatatcaaaggggattggtgattgattcccagcgaccctagccgggcagctctcgattgatcagtatatcggctcttcgcatttgagggtgtaggtgtggtgggtggggttgggcgtgtcgtggttgtgtaggggtcgaggtctttcgatgatggagattcctacaccgtccatccgaaagacctcgacatgcccaatactacctttgatcgccccgacctgagcgcgttcacgcgcctggatgacctgggcctggaagtaaccggccagcgcattgagccagaccacgcagtgttggcttgccgcatcgttggtgaggatcggtggtgtcgccgctgcgggtgccagggcgaggcgcgtgacacggtagtcaggcgcttggcgcacgagccttacgggtggcgtcccacgattttgcacgtgagcgtgcgccgctaccggtgcccagagtgcgctcacgtgtggcgtcaggacatgagccaagcggccgatccgcgcgccaagctctcacgggcggcggtgcgctgggcgcttactgggctggtcgtccaccatttgacggtggcgcgtatcgcccaggccctgggcgtgtcctggaataccgctaacaccgctgtcctgggtgaaggccagcgtctactgatcaatgacccggcccggtttgaaggcgtgcgagtcattggcgtggatgaacacgtatggcgccacacaccctacggagacaaatatgtcaccgtcatcttggacttgacgcccatccgagatcgcagtggcccctcccggctcttggatatggtctcgggccgctccaaaaaggtgttcaaaacctggttggcctcccagcccgacacgtggcgtgagcgtatcgagatcgtcgctatggatggattcaccgggttcaagagcgctgccgccgaagaactccccggcgcgaccacggtcatggatcccttccacgtcgtacatctcgctggcaacgccttggatgagtgtcgtcggcgcattcagcaagaactccaccatcggcgcggtcgggccacagatcccctctacaaggcccgcaggatgctgcacaccagatcctgcctactcacggcgcgtcagcagcaccagatactcgacctgttttccagcgacgagcacgtcgcactcgaggtcacctggagcgcctatcagaacatcatcgacgcctaccgctcatccaacgcgcgtgggggaaagactttaatgcacgaggaaatcactcgcctcacctctacaagcgtgccctcctccctcaccgagctcatcacgctaggtaggacactcaaacgccgagccacagacatcctggcctacttcgataacccccacaccagcaacggccccaccgaagccatcaacggacgcctcgaacacctacgcggctccgccccaggacttgcgaaacctcacccactacatcactcgagcactcctcgaaaccggaggattcaaaccccaactacacccccaattatgaagagccactttcccgacggaaagatgccggtgcctgacggtgcatttcgagtatcttctcgcaatcagcaagttcactagccacaacgagaccctcatcagacagcttcttccagaacgcaatcccgttagggtcaatctcaatcccagagacaccaatctgatgatccggaaacctccgacgcagctcgaggataagctctgtcccccagccaacacgacgggcacaatgagcaaccttcaatcgagtgactgtaacttggctgccgcaaacaagaaaactacattgtgccaaggtttcttctttaagcccacgttttatatggtcaatacgaaggtgctcacgattttcgatccataatctaaagttgccaacacgacgttgatcccacggaccgatagcagagccattagatgcccgaacgaagcgcgaaaaaagtttattaaacacagctacattatagcattagctgggggataaaaccggactctgcacattgcttatccagccgaatacttcactcaatgccaggacacctgcgcatatgcgccatgtcagaggccacatgctcaaggcgtagtccacctctcccacaacggcccgttttcagcacttttctccgaggtggtctgcactttgagtgccgcaccacctcgagtcgcgacctgaccgccacccgatgggggaattgcactacacgggggtccgacacgccggcgacacgctgtacgacggcttcatatagtgcaaaacccccaccacttccggcttggagggcaccgcatcgcctacaagaccgggcgcaatgtcggttggcgcgaaagactcgcccaacaagcgcaaaaacgccgaatttggggtgttgtgagcgcgcagggcgaactttttcgcgcccggcacggcaactactcgaaatcaaaacggtcaaggtcattacgggctcttcgcattttggggtgtgggggtggtgttcgaagcgtcccggggattgtggacagtgtcgtgggacgacgaccgaacacaggagctcgcctcgggagcctcatcaaccaaaactcgcacgcaattcggatacccgaactttgtgcagcaccccaaaacgttgcaattccaacggtgcgatttcaacgtttgaaatacatgtcggggaattgcgtgcgacatttctgaggaaccacaacatgaggcgccacaaagacccaagcagaagacaatccaagcccggaagacaacccaagcggaagacaactcaagcacagaagacccgacagccgccacaaccgccacaagcacgggggcactgcacccgttacgtggcggtgcacccgttacgtggcggtgcacccgaacagaagaggtgcattgcctacggatcgggtgcagcgccccaacaaacaagaacaaacgcggaactggcacaccgaaccactcaccgccacacccctccatgcgcacctgggccctactggcggcgggatgggcacgccgcccacgccaccacctgcactccggcccactccggcccactccgacacctcctacacccttaaatgcgaagagccggataacctatccgcgaagacgaaacctatccgcgagcgcccagacaacaaggctatccgcgcatctccccacgccagagacacacccagcaacgcaacacgccccttcccccaccccgccacgcgcaaaggcccgccgccccacgaggggacggcgggcctcgtcgatgagcgtcaggacccctggatcgtgaccgacacgtcccgggtcgccccgtcgcgagcgatcgtcaggttgatggtgtcgcccgcccgatagcggcgcacgtagccgatgagctgcttggggctggtgacttcctggccttcaaccttgaggatgacgtcgccggagcgcagcccggcagcggcggcaccggagccggaggaaacctcctgaacctgcgcgccgacgtaagtgtcggagccgacggtgacggttgcggccttgacggtgacgccgagcatcccgtgggaggcagaaccggtcgtgatcagctggtcggcgatggagacgaccaggtcggaggggatcgcgaagcccaggccaatcgaccctgcctggccgtcggcggaggtggccagcgacttgatcgaggagttaatgccgatgaccgcgccggtcgcgtcgaacagcgggccgcccgagttaccagggttgatggaagcgtcgatctggatggcgttggtgacgaccaggtcggaggacgcctgcgcctggtcctgcgaggtggagtcctcgtccatggagacctcgacggggcggttgagtgcggaaacgatgccggtcgtgaccgtgttcgacaggcccagcggcgcaccgatcgccatgacgggcgcgccgacctgcaggctttgcgacgaggcgaaacgcgcgaccgtcaggttcgacggcgggttctccaggcggatgaccgccaggtcggtggtcttgtcgtggccgacgatgcccgcaccgtagaggcgtccgtccgccagggtgacctggatctgcccgccgttgatcgcgggcgagatcacgtggtagttggtgacgatgtcaccctgcgcgtcgtagatgacgccggagccggtgccgcctgatgaggcgttctggctctggatggtgacgactgccggcgaaaccgccgaggcgacggccgtccagtcggtggcatcgctcgacgcgggcacggtcgcgacggtgccgttgttgaggttctgcggcgtggtgacgcgcagcagctcggggcgcatgtagagcatcgcacccagcgtcagaacgattgtcaggagcatcgcgccgagcagggcgacccagcctggacccttctttttgacgacgacgaccggtgcgggggccgaggccggggccgggtatcccgtcaccggctggcccgtgggcgcgccgtaggtgccgcccggtgccgtggtgccttgcgcgtgcggctgcgcgtcggtgggggctgcggcggggaacgtgacgggggctgaggctacctgaggcgcagccgagtcctgggttgccgtcccaccctggggtgccgacgccgcctgctgcatagccgattcctggggcgcgggaattggggtgtgaggagtgttagctgtgcgtatctcctgcgtgacgtccgcgccggtcggcgctggaattggcgtggcggcgcgcgtctcctgcgtgacgtgttgggcggcggtgccgccgacggtgggcaggtcggtgtcaggtgcggacgaggccggacgctgcgggtagctgggggcggcactggccgcctgatcggcctgttcatcgggtctgggaatacgaggctcagtcatggtttcctctggtgtcagttcattagttactcaccagtatgagccgtttcctcaaacgagtactggaagccccctgtgagtttcctgaatagtggacacgcgcgcggggaattcgcgcggccgggatcagaactcggcctcgcacagggcgttgcgcgcctgcgcgtacaggtgcgccgcgcgttcgatgggcacgtggatgaggcgcggccccgttaccggggcacgaaggattgaggcgagttcgctcggagcgtacgcccgcgcgaatccgatgccgtaggcagccgcgagcgcctcgtagttgacggcctgggcgacgccgaaccagcggtcgtaggcctgtggggtggcggcgcggccgtgttcgagggtggcgaagatgccaccgccctcgtcgtcggcgacgatgatgtcgaggtcggctcccgtcgccgctgcgagcgccagcgaggatgcatcgtggctcagggtcaggtcgcccatgaccgctgtgacgcgcgacgcttggttcgggcctgcgtccttcccgcgccgagcggagcggggggccgaggcctcgtcgcggtgagcgtagaccccaagaccgagcgtgatgccgacggcggtggcgatggtgccgtcgatgccggcttgtccgcggttggagtagacgtgacgcccgttcagggaggcgacggccaggtcgaaggcacgcacggggttggaggcaccgagcacgagggggccgaccgtggccgcagcgacggcccgtgccaggtcgagcatgctgcgcccggacccgccggccagaagggcgtcgatgcgagaggcggcttcgtcggcggcggagcgcacgcgcgcggcccacgaggattcacaggacgggacgcggggggcagccagcgcgggcacgacgatggaggcgttgccggagatgtcgacccacgggatgccggcgtcgacgacgatgacgcgcacgtcgggacgcgcgagcagcgcgtggatgggccgcgagagggtgggtcgcccggtgacgacgacggtgtcaacttctcgtcccagagacgacgacacgatggcctgctcgaagggggtcactcccccgcccgcccacgcgccggacgcgggttccgccaggagcgggaagcccgaggtcagcgaccactgcgcggcccgcggcgagacaccttcaccggcgacgatgaggcctgcgcgcgcctcgcctacgacgtcctcccagcgcgcgggcgcgaggctggcggggagcacccgggtggggcgcggaacgaacgcggccggggcctcgtctgcgggatcgggcgcggatccgccgtcagactccgcgccaacgcggaccccctgtggcgtgagcggatccctgaatgcgacgttgatctggacgggtccaggcgttccggtaggcgcgccgagggcggcggcgagggcgcgcgagagctgcccaacgagggagcgcgagggttcttgcggttccaggtcgatgctggcgcgggcgtggacgccgaagagtcctgcttgcgcggtggcttgcgaagcgccgacgccgcgcagctcgccgggccggtcggcgctcaggacgaggagggggaggcgcgcgtgggaggcctcgaggacggcgggggtcagttcagcgacggcggtgccggaggtgacgatgatggcgggcagggcaccggtgcgcgcgaggcccacggcagcgaagccggcgctgcgctcatcgaggacgggacgcgcgtcgcccccgaacgcccctgcttcgagggcataggcgaagggcgcgctgcgcgagccagggcagtacaggacgtgcgtgaggcccaggtcttccaggatggacaggatcgcgcgggcggtatcgacggcgggcatgcgcccagcctaccgggagacctcttccaggtgctcggccatgccttcgaggcgcatcccccaccggctgaccaggtcggagtcctcggggcctcgcccgatgaggttcaggtccggcgcgaggcgtccgacgggcagtcggcctcgttcgggcactaggggggtggtgacgtctccgacgagcaacgaggccgtggcaagaccggcggctcgggggacgccgggaacggcggcggcagctgcgacgccgatggacaggcccacggaggtttcgagcgcggaggagacgacgacgccgaggccgcacttgcgggcgacccgcagggcggagcggacgccgccgaggggcgcgactttgatgatgacgacgtcggcggcttccttgcgagccacctcgagggggtcctcggcgcggcggatggattcgtcggcggcgatgggcacgtccacgctgcgacgtacctcggccagctcgtcgacggtcaggcagggctgctcgacgtattcgatggggacgacgccggcagcgtccgtcatcgcggggatggccgcgcgcgcgtcgtcaacttcccaggctccgttggcgtcgaggcggatcatagcctgcccgccgacggtttcacgcagcgcgtcggcgacggcggcgatgcgcgcgcagtcgcgcgacacgctcacaccgggttcagcgaccttgattttcgcggtcgcgcagccgccggacaccttgacgcgctcgtaggcctcttcgggcgagatgacggggatcgtcacgttgacgggtacgtacttacgacgaggcacgggcgggaaacggcgcgcggattcgagggcggcacccagccaacgcgcagattcggcgtcgtcgtagttccagaagggggcggcttcgccccacccggcatgaccatggaggaggagcccctcgcggcgagtcaccccgcggaagcgcgtggtcatcgctacctt

SEQ ID NO: 4358 - DNA, 16737 bp, synthetic construct
  source 1..16737: mol_type = other DNA
  misc_feature 1..16737: note = Synthetic
gtcgacaaggtggttcctgggccaatcagggatttctcggggtggacgcctctaccccgagcctggccaggcacgctaggctgtacgggtatggccccgcggggcccaccgactaccgaaaggcttcattcatgacgacgcccgacccgcaggtcaccccctccttcccggaggatcccacgaaggctgccacctccgcggcaaccccgggtgcttccgctgcccctgacatgcctgcgaacaacgcgacagccgacatccccgctcctcaggttcccggccctgacgcgccgagcttcccccaggcctcggcccccgacttcgacgagtccatggccactccgggcacaaccacctacggaactgcctacgactcggcgcccgccggtgacgcctacggagcccaggcgggctacgaccaggcgggctacggccagcccggctatgaccaggcggcctacggagcccaggcgggctacggccagcccgcgtacggccaggcctacaccggcccggccaagcagtggatcatcgccgtgctcctggcgttcttcctgggcaccctcggcatccacaacttctacatgggctacacgatgcgaggcatcatccagctggttctcacgctgaccttcattggcgcgatcgtctccgccgtctgggccttcatcgagttcatcctgattctcatgcgttccggctcctacgcgtgcgacgcgcagggacgcccgctggagtgacccctggggctgttgtcgcggcgctgagtatgcgacaatcaagtcatgctgctcagtgaccgcgacatcaacgcctccctggatgctggacgtattcagcttgatcccctggatcgcgacctcgttcagccggccagcattgatgtgaggctcgatcgcctgtttcgcctgttcgacaaccacaggtactcggtgatcgaccccgcggcagaccaatccgacctgacccacctggtcgaggtggaccccgatcagcccttcgtcctgcatcccggggagtttgtcctgggcgccacctacgagttggtcaccctgggcgacgacattgccgcccgcctggagggcaagtcctcgctggggcgcctcggcctgctcacccactcgacggcgggcttcatcgatccaggcttctccgggcacgtgaccctcgagctgtcgaacacggcgacgatgccgattctcctctacccgggcatgaagatcggacagctgtgcttcttcgacctgtcctctcccgcgctccatccctacggatcccaggggctgggttcccactaccaggggcagcgcggacccacgccctcgcggacccacgaacgtttcacgcgcactcgcatcgaacggtgacatgatggcgtctcttccccctccgcctccgtcgaggcgcgaacgcatgcgcgccgagcgcgaagcccgagctgcccgcgaggctcgcgagatcagctacccgcccgcgcccgagacggcgaccaccctggccgaaccgcccgcaccgacgccggtcctgggagtgccctccatgggggcctccgcgcccgcgggcatgccaccggttgccccgccgactgcgcgcacaggcatcatcaagggagtcacgctcccgggcatgacctcgagcgcgcagacggtcacgaaccacggtgagaccgcggaacgctcgccccagagacgctccctgaaggaccgcatggcctccgcgccccgcaccttcgccgacccgcacccccagacctcatcgggggccagcccgctcacgcaaaccaacgtgtccctcacgtcccttaccgccgcggacgccgcgttccaggtggccgcggacggcgagatcacgagcgccgaggccgcgccccccatcgccgcagccattgaggtgagcgaacccgcgggcgtgatcgacgcccaggaggcacgcgaacaccacctcttcctcgtctccgacgcggtcgatcccgcggagctcgaggctctggcgatctccatgtgggacgagtccgggtggatcgctccgggccgcctgcgcctgtcctccgacgccgagctcgaggggccgtggacgctcgaccagccgacccgatccgctctgggcaccccggcctcgttgacgaacgcgtggatcctgcgctgcccggtcgcgcgcgcccggcaggcgggtggcgccgtcatgggtgaatgggccaaggccttccccgacggcgtccccaccggcctggagtaccgggtgctcgaggcgctgcaccgcatggcgcgccgcctcgccgggggaatgaggatcgcgggcagcggctacgtgatggtacccgacgcggactccgccgtgaacctgacggtctattcgccgcgatggatcgcccccgaggacctgctcgacgcgatgcgtgagcgcgccggtttcaccgacatgaaggacgcgcgagacatcaccccgcaggccgccaagccggcgcccctgagcccggctcaggccgcccagatcgcgaagatcaaggccgagctgggtcccgtgcgcgaggacatcgcctcgaagatcgcgaaggcgcgcgaggagcttgagacgcaggcggacaagccgcaggtcgttgacggctatgcgctcgtgagcccgatcggacacaggtcgaacatgatgatcgaggtccacacggtgcccacgcccccgcgtgttctgcgctgggaaccctggaccgccggagcgatcattgagtaccaggtcaggtggcttccgggagccgcgccgaccccgggggcgggtgcgctgagccgcaccgcgcgcctggagcggctgcgctccacgcaggacgtggagaaggccgccggaatgatcgccacactcgtgggaggcaacgtcatcgacgaggacggcttcctggtgggcctggaggagatcgccccggaggacgagaagtaggcgcctcgccggtggacgacctcccgccgcgccgctagggtggtgttgcccgtaatcaacgaatggaaaggcgatccatgaagctctccgcacgcaaccaactgcccggtaccgtcgtcgaggtcagcgagggtgccgtcaacggcatcgtgaagatcgaggtcgcgcccggcctggtcatctcatcctcgatcacgaacgccgcgatccgggagctgggcctcacggtcggttccaaggccgtcgcggtcatcaaggcctccaacgtcatcgtcggcgtccaggactgatcctatcgttacgcacggggtggctccgcaggttctctgcggagccaccccgtatctgtgtttgttcgcgagctgacgtgctgacctagatccgcgagcgcggctattgcccgcgctcgacggcctcgagaagcatgacggcgacgtctcgcacctcgggaagcttgcggcgcgcctcgcccgctgcgctgtcggccccgtccgcttggggttcggaggccccggtggacacgaagcccgccgacgcacccgaggccgatcccagcatctgggagcagaacgggcaggccgtggcaaccacgtccgcccccgcctgcgcggcctcggcgatgcgagcgtccgcgatgcgggtgccgcgggtctcctcgaaccaggcgtgcgcgcctcccgccccgcagcacatggcgcgttcgcggttgcggggcatctccacaagctccacgcccggcagcgaacccaccagctcgcgcgggggctcgtacacgcggttgtggcggcccaggaaacaggcgtcgtgataggtgaccttcaggggcgccccgggagcgccctgctcgggcgcgtcggaggcatcggcgtccgcatcccgcggggcatccggggccaccggcgtgagcagtccgtcgcgcacgagccggttcaacagctgcgtgtggtgaacgacgtcgaagcgcccgcccagctccgggtactccccggcgatcgtgttgaagcagtgcgcgcaggagacgacgatcctcagcggcttggcttccgtcagggtctcaatcgcctgagcggccagcatctggaagagggcctcgtttccggcccggcgcgccgggtctcccgtgcaggactctccctggccgaggaccgcgaacgacacgccggccgtgtgcaggagctgcgcgatcgccgcgctggtcttcttcgccgtgtcgtcgtaggcacccgcgcatcccacccagaagagatagtcgacggtggaggcatcctcgatgtcctcgccgacgacggggatgtcgaagtcgagcttcttcgcccagtccatgcgcttgcgggcgctctggttgtaggggttcgccttggactccatgccccggaaggcgcgcccgagctctcgggggaaggccccctccatgagcacctggtggcgacgcaggtccaggatgtggtcgatgtgctcgatgtcgacggggcattggtcgacgcacgccccgcagttcgtgcaatcccacaggacctcctcggagacgacgccgggcaccaggggagcggtgacgggagagacgccctcggctccggtggcgccggagagggacagcgcggagaccaggtcgaaggagtggggtgatgccggcacccccttgtcgagaagcacctcgccctcgtcgaggtgctggccggcctcctcccgctcaacgatctggacggaggacgcggactccatgtggtcgcgcaggcccatgacgaggagcttgggggagaggggcttgcccgtgttccacgcggggcacagctcctggcagcgcccgcactcggtgcacgcgtagagatcgaggcgtgccttccacgagaagtcttcgacggttcccacgcccaagacggtgtcttcgggtacgtcgtcgaagtcgtcctcgctggtgaccggcttcccatcgatgagcatgtggtcggccggccccagcgatttggttccgtcggcgtttcggcgcgcgtacaggttgaggacggccacgaagcggtgccaggcgacgcccatgccggtctgcacgcccacgaccgtcagccaggtcatcgacgtgaggaccttcagcgcgctgacaatgacgatcgcgttcgccagtatcgacgccgacgaggcggcggacgcgaagagggaaccaagccacgcggtgagcgggaaatggaggagggatgcgtgcccctcgaggccaggtgtggagccgaagagcgcgaactcaagggcgcgcagggccaccacgcaggcgcacacgacgaggatgacccactcgacgaagagggcctgccagcgggtggaccccaggaaacgtgaggcgggcccgaggggggaggagtctcgggggtgcgggcgcgtcagggccgagggcagggggccggtcgggtcggcctgggaggcagcctcgtcggggttgtcgctcgagagggcggcctcagcggccgagccgtgcccggcgcgggcgcggacagccatcaggaagatgatgccgatcaggcccccccacgcgaagacctcggtcagccattcccagggcgggaagtggccgaggaagggcagggtgaaggtctggtcccgcagctgcgcgtatcccgtgaccagggtgaggaacaggatcgggaaggaaaccatgaccagccagtgggcgcacttgatccacgggcgtcccctgaactcgcggtgggtgagcgcggcggagaggacgccccacaggcgcctaccgaccgggcgcagccgtccggggtcgggcgttcccgaagcgaccgtgcgccacatgtgcgcgagcccgcgcgcaaaagacacgacggccagagcgctcaccaggagggcaaacccccacatgatggcgctaagtgtcggattggccacgtctcctcctcatggttgctgcaccccattgtggcatctcgttccccgcgtgaccgggtggcccggcggaaagcacgcgcaattcacgctcggatcgccgcggagagagcgcgtgtgggtagcgcaacgtggacaagtcccgctgagagacgaaaagtgtgacagagtggaatcgtgcttcccgtctcgcagccagacatgacactgtccgatcaggagctcttcggagacgatcgtccccgcgatcactgcggcgtcttcggagtgtgggccccgggcgaggacgtttctcgtctcacctacttctccctctacgccctccagcatcgcggccagcaaagcgccggcatcgcgacctccaacggcaagcagatcctcgtgtacaaggatcagggcctggtctcgcacgtcttctccgagcagtccctgcagggactgcgcggacacatcgccctcgggcacgtccgctacgcgacgaccggcgcggacgtgtggcgtaacgcccagccgaccctcgggcccacccccaccggaacgctcgccctcgcccacaacggcaacctcacgaacaccgtggagctgcgcgagctggcccgatccatcgccgaggaaggcgaggacttcgaacgcggggcgtcgaccgacacctccctcgtgacggcgctgctgggtatggccgagcgaattccgggaccctcccccttcatcgcggctcccaccgtcacccccgctgtgcccgagccgcacggggacaccccggcctcgtccgcggatcggggaggggaagcctcgggcgagcaggcgtcggccgaggaggcggcgagcgggcagaaccccggcgggggcgaggcgacccagcccgagcccgcgcccctcgtgggagccgccctgaaggtgttgcctcggatcaagggcgcgttctcgctcgtcttcatggacgagaacaccctctacgcggcgcgcgacccccacggctaccggccgctcgtgctgggacgcctggcgtcgggctgggttgtggcctcggagacggccgcgctcgacctgtgtggcgcgaccgtcgtgcgcgagatcgagcccggggaactcatttcgatcgacgcctccggcgttcactcgcgtcgcttcgcggtgcgccgcgccaacacctgcgtcttcgagtacgtctacctcgcccgacccgatacgaccatcggggggcgccggatcgttgccgcgcgccacgagatgggggcagccctcgcccgggaaaaccccgtcgaggccgacctggtgatgcccaccccggactcgggcacgcccgcggctatcggatacgcgcaggaggcggggatccccttcgctcagggcctggtgaagaatgcctacgtgggacgcaccttcatcgaacccacccagtccctgcgccagctcggcatccgcctcaagctcaaccccctgcgggaggtcatcgagggcaagcgcctggtcgtcatcgacgactccatcgtgcgcggcaacactcagcgcgcgctggttcgcatgctccgcgaggccggggcccagcaggtgcacgtgcgcatctcctcgccgcccgtggcctggccctgcttcttcggcatcgacttcccgacgcgcgcggagctgatcgcctcctcgatgagcgtcgagcaggtgcgcgactcactcggtgccgactcactggcctatctgtccatcgacggcatggtcgccgccacggggcagggaacctccctgtgcctggggtgcttcaccggccactacccagagacgattccttccgggactcccgtccccggaacccccggggcgaacgcctgctaggcccgcgcccctcttccctgacccgacaacaccgacacggcctcatccggcgcccaccttcgaaaggcagcacccatgaacgacaccccccttgactacgcgtccgccggagtggacaccgccgccggtgaccgcgccgtcgaactgatgaagagtgcggtggccgccacccacgacccgaccgtcctgggggcgaccggcggcttcgccgggatggtcgacgcctccgccctgctgggcatgaagcggcccctcctggcgacctcaacggatggcgtgggcaccaagatcgcgatcgcgcgggcgatggacgtgcatgacacgatcggccaggacctggtcggcatggtggttgacgacatcgtcgtgatcggcgcgcgcccgctgttcatgacggactacatcgcgtgcggtcacgtggtccccgagcgcatcgcctcgatcgtgaccggcatcgctcgggcgtgcgaggccacgggcactccgctcgtcggcggcgagaccgccgagcaccccggcgtcatggaggccgacgactacgacatcgcgggcgcggcgacgggcgtcgttgacgcctccgccctgctggggcccgagcgggtgaacgagggcgatgtcgtcatcgcgatggcttcctcgggactgcactcgaacggctactccctggttcgctcggtcctggcccgcacgggagcgccgctggaggggcacgtcgacgagttcggccgcaccctcggcgaggagctcctggagccgacgcgcctgtacacgcgcctgtgcctggagctggtcgagcgtttcggtgtcgagggcattcacgcctactcccacgtgacgggcggtggcctcggcgcgaacctgtctcgcgtgctcccggtcagtgcggtcgcgaccgtcgatcgctcctcctggaccgtgccccccgtcttcgactgggtgcgtcgcgggggcgacgtcacctgggcgggaatggaggactccctcaacctcggtgtcggcatggtcgcggtggtgtcggcggcggtcgccagcgaggtcgcgggggccatcaacgaggccggggttgacgcgtggaccctgggctgcgtcgcctcccgcatgcccgatggagagatcgtcggttgtagcggggccggtggagctgagggtgcgcgcctcatctcgggcacgaagggcgtgaaggcgggggcggtgctgctgcacggctcctaccgcgtgggctgagggcgaaggggcgcggccgcttggacgagcggtcccgccccctcgcccccgggtgctcccggagctgggcgcgccgaagcgacggaccggtgcgggcccgccgtggtgcttcagccgttacttggtggaggatccgcccgtccagaaggactcatcgagctgcttcgggtcgatgtcgtcgtcctctgccgggatgttcgcgaagtcggcgtacttggagtagaggtcgtcgtcgatcgcatcgtcctcttcgggctcgtcagccgcggcgtttgccgcgtacgagtcctcgtccgccagctctcgctgaagtgcgtgtaggtcggtgtcggggctgaagtacttcagcttccgagcgactttcatctgcttagccttttgacggccgcgccccatggcgtcgaccccctccgcgtcgttcgggtccgcatcaagcggttccctgggtgttcaaagtgtttcgtgggaccatcatagctaatgacgggccttgacctcaccttggatcggattttgcgcgcacagcggagcgaggacagccgatgggaggcccgtcaagtcgcggaaacgcgcccggaggcgtcccgtctgtgagcgccctaacgccgggtcggctcggcgggcgggtcgcccggccgtcagccctcccgtgggtcctcggccgacgcgaggagcgagagcgcgagggttgccgcctcgtgcgcggagcgacgcgcctggcggcgggagcgcctgacggggcgggtgacgagccacgcgatgacgccgatcgcaccgatggtggacagggcggcgatgcccacgcgtttgagtgcctccgtgttacctccggccgcgtcctgcagcgtgagggccgcgctctccttgaaggaggcgaagcgggcggttgcgctttccttgacctcctgcgcgagggcggcaggctggacgcgggcgtagagctggtcgatcgtcgcggccagttcggcgcgctgacgctcaaggtccgcggcgatctgagcctcggagcgcggctcggctgcctgctgggaggtggcggcaccgacggtgacgttgcgcgggtcgaggttggtgctcacttccccagtcccttctcgatggcttccttggtcgcggcgacggacgcggccgggtccggtcggtgctcctgcgcgttctcgagggaacgcttgcccaggagcgcgagcaccaggacgatcacgaggaggacggcgacgatgatgagggaggaggcccaggcgggcagcaccagggccaggagaatctcggcagtgtgcagcgcccagcccagcaggaagagggcgaagaccgcggcgccaaccagcagggccgcccccttgccgctcttggacacgaaggaacgaagcttcgtcttgttgagctcgatctcgtcgcgcacgatgccggagatctgactggtgacagacgcgaagagggtgccgatgctgggcctagccgcggcgccgccgggagcggggtcggagggcggggggtattgcccgggctggggggtgggctgtgtcatgggggctcctgcgcatgcggacgtcacgaggcgctgcctcgcctgatacgcctagtgtctcatgaaggatggttgctcgcagtgacctgtgcgctactccctgggcgcgatggaaccgggcaggtcggagaggatcttgcgggcacgaaccaccagttcggacacctcgggttcggccagggttgggtcctccgcctcgacaatgggaatgccgcgcatcgctgtttcggtgcggggctcgcccacgctcaccgttccgctcgcctcggtgtccgagacgggagcgtcctcgggggcctcggggtcgaagccctgcgcggaggcctcggcgtcggttcgggagggggaggcgctctgggcccgggcgtgcgcggcctcgtcggcggacgaggcggtggtgagggcgtggaggacctgcgggtcctcggagtttgcctccagggaggtggagatcagctcgatggagggaccgggcgcgtcgagggcgacgtggccgttcgtgaggaggatcgcgcggtcggcggcggccgcgacctgagggtcgggcgtggacaggacgacggcgcaccccgccgaggcgaggccgcgcaggaggcggtcgaagtcggggcggtcggcctcgggcagggacgcggggtcttcaacgaggaagacctcggccccggagacgatcgcgcgcgcgatgagcgccttgatgtgctcccacggcgagagctgagaggggcgcaggtcgacgcgctgggccaggcccgtgatctggagggcgcccacgaggttgtcccagtcggccacggagccggtcgccgagaggggggccaggatgttctggcggatcgtcagggactggtccaggggcgagtcggctcggatcagcgcgaccgaaccgatgcgaccggccaggcgcgccgagagggaacgggacggggcggcgacgatgcggccggcctgcggctcctcgagccccgccaggatgaggaagagggcgcgggcgcgtcggcccgtcggatccaggatggcgctcagcgtgcgcgcgcggaaccccaggtcgatgcccgccaggaggacgacgccggactcgtggtccgtgtaggtcacgcccaggcccgcgacctggacgcgtccgccgcgccccttcgcggcaaaggagcggcgggagcgataccacgggcgaggctcggccgcgggcgcgcgggacgggaacgcggcgaggggggcctcggcgggggaggccgcgacctcggaggcgcccgcccccgaggcggaggtgggctgggcgttagcgggcccagcggcggacgtcaggtcggccggctcctgatcttcgataccgtgcaggttctcacgcgagtcattcgacatgaccccattctttcagcatcgtgtcgattgtgccgtaatggcgcgcgggagggggtggggtgggcgcgcggacaagtgcggcacgaagtggcttgcgtctcgtgtcttgcggtgctatgctgtaagcgattgattctcagtaagagccgactcgttagcggctccgaatgctccaccgggtccttcttcgcgagggacccggtattttttcgaaaccctcccgaagtatgtgtgggttgtgccaccatagggtgtatgacttacgcagcaaatgacaaggctatccgctaccgtgtcggcatcgacgtcggcctgaggtccatcggcttctgtgcggtcgaggtagacgagcatgatcagccgttgaatctgctgaactccacggtgtttatccacgacgcaggcgttgacccaaacgagaataaggcggccaagagccgcaagctcaccgcgggggtcgcacgccgcacgcgccgcctctatcagaccaggcgtcagcgccttgctcgccttgatcgagttctcgcaaacgagttcggctggcccatcattgacctgactcgagttgaagatccccgcgaaccctggcgggttcgtgcccagttgctggaggggtacatagaggaccgcgatgagaggaacagggcgttatcgattgctgcccgtcacatcgcccgacaccgcggatggcgcaacccatatgcggacgtacgaaccctcctccagtcggccgagccgggcgacttcctcaaggggctcaatgaacgtgtcagcacggcgctacgaacgagttaccctgctgacgcaactcccgggcagctggtgaacgcctatctctcacacccggattacgctggaaaagcgggaacaccgaagatcaggggaccgaaggggattctcgccggcaagctccaccagtcggataacgcggcggaaatccggcggatctgcggcgtgcagaaggtgtctgccgacgagcgggatcaacttatccgtgcggtgtttgacgcgaagtcaccgaagggcagcgcgaaggaacgcggtctggttggcaacgacgagttgcccgggcagagtaagcacgtgcgcgccgagaaggcacacccggtgtttcaacggttccgcatcgtcagcgtgctggcgaacctgcgaatccgcgaggggcgtgccgagcgtcgcctgactgctgatgaactggccggattgacggacttcctcatgattgcgggcctcaaacaagccgtgacgtggcaggacctggctgacaatctgggaatcgagcgcgctgatctgcgagggactgccaaggcgtccttcgataattcaccggtgctaaggaatccgccgacggacgtgaccaccgagaagatcctggcctgcaaggtcaagtggctcaaggaatggtggaaggaagcggatgaggagcagagaggctacatggttgacgccttctcgaactccggtggttccgaggatttgacggatgtcaacgacgaggtggcagagctacttgagcaggcgtcggaggaggaccaaagcgagtttgagaagatcgcgcttccgcaagggcgcgcggcctactcgctggacagtctgcgtcggttgaccgataggatgctcgccgacggagttgacctgcacgaggcgcgtcggattgagtttggcgtgggtgacgattggaaaccggcggtggaacccattgaggcgccgacgggcaatcccgcggtcgacagggttttgaagcaggtgagtcgttggctgcacgccgcgacggaccgctggggggagccgacggtcatcaacatcgagcatgcccgtgatgggcttggctccgagagggttgcccgcgagctgatgcaggcgaatgagaggcgaagaaaggccaacgctgcggcggttgcgagcatggcggagaaactgaatatctccgggaagattcatcgttccgaccagatccgttacttcgcgctgacgagacagaattgccagtgcctgtactgtgggaccgccatcacctactcaacggcagagatggatcacatcgttcctcgcgccgacggctcgtcgacgaacgaccgatccaacctggcagccgtatgccgaacgtgtaaccaccggaagggcgcgatccccttcgcggtgtgggcaacgtctgaggacgcgaatgagggggtttcgctcagcggggctcttgagcgcgtcagcatgtggcagcgcgagaacgggatgtccccgaagcagttcaagcagctccagcgcgaggtgaaggcccgtctcaagtcgaagaaacccgacgaagagttcgatggtcgctcgatggagtctgtctcctggatggcggttgagctccggacgcgcgttgaggggttctaccgcgagcgagacggcgagcgcgttcccagcgttggcgtgtaccgtgggcagctcacagccgaggcccgaaaggcctcggggttcgagaaccgcgtgaatctcatcggtggacgtggaaagactcgcctggaccggcgtcatcatgccatggatgccctcgtgatcgccttgatgaatccctcggtctcgcagaccctggcacttcgtctgaatatgcgcgacgcgcagcgcctgacgggccgggaagagacctggaagaacttctatgggaagccgggagccgcatcccagcgtttcgaaacctggcgtgagtcgatgctgcgtgcggtggaactcttcaacatcaggcttagtgagaacacgatcccgttcgttgagaatattcgcttgcgtgtcgggtcgagtgccatgcatgatgctacggttcattccttcagaccccggaggaatacggcaggggagctgatccaggagaagggatgcggtgagcaacacccgctgagctccgcgcttgccgtcgaactgattgaccgggctgaaaccccggccctgtggacagctcttactcgctgcccggattttgaccccaagaaaggactccccgagaatccaaatcgcgtgatctccgtgaacggcacgcgcgtcggaccggatgatctcctgaacttctttgggtcgtccgctgcctgcgtgaaggtgcggggagggtacgcggagcttggaaactctattcatcacgcgcggatctatcgaatcgacgggaagaagaccgtatacgcgatggtgcgggtcttccaggtcgacttgctccggttgcggaaacaggacgtgtttactgcgccgctcaagccctcaacgatctcgatgcgtaccgccgagccgaagatccgacaggcgcttgcggaggggagcgcgacgcagatcggctggcttgtcgagggcgatgaactccagatcgaaacggacaagtacacgggagggtttgttggtcaactcctggagcggtatcccgaggcgacgagctggagggtggcgggcttcatgaatgcgaggcagctgagaatcaagcctctcctgctctcaaaggaggggtttgtcgacgaaagcatggcgcgaaagctcggaattgaggagacgcctgaggcggtaaggaaaactgttgacgctcccggctgggttcccgcggtgaatgctctcctttgtgcagggcgagtccgtgttgttcggcgaaactgtctcggcgaggagcgctatggttccgcaacctcactccctgtgacaatcgtgttggagtgatctggcgtggccgagcagtggcgggtgattgacctctgtgagttcgagggccgggtcgcgtccgttcgcggaggaattgaggtgtgtccggaagatgggagtccgacgactgtgcccgtcgccgaacttgccgtcatcctcgtcggcatgcacgtcaatctgagcgctgctgttcttcaccgtcttgccgaggcggatgtcgccctgcttttctgcgactggaggggtgtccccgaaggtggctgttactcctggtccgaccatgggcgagtggcagcccgccaccgggcgcaagccgaggtctcgttgcctcggaagaagaacgcgtgggcgcggctggttcgcgcaaaaatcgaagggcaagccgcagtcctggcaaacatgaaaatccggggcggcggtgagcttctggccctggctgatcaggttcgttcaggcgatccgggtaacgtcgaggcacaggcggctcgcctgtactggtcgcgtacgctggggcgagaagtggggcgtcagccttctgctggccagctgattggcgccaacgcgtgtcttgactatgggtattcggttctacgagggcacctgatgagggcggtgttggctgcagggcttgctcccgcactcggggtattccacaggggacgtggcaacgcgtttgcgttggcggacgatctgattgagccttttcggccggcgatcgatgaggttgccctacagctgccgtcgacggcatcaccgtcggatcgcgaggtgaaacaactcctggtggcggcggctgctcagcgttttgaccgagatgggcacggaattccgacggtggcggaaggtctggcgcagcgtttcggccagtacgtcgaaggggacatcgatcgcttgcaggtcatttcgtgggaggggccgtccacggtggtcgtgggagagcgcgatggctgatgatcccatgtggtgtttagtcatgtttgatctgccggtcgagacgaagagccagcgtcgcgaggcaaccaggtttcggcacgacctgttggactggggattttgcatggtccagttcagtgtctacgtcaagtactggccgacgggagggcaggatcatgcgaccttgcgtgcaatcaagacgcatctcccggagggtgggcaggtccgtgtgttggcgctgactgatcgccagtgggcgactgggcttcgtttcgacaacgcaaagcctcggaaagaacctggctgccccgagcagctcatgattttctgaccaaaatcccctggttttcattggtattccaacgaaaaccgggggatcccagtatatcaaaggggattggtgattgattcccagc

SEQ ID NO: 4359 - DNA, 15330 bp, synthetic construct
  source 1..15330: mol_type = other DNA
  misc_feature 1..15330: note = Synthetic
ccagtaacgtgccgaatcctcggggacacccagggacttggccgcagcggacacgacctcgggtgcggacacgagcgggtcacaagcgcagccagggtgtgcgttgacgagggagtcggcgatctcgtcataaacaccaatcaccacatcgaggcgcttgcggatcctttgcagcgagtactcgccctcgtcgatcgcgtcgagcagacgccgatccgccgtgaagtctttcgacctgttcggatcatagaagacggtcgggtacggggcgttcgtcattgaccaggggccaagagaatcgacctgatccgagggcgcgttctcgtctacggcgggcaggcccaagacggtgcgcaggccgctcccatagtcctgccactcgactttcacgcttcggcacgccgacttcatctgctcgtacacttgggcgagccagagcgcgaagcggctaccggcctcggcctgagcagcagcccacagccagacatcagggtcgacgctgttcggatcctgactgagttcgcgcagtcgccgcgcgccgccccaggggaaagccgaatccgctgcggcgagaagagcacctggaagatggaaaacctgctcattgtccgaccaggcggcaatgaccgcttcaacgtcgatcccttcatgcgctaaacgcagggggtcggatgcacctgcctcgacgagccgcaggagctcctcggtgccgagtccactgaggaactccctgccttccctcgcttcggcgactttcaagccgagcagggtgcgcagctccttgtcgaggaagttcgcctcagccgagcggatattgggcaggcccgcgaggaacaaggacgcggctgccctagtccacccagtcccctcagtgaggcgcgcgaccttcgccggatcccactggggggcgccctcgtcgaggaggacgcggaacgcctcgatgatcgttttggcttcgacaccgcagccccgggtgatgaggctgatcggagcgccgtcgacgctcttgggaacaccgcctgagggagagaagaagcgcgtcttgtcgttgctgttgtaagcccagaagggacggccggtgccgatcaggattgcagggccggagggggtggtgaggagtcgcgcgggctcggtggatgatggtccttcttcgatccccgccacctcgaaaacacagcacgagggcgagtacaggccttcatcaacgaggtccccgaatgcagcggccgcctgacccacgaactctttcgaggcgaggggacgggtgactgagaacagcagagcgatcggtcgggtggtgaggtgggtgaaagcactcccaacacccgtcaccgcaagctcggctcctccaaggcgccgggccatgttatgcaaaacgtcacgatccgtcgtcaacgaccactcagtattcgcccaaccgagcgcatcgcatgaggcttcccattcggggaagctcctcgtcggctgctcctcttgtgttgtgcgctcaagcccatcttcgacgattcgtttgacgcgggccgttgcccatacgacggagtcgacgagtgcatgacagtcggaaccgaggaaactcgcagccgctgcccgcgcctcgtcggtgaggatcctgccaggatccaccacctcagcatcctccgtactgtcggcggtcggaacgactctgagaagctcttcgagctgggagggtgtcgcgtggcgcagcttgtcacttgcggcctcgtcgcgcactcggaactgattccagccgacctgggggactttgtggagaagatgagtgccccctcgtgcgtcagccgcggcgaacatcggggcgaaatcgtcttcgcgcacgagctcctcgcccttgatcagccagtgcccgcccccggggcgtgccatgcggcctttgaagcggtcccagcgttccttcgggtgcacctgatgcccgttggcgtcaatgtagagcgacttctcgtccctgctcattcgcagccatgcgtgtcggccatgggccgtcgacacgctggagtcggccgtcgtcgggaagactgggcaccagatgatggtgtgcttttcgagttcccagccgtcgcgaaggtagggttcgatgagttcggcgagaggagcgggcagggattcgcgtcccctctgacccgtcgcggggtcgatttcccggaaggtgtcatcgagacgccagtagtgctcgccttcgcgaagaacgagggcgcggtcggcgaaggggtcgccgccgtcgcctccgtggacgaggcgctcaccgacgaggcgcccatcgttgaagggcagggtcaggggaacgtccgagccgccgtagtagcggatcggcgttgaggttcccgggtcggtcgaccaggtgaggaagtattcccagttcttccggtaggcgcaggctgtagcttcgcctgcgagcagatagtgccagtattgggctttgtctgttgcggtgggagcgaaggaggcttcggcgatcctcttgtcgccgtcgacccagatgatgtgaccatcggcggcgacgccgatcgcggggaaggcctcgtggaaggtggtgttcgtgccgagttcggcggatgcagcttccagttcaggccaggtgtactcggtgaggaaaccgtcgcggaaaacatcggcgaggatttctccggcgttgagtcgctcgacgagagcgctgatctggcgtggatacgcatcgagaccggcgggggtgaagagcgggctcaggcgtcgtatttcgctgaggacttcttgtgaggtcgggtgctcaccgagcgtggactccgcccagcgtccgagcatcgtgcgggcaccggaatgggagaggatgacgtcgagatggtctgaggccgtcctgccgattgtcccaagcaccaggtgcgcgtgctcgctttcggcgagggcatcgaggtcggggcgatctcgcgtttccgcccagtcggacaggctcaggcggttgtagtacgagtaggcgcccggaggcacatcgaattcgactttcgccccggtggacaagagcgcgtcgaggagttcgggttgcaggccgaagacgcgcttggacaaggtgatgctctgccccttgagactcttcattcttctgacgaggaggctgagcttgcgcgggtatccggcattccactggctctggagcatgcgcgtgtagcgttcgacccattcgcgggcgtcgactcgcccggcggcgaggtcttcgctcaagccgacggaggcgaggatgtcgatccactcgtcggatgggacaggacccggggtgagggcaaggagtgccttcatggtcgtgggctcttgcgcgactaaaacggggagtgctttcttgaagcccctccagaaggccgcgggcgctttggacagcgacggggaggaaaggacggcacgcaggaagcgggcgtggacttccacagggtccgcgtgggcggctttcgcgaggcgcttgaggtctgcggcgagcccgccgtagggcggcatcccgcctttgacacggtcgatgttgagggtgaggaaaatgtcgagggcgcgttcgggttcgtagcgttcgcacagggttttcgactcgttcgtcagttctttagcggtgatggccccggcgagagcgaattcgaggaaggccttggagttacggtcttcatcgaccttgaggctgtggatgcgctcggcttcgcgcgctttggagaagtactgggctgcgtagacgcggttgtcgaggcgcaagaagatgcgggcggcctcttcgaggaaggtcggaaggaaatgcggggcggagtcgccgagcattttcgccagctcgtcgaggagaagcttcgcatttccgggcttggatttggcggctttggcggcacgctgcaggtcgccgacaaggttgagggcgtggcgcgcattcttcgggtcatggatgatcggccaggcggggaagccgatggcgcgttgacgcacgcgaccgataggggtcttctgcccgggtgtgaagccgagggaagtgagggtgatgtcctcaacttcgccgagggcgtcgggggtgaggcgcacgacggtgcgcccctcaagggcggggtgggcgtaggagtgggccgaggcggggatagttccgggggcgtctgaggagatgatgccaccgagttcggcggctcgagctggggtgatcatgaggggtccttcagggcgtgtgcgcacgaggagaaacggggtgcggggttgggcgatcgtgttcggggtgcgagcctcgctcaggggcgggattcgtcgtcaatgacgcgtccggcgtagatgtgggcggccatgcgcacgccttcggagtaggcgatggggccgacctcgccgatgcgaatgacgtggtcgtcgcgcacccagtgcaggtcgccggtttccgtttcggcttcggggctgtccgcgccgatccagtagcgggctgtgacgagggcgccgtcctcgtagaccggacaggtcgagtagccaccggagactttgaagcctgcggcggtggcgcgtcctgcggcgtaacgcagttgtttgaaagagccacccgaccaggtgttgagttcgagcgcttcggccttggcggggtctgcgcggtggacatcgcggaagagctggtcgaagcgttgggaaatgccgagttctgctgcgaattctcgcagctcgtcgaggtcggcgagggcggcgggatgggggatgaggacggcttcgtcgctgatgcgtgcagactctccgtcgaggtcgacgacgccgagcgcatctaagtgtgcggcgcgcaagaatccggcgacctctccgtccggggtggagatgacgaggtcagtgagccaggatctccatgcttcatcgggccagacggcagccaggaggcttcggggaacgggaagggaacgcaagaaccagcgttcgacggcctccccgacttcgagctcgtgctggtggaggaagatcagggtcgagtcgaggtcttcccagacttgagttttcttcgcggccgcgggcacagatttgagagttttgcctttgtcgttgcgggcgacgatcttgccgtcctcgatactgagttcgtgaccggttccggtcgggatccactccatcggggtccttcctcgcggcgccgctccggcgtgcgatggatgagtcttcgcggtgcgggtcgcgcagggcgaaggggtcgtattgtgccggataggagccatgccctgcgtgaaaggggccatattatggccgagcaaagtcatgtcatgcctgttcggcggggattttcggagtatatgtagcggcgggagggcggtcaaggatcttgctttctcaaggtttcaggggtgccgcatcgccggatactccgcgtggatcttgccgttcggcgcgcctgtgcgccgagtgttccacatactctcgagtgtgtggggcggttacgactgtgcagcgggcctggggcgcgcgctgaactccaatcttctcaatgcgcccggctgaggggagagtacggctgagggcaggcggcgaggtcagctgggggcggggtggagagcgcggctgagggtgggcggagaggccgagcccgcctgtgaagagcgccgctaagatcgagggcatgacgctgcacctgcacgactcgaaaacggcccgactccagcccctcaccccggtgactcccggacacgtggggatttacttgtgcggggccaccgtgcagggctcgccccacgtcggccacctgcgggccgccgtcgccttcgactccctcgtcaggtggctgcgccgctcgggcatggaggtcacctacgtgcgcaatgtgaccgacattgacgacaagatcctcaataagtccgcgcaggcgcaggtcccctggtgggcgtgggcgtaccgctacgaacgcgaattcactcaggcctacgagaccctgggcgtactgcccccgagctatgagcctcgagccaccgggcacatccccgagcagatcgacttggtgcgccgcctcattgagcgcggccacgcctacgacgacggacgcggcaatgtctacttcgaggtgcacagccagcccgactacggttccctgacgcgccagcgcctcgccgatatgcgcaccaccgaggacgaggcccagatcgacgcggccctcgaagcgggcaaacgcgaccccagggacttcgccctgtggaagtccacgaagcccggcgaacctgaaaccgcatcctgggagtccccctggggtcagggccgacccggatggcatctcgaatgctccgccatggccaggcgctacctcggtgaggagttcgacattcacggcggcggcatcgacctgcgtttcccccaccacgagaacgagcaggctcaatcgcatggcgccgactggggttttgcccgcctgtgggttcataacgcgtgggtgacgaccaagggcgagaagatgagcaagtccctcggcaatgtcctctcgctcggcgcactcaccaaggatttccctgccgtcgcggttagatgggccctatccaccgtgcatcaccgctccgcaatcgaatggggtgaggagactcttcccgccgctgcggccgcctggtcgaaattctcaggcttcgtggagcggtccatcgaccttgccggtgaagcctgcgccgaggagatctttctgccagcctctgaacttcccgaaggcttcgtcgccgccatgaatgacgacctcaatgttgcgggggcgctcgcggtcatccatgagcacatgaaggcgggcaacacggccattgacgagggcgacaaggcgctcgtccgtcgagagcaggtgctcgtccgctccatgcttgacgtcctcggccttgatccggcttcggatcagtggcgcgggggacttggcgcgggaggggccgagggttctgctgagcatgaggccctggatgctctggttcgtgccctcattgaagagcgggctcaggcgcgcgccgacaaggactgggctcgtgcggacgctttgcgggatcgactcacccaggccgggatcgccgtcgccgacggccgcgagggcgcgagctggaggctgggctgaagcctgagacggtgttgtgaggcagctttctcgcctcacaatgacaacaactgatacgtgttcagtcttgtcgttgcaccccatatgtgggaaaatcacacacgtggcacaggtgaaggattttgctgaactcggtgcgaggatccgtttgtttcgccaaggggcgaatctcgatcaagagactcttgctcgggagtgcgcttctcgaggtcagcaccttgaccgcacggccatctctcgtattgaaacaggggacaggaaagtatctgccctcgagctttcggtcttggcggaaatagtcggtgtttccttcgttgacctcgtgtccgttccagagccgtctgtactcgccgcacgcaaaccgatcgctgaggaatcaacgagtcaagaacgcgaggagttcctcgccggtgttgagattgatcgagcgtggagagatctgtgccagttgcgcgactaccacttgatcgaagctgtggagcttccattcggcgggcacggtcttgctacttgcaaagaggcacgtgagcttgcgcagaaaacacgggactttctgaaagtcggcgacgcgcccttgggctcaatgacggatgtagcggcagagcttggcttgtggtgtcgaacgactcaagtcgcggttgatggattgtccttctcccctgaaatcggactcggtgtcgctctagtgggtcagggcctggatccaggtcggcgacgcgccaccgtggctcatgagatcggccatcacatcagcggtgacacctatgatgcgtcgagtcacttctcttcagcaaagcaagccgaggagttgatcgaggtgtttgctgccgagcttctcctcccctccagcgtcctcgaagaactcaggtgcccgacgagggatgatcttgtcaggctggctgctgaatacagggtctcgtggtccttgatcgttcaaagtggagacacggccaaggtggatctatccaaggtcgagcggaatacaacgccggttgatgaggatttctatagggctgtgggctcgaagcctgaagaggatatggtccctccgggccttgcgaagaagtgggttcaagcctgtgttcgcgcagtcgatgaggacttcatttctcgtcgacgcgctcaggagatgacgtgcggactcgtcgaggccggggatgaatgagcccatcttcgtctgggacacgaccgggttgctttatgcccaagcatgtgatcgccttgatggtttgattgacgccgctgggcgtgaacgtcggcatcttgttccgagcggtgtcataaaggagcttcaacggctcggtcacaccccatctcatgaaagtctagaaatttgcgatctggaggagattgaggagttctcggtgcttgccgggtggatggcacgtttcggctcacccgtgcttgatgggcgggacagcggagaagcgtgggctgctgccgtggctgagctccgggatgcggtggcgatcattgacgacgcgaaagcgcgtcagatcattcgcaagactgcaccactgctgaggacgcggggtgttctttgggcgatttcacgaggtgtgaaagaaggaagagctcagactccgcaggcgtacagcggtctatgtgaccagatgctgcaggcacacactcagcatgagaacctccaaccccttcgatggccatttcaagccggtggatatgcgccctggtatgagaaggaagaacaacaaggacacctcgattgagcttcagtgcgcatgttgaactccgggctgttttcttgtgaaaggtgaattcgcgtgaatcgggccgcaatggccgcttcggagtgccggatcagcgccgggccccgctaggctgattcggatcaggcgcgccgggaggcgctcgcgacgaagaaggacgaacacgatggctggaaacgacgggcgccgcggagccgtgcgcaagccaggctcgaagaagggcgcgaaagtcgggacgggcggacactcgcgccgtcgcctcgaaggaaaaggcccgacgcccaaggccgaggaccgcacctaccatccggctcataagcgcaaggttcagcgtgaggcgcgcgaagcccaagaggccgcgatcgcccgcgcgcgtgcgaagagctccatcaagatcgccccaggtcatgagcttatcgccgggcgtaatcccgtcgccgaggctgtgcgcgcctccgtcccgattgagcgcgtcttcgtcctcgacaatgtcaaggatgaccgtgttgaagaggtcatccgccaggccgcgcacctgggggccccggtgttcgaggtgacgcgccgcgatcttgatgttgcgaccgatggggctgtccatcagggtgtcgcgatcgaagtgcgaggctacgagtacacgcaggtcaatgacctggtcgtgggttctttgcagcagctgggcacgccgctgctcgtcgccctcgaccaggtgacggacccgcataacctgggggcggtcctgcgttcggcgggcgctttcggcgcggacggggtcatcatccccgagcgtcgcagcgcgggagtgaacacgacggcgtggaaggtgtcggcgggcgcggctgctcgcgtgcccgtggcgagggcgaccaaccttgtgcgagcgcttgaggactgcaagcgcgccggtttcttcgtcgtcggactcgacggtggtggtgacgctgagctgcgcgacctgtctttggccacatccccgctggtcgtcgtcacaggggccgagggcgcggggctgtcccgtttggtgcgtgaaacctgcgatcagatcgtgtcgatcccgatctcctcggcggtcgaatccttgaatgctgcagtcgccacggggatcgccctctacgaggtcgcctcgcttcgggctggggagaacgactgagtttcagagagacaaaactcttcttttggaattgtccaaggtgtatcctgggcactgactgattctcagtaagttccgactcgttagcggaactgaatgctccaccgggccgttcttcgggacggcccggttcttcattcaaatgccttcgccgggtggcatgatgtccccatggcgtttgacgaagaagtgaaatcgcaggtgtgctaccgggtcggtattgatgtgggaacccattcgacgggattctgcgcagttgaggtcgactcagggggaatgcctcttcgactcctcaactcaatggttttcatgcatgattcgggtattgatccggatggggcgaagaaggcggagacccgaaaagcgatgtctggggctgcccgcaggactcggagactttatcggacccggcgatcgaggctcgccgacttggatcggactttgacgaagctcgggtatccgattgttgatcttgaatccttggaagatcctcgtgctccctggtttattagggctcagatttctcaggagctcgttcgtgatgatgaggaacgtaggcgtgcgatttcagtggcattgcgccatattgcgcgtcaccggggatggaggaatccctactcgaaggtggactcgctacttgttcacgcgggcccgtcggagtttctcgttgctctgatcgagagagtctctaatgccctgaaccgtccgatcgctccgaactcgacaccgggtgaagtgatcgctcaatatctcacttcccacccgactgcgaagctccggggcccggagggaatcttgtcggggaaacttcaccagtcggacaatgctcaagagattcgccgtatcggtgaatgtcagggcttgggtgagaaggagattgaggctcttattcgttcggtattccaagcgaagtctcctcgcggcagcgctcaagggctacgcggcaaagacgcgctcccagggcaagaaaggctacctcgagcggaaagagctcacccggtcttccagctctttaggatcgtaggcgtcttggcgaatctgcgaatccgtgaggatggtatgacacgggctctcacgcctgatgagttgagggggctcacggacttcctgttggcggatccgaagggcgaagcgatcacctggggtgatcttgcggataatctcgggattgaacgttctcaactgagaggaacggccgcgcaggggccggatggtgctgcggctttgtcctatccaccgaaagatgtcacggatcgggagattagaacgtcgaagatcccttggcttgtgagctggtggactgaggctgatgaggattcgcgtggccggatggtggacgctctgtcgaattcgggcggctctgagatcgacttcgaagttgatgacgaagtggcggaggttcttgagcaagcatcagaggaagaccaggagaagcttgagaagctggcgcttccctcaggacgcgcggcgtactctctggattcgatgcgccgcctgacctcggtcatgcttgagcggggtgtcgatcttcatgaggcacgaaagattgttttcggtgtggatgattcttggtgcccgccggctgaaccgattggtgcgccggtggggaatccggctgtagacagggtgacgaagcaagtcgcacgctggctctacgctgcggaaaagaaatggggcgttcccgagtcaatcaatatcgagcatgttcgtgatgccttggggagtaaacacgctgctcgagagaacgaacgtcgacatcgcaggaatcagaagatgtatgaggagatgcacacgcagctgcagctttctgggcgtcctcgtcgttcagatcttatccgttatcaggctcttcaacgccagaacggacagtgtctctattgcggcgatgagatcacctttatcactgcggaaatagaccacatcgttccacgggcgggggcggcgtcaacgaatacacgaacgaatcttgctgcagtgtgtcgtgcgtgcaatcactccaaagggaagttgcctttcgcggtatgggcaaactcgaaggacgggcgtctggaggtcagcttggctgaggtgaaggagcgcgttcggatgtggaaccccgacagcggcatgtctaagtctgagcttcgtcgtttccaaaaagaggttctccgcaggctcactgtgaagaaccctgatgaggcaattgatgcacggtcaatggagtctgttgcctggatggccaacgaacttcgtcaccgtatcgaacagtatttcttgcgtggggagggcgggtccacagtttccgtgtatcggggtgctctgacagcagaggcgcgtaaggctagtggattcgagaacagggtgaatttgatcggcggtgggggcaagacccgcttcgatcgtcgtcaccacgcgatggacgcattggtcatcgcattgatgaatccctccatcgcacagaccttggcacttcgaatgaaccttcgagactcccagaggatcgccgggaaacaggagacgtggaagggttatcacggcgagcccggagctgcaacggagaaatggctgaaatgggatgaatcgatgcgcgccgcatccgagttgttcaacctggcgctcgccgcagacacgattccaatccttgagaacatccgcttgcggcagggcagtggcgcgatgcacgaggcagggatttcaaaactgaagagggctcgcctcggtgatgctctatctgcacagctcattaatagggcatcaactcctgccttgtggactgcgctgacccgttgcccggattatgacgagcaggctgggttacccgaagatgattcccgtcagatcgtagtgaatgggcggcatttcggtcctgacgacgtccttgagtttttcgatagtcctgcagcctgcgtagcggttcggggtgggtatgcacagcttggggcttcgattcatcatgcgcgcatctaccgtatcgaagggaagaagccggtttacggcatgcttcgtgtctaccaagtagatctggtcaagcatcgcaaggacgacttatttacggtatctttgcccgtttcgtcgatctcggtgcgcacagctgaggcgaaggtgagtaaggccattgccgaggggacggctacacagatcgcctggctagtagaaggcgatgagctgaagattgatgtgtctgcttttgggactggaacggtcggagagctggtggaggcatatccgatgtgtacgagttggagggtagctggcttcccggatcgagataaactcagactgcgcccatacctgctttcccgcgaaggaataccggaggagtcgtctaaaggagttcgagagatccttgaggggaaaggctggcgtccagctgtgagcaagctcttccaaatcgggagtgttcatctgatccgcaggactgttctcgggactcctcgagtttctgggagagcgcatcttccaagttcggtagaggtgatctaatcatggtcgtccgctggcgagtccttgatttttcttctttcgagggggagctgcggtcgattcgtggggggattgaagtcgtccgcaaagacgctccggatgtttcgatccctatcgctgacgttgcgcttgtactcgtcgggcagggagtacatttcggtacggccgtcttgcaccggctgtgttctgcggatgtcgccgtgttgttctgcgactggcgaggtgtcccagaagggggtgcatactcctggtcggatcacggtcgggtagcggctcgccatagggctcaggcttcactatctgaaccgaggaggaagaacgcgtggggacggattgtgcatgcgaagatcatgggacaagctgcagttttgaaagcttcaggcgttgagggaggaggtgagctcatctccttggcatccgaagtgcgttcgggtgatcctggcaatgtcgaagcacaggctgcccgacggtattggcgggcgtatctgggaagggaacaagggcgcttccctggagcgggagagctcctgggctggaacgcttgcttggactacggctattcagtgttgagaggatttgttgttcgttctctgctggctgctgggctttgtggctctttgggtgtcttccataggggacgaggcaatgtcttcgccttggcggatgatctgatcgaacctgtgaggccatgcattgacagtgcagttcgggagctgagtcgggatgcgtcgccttctgatcctgaagttaagaggctgcttgtggctgctgcgacgcggagattcactccggaggggttgactgtccaggctgttctcgatgatttcgctcagcagtttggtatgtatgtcgaaggtgatgttaggcgactgagtcctccggtttggcagggaccgcagggggattagtcgtggcggatgatccgatgtggtgccttgtgatgttcgatctgccggtagagacgaagagccagcgtcgggaggcttcccgttttcgccattctttgattgattggggattctcgagggttcagttctccgtgtatgtgaagtactggccaaccggagggcacgacaaaacgactattaatgcgattaagcgcaacctgccagccggggggcaggtgcgagtgctcgccttgacagaccgccagtggtcgacggggctccgttttgagcatgcgaaggcgaaaccaagcgatccgacgcccgaacagctcatgatcttctgatggctgaccgtcggttttcgttgcgattctgcgggaaaatcttccccctgaagtttatcagggggaagggtgactgattcccagcttgattcacaactacaacagggtgcggggaagtttatcagggggaagggtgactgattcccagctctggttgcaggggaaggcgagggaagcgaagtttatcagggggaagggtgactgattcccagcacaggaacggggtgtcatccttggagacgaagtttatcagggggaagggtgactgattcccagcatcgttagccccttcctacggcgcgctcgaagtttatcagggggaagggtgactgattcccagctctcagcgccgaggtagttgtccacggtgaagtttatcagggggaagggtgactgattcccagccgtgagcgagcttgagtctttggccgaggaagtttatcagggggaagggtgactgattcccagctacctgcatagtagcggtcgccgggtcagaagtttatcagggggaagggtgactgattcccagccgtgtccgacgccgccggaggcggcttcgaagtttatcagggggaagggtgactgattcccagccagatcgagcgcgaagctcggtggtggtgaagtttatcagggggaagggtgactgattcccagcatgatctccagttcagcaagtgggaagagaagtttatcagggggaagggtgactgattcccagcccctggac

SEQ ID NO: 4360 - DNA, 13257 bp, synthetic construct
  misc_feature 1..13257: note = Synthetic
  source 1..13257: mol_type = other DNA
gatgtccctcacgggcttgacttaaagcatgaacacggacactcaaaccacgaccccagtgatccttgcgaaagacctggtgaagacctacgggaatgtgcacgcactcaagggcatgaacctacgcgttgattccggtgaaatcgttgctttccttggccgaaatggcgctggaaaaagcacaacaattgacatcattcttggccttcaacaggcagatagcggaagcgttgaagtttttggcatgagtgccaaagaagcaatccgccgcggcctgatcggtgtcgttcttcaatcgggttcgcttcctggggactatagcgtcgcagaaatcctcaaactcttctcgcgcgtctacaagcgcaccgagtccattgacccccttgtcgaggaaacccatcttcgccaccttcttggccgcaaaatccgcaagctctccggtggtgagcagcaacgcgttcgcctagcaatggcgctaattcctgacccagaacttatcattctcgacgaaccgaccgccggaatggacgtcaccatgcgcaaggagttctgggagctcatgagcgcccaggcctcgaaaggcaagacgatcctcttcgcaacccactacctggccgaggcgcaggactacgccgagcgcaccatcatcgtcaacgccggcgagatcaccgcggacgccccgaccgaggaaatccgccgcgcccactcgacaacgcgccttgccttctctgttccccgcgcgcgcctggccgaagttcgcgcctccttggctgctcgcgccgaagaattgggaacgacgtgggagctgagcgaaattgccgaggccaagacccgcgaatccgctaccgaaagttccgcgggggagggcggcgacggtgaacagtgggtgcgcgtagagttccgcacgaccttctccgatgaggcagcgcgcttcgtcattggccttgagaatgctcgcgagttcgaggtcgtcttctccagcctcgaggacgttttctcggagctcactcagtaaggaagcgggcagtacgtcggtgcccgactagccgcggtatccgacgagcctcgcgcacatttccccacagctttttacgtatataaggattcaaaatgacaacgcacactcacgcagaaaccaacccctggagcaaacgcaccgcagttagctcatgggaaggaatcgggatgctcacatggaaggccttcctcaaactggtggcaaacccggccatgttcggtttcgcactgattctgccgattttcctctacatgatgttcggcgccggacaggaatactcgaaagagtgggcggtcaacgccaatgtcggcgcaactgtcctggtctccatgaccctctacggcgtaatgatcgccggggcatcagctgcaacggccgtcgccttggagcgcacgtccggaacatctcgcctctttgcgcttactcccgtgagctccggagccttcatcttctcccgtctggtcgcagcaatctccatgagcgccgtcgtcattgctatcacctacggcgtggggtatgcgactggagcgcgcatgactcccgcagcctggatccaaagcgccctgattgtcctggctgcggccatgatgtcggcaacgctgggtctggcactgggattcctcctgcgttcagatacctccttcgcagtgatcaacggcgttgtcgtcttgggcgcattccttgcgggaatgttcatcccgattgactccatggggactttcttcaagaccatcgccccgggaagccccttctacgggatcttctacctctcgcaactgcccctgtacggcttcgattccttcaagtggacctgggtaatttctgcagcggcctggttcattccctttgtcgtgcttgcagtttgggcgcagcacagggacactgatcgctgacagacttcacgtgccacacgaagaattccaggaaaagcgggagagggaagagcatggacaccaccacagccaaagcatcgtggacgcagcgccacccgcgcttatccgcagtgttgtgggcacttccctacctggctttcctggcattctccctggtcatggtcccgagtgtcgaatctttcggcatgacggtcctgatcctggccctcactcttgcagtcgcagtcgccgatatcgcgatctacgtcgtgaacccaacccccgaatggggagcacacatcaagaagaagatgtggatctcgcacgggatcttgctggctttggtggttgcgctggggctagttctggtcgcagccggcgcatcgcgagtgacctcggcacttttcatcacctactcgattgcgggctggaaccttcaagcacctcggaattacgtggtccccggcctggtggcgctcgtcggctgggaagtgattgctatcttgctgcccattggcagcattgacgcacgggccttgagctacgcgatcatcgccctgctcatggttttgggcttaaccctggccgtgcgtcgcagtttcgacaaccgccactcagaggaacaacgccaacgccaagcaatcagtctggtccgcgaacgcgaacgcctgcgtttcgccggagatctacacgatatcctcgggcactcgctgaccgtcatcactatgaagaacgaacttgcccagcgcctgctttccgttggaaagattgacgaggccggtgaacagattgcgcagaccctggagttgtcccgccaggcgaaagaggacctgcgggggattattgcggcctcgcgcagtttgtccccggaagaagaagtgaattcggcgcgcgaactctgcgagcaagcggggattgaattcaccgccgatatccgaggcgacattccacccggccctcgcgcctcccttgctgctcacatcatccgtgagggaactgccaacgccattactcacgcccaccccaagaacatccacgtgcgcctgactcccgctgaggtcctcgtacgaaacgacggatactcgcagaagtactctgtggcctcgcgaggcgggggaacgggacttgaaggactacgcgagcgcgcggcctcggaaggggatgtgacctgggggagtgaaggcagcgtctgggagctgcgactggcgttcaagggcgaggcgctctgagctgcgtgtacgattgacgggtcaagtactcgcgctttgaaggacaccgcatgattcacgtgattgtggtcgacgaccaggccctgatccgtggtgccttgagtgcgctcattgacctcgaggacgacatggaagttgtcgctcaggcgggtaatgggcacgaggccttggctgcagtcgaagcccacacgagtgcgcatccaggtagcgaggtcccgctggtcgtcatcatggatgtggaaatgcccgtcatggatggaatcagtaccgccactgcattgaaagaacgaggatcggccgcgcgcgtactcatggtgacaacctttgggcgtcccggctacgtccagcgcgcactcgatgcaggcgcgttggggtttgtcgtcaaggacgctcctgccgctcaattgcttgacgccattcgtcgaacctcacagggacttcgcgtcgttgaccccgcgctcgcggtcgacgcgctcacgaaaggacaaagcccgctcagtgcccgcgaagttgaggtcctgcgcgctttcgaaaacggcgggaccgtggaggacgtggcctcggaactcatgctgtcggcggggacggtgcgcaactacgtgagctcggcgatggataagacccacgcgcacacgcgcgccgaagcgctcaaggtcgcgaccgagaatgggtggttgtaaactgagattccatggtaaacagctatggacgtcgacaagacgcacaggaaaacatcactcgccacatcttcgtcaccggaggtgtggtttcttcattaggtaagggattgacggcctcgtcgctggggcgcctgctgcgttcgcgcggcctgagcgttgccatgcaaaagctcgatccctacatcaacgtcgatccggggaccatgaatcccttccaacacggtgaggttttcgtcacggaagacggtgcggaaaccgacctggatatcggccactacgagcgcttcttggacgtgaacctctccggcgcggcgaacgcgacgactggccaggtgtactccaccgttatcgcgaaggaacgccgcggcgagtacctgggtgataccgtccaggtcattccccacatcacggatgagatcaagcgcgtcatgcgcgcgcaggccatccccgacgccgagggtaacgctcccgatgtcatcatcacggaaattggcggaaccgtgggcgatatcgagtcccagcccttcttggaggccgcgcgtcaggtgcgcgctgacctgggtcgcgacaatgtcgccttcgttcacgtcgcgctgattcccttcctgcctgcggctggtgaactcaagaccaagccgacccagcactcggttgcgacgctgcgttcgatcggcatccagcccgatgccctagtgctgcgtaccgaccgcccgctgcccgagggaatcaaaggcaaggttgcactcatgtgcgatgttgatcgcgatgctgtcatcgaatgcaaggatgcggcctctatttatgaggttcctccgacgctgcaccgcgagggcttggacgcattcctggtccagcgactgggcttggctttccgcgatgtggactggagcgagtggaacgagctccttgagcgcgtcgagtccccgaagtaccgcgttgaggttgccttggttggaaagtacatcaatctgcacgacgcttacctttcggtttctgaggccgtcaagcacggtggatttgcgaataatgcgcgcgtggacctgcgttgggttgcctctgacacctgcgagactcccgagggtgcgcagaaggcactggaaggtgtggatgcgatcatcgtccccggcggttttgggatccgaggcattgaaggcaagttgggtgccctacggtgggcgcgcgagcataagatcccgacccttggcctgtgcttgggcttgcaatgcatggtcatcgaggccgcgcgcgacctcttggggttgacgggggcctcgtcgaccgagatggatcccgagactcccgatccggtggttcacacgatggactcccaggtcgacattgttgagggcgatggcgatctgggtgggaccatgcgacttggcgcataccccgcggtccttcaggagggctctgttgttgccgaggcctatgggaagacccaggtttcggagcgccaccgtcaccgtttcgaggtcaacaatgactaccgcgatcagctggaatcggttggcctgcacatctcggggacctcccccgatgggaacctggtcgaatttgtcgagttggatcgctccatgcacccctactatgtggcaactcaggcacaccccgagttcaagtcgcgtccgacgaaggctcacccgctattcgcgggcctcgttcgcgctgcacttgagcgtcacgttgagaagtacgctgcgcgaggcgggcgcaagtaaggggtgtagctccctcattcctggtttagctcacagattcctggcctatgaacgctcatacgtcaggagtcgacgagctaaaccaggagatggggcaggggcagagtggggaattgatgtcgtttgaataggtgcttgcgtgaagtgatgaccagggcttatagttgtgccaactgattctcaataaggtaccgacaggttagcggtactgattgctccaccggccttcgggccggtatttttttgcctcgatgcgcatggttgacacggttcacacagctttaaaatcgctgaaaaatagctgcggaaactgtacaaaaatgcttgttgtctgtggcatgatttccccatgacaaagattaatgatgatcttcgctaccgtgtcggcattgacgtcggcttgaaatcaattggtttttgcgcggttgaggttgatgacaaggatcagccactgcgcctgctgaactccatggtgttcattcacgacgccggtgttgacccgaatgagaataaggccgcgaagagccgtaagcttactgcgggcgtcgcgcggcgaactcagcgcggaaccgctcagaataggcgccgtcttgtggaactcgaccgtgtgctgtctgaagtactgcattggcccctgccaaatcttgaggattttgaggatccctgcgagccgtggcatacccgcgcagagcttgtcgatcactacattgaggacgaatccgagcgcttggaagcactgtcgattgcggtcaggcacatggctcgacatcgtgggtggaggaatccatatataaaggttgattcgctcctgactccggtggagcccagcgaattccttcgcggtctgaatgaacgtgtcggtgaggcgctggggcgcgagtttcctgaggaaacaacgccgggccaattgatcagcgaatatatgagcgatccgaagtacagggaaagtaatggtatccgtggagacgatggtattctccagggcaagcttcaccaatgcgacaataccgctgaaattcgaaagatctgcgaaatccagagattggaccatgatgtgtttaagctcttggtccgcaaagttttcttcgcaaagtcacctagggggagcgccgcgggacttgtcggtcatgatcaactcccgggtcagggcaaattcatccgtgcagagaaagcgcatcctgatttccagctctttcggattgtttcagtactgacgaatctgcgtgttcgtgagggaagagctgagcgttgtttgactcctcaagaactgcaagggctgacagagttcattatcagagtgcaattgaagcaacaggtaacctgggcggaccttgcggacaacttgggaattgagcgcgctgacctacgtggaacagcgcgggcatctttcgatggttcacccgccctgcgtttcccaccaacagatgtcaccaccgaaaagatcatggcttcaaaggtaaagtggctcaaagactggtggaagtctgcggatagtgagcgacgcggattcatggtcgatgcactgtcgaattcgggaggttcgacgggtgataacgatatcgatgatgaagttgcagagctccttgaacacgcgaccgaagacgaacaggtagaactcgagaaaatccagcttcctcaaggacgagcggcctattccttggatagcttacgcaagctcacggagcggatgctggctgagggcgtggacctacacactgcacgaaagcagctttttaatgtcgatgacgattggcgaccagaacccgagccgattgaggctccggttggaaaccccgcagttgaccgtgttctcaagcaggttgcacgttggctcaatatggctacggatcgctggggtgaaccggtcgttatcaacattgagcacacgcgtgatggtttgggttcggaaaaggtcgcacgtgaactgctgcttgaggggaagaggcgccaggagctcaatcagaagaaccttgttgagatcgctcagcagcttggaattccggtaaaagataagcgctctgctctgattaagtacgcggctatccagcgacagaactcaatgtgtttgtattgcggagcagagattggattaaccacggtagagatggaccatattgttcctcgggcactctctggatcgaccaatgatcgatcgaatctggcagctgtctgccgtgcctgtaaccaccaaaagggcgcggtgccctttgctgtatgggcgacgtccggggaggcacatgcgggtgtatcgctagaagatgcaatcaaacgtgtcggcatgtggcaaaggggacccggaatgagtcctaagcagcacaaagccttccagcgtgaggtgattgcacgactcaaatcacgcacaccagatgaagaatttgatggtcgttcgatggagtccgttgcatggatggcgattgagctccgtacgcgtattgatggcttctaccggaagctcaaagcagagtcgatcccaagcattggtatttatcgcggtcagttgactgcggaagcgcgcaaggcctcgggatttgaaaatcgcgtcaacctgattggtggaaagggaaagacgcgtttcgatcgcaggcaccatgcgatggatgccttggtcattgcgatgatgaaccagtctgtttcgcagaccttggctttgcgtgtcaacatgcgggaatcgcaacgcatcaccggtcaggaagaaacttggaagaacttctatggaaagccaggtcaagccagcgaacgttttgagcaatggcgtgaaggaatgctccgtgctgttgagctcttcaacgttgcgcttgtggaaaacaagatcccgttccacgaaaacgtacgcctgcgtgtgggatccagcaaggcgcacggcgatagaatccgaaagtttattcacgcgaagcttggcgaagctctgtctgtcgcaatgattgatcgtgcggaaacacctgcgctgtggactgctttgaccaggcttcccgactttgatttcaaggaagggcttcctgaagatgactcgcgagtgatttatcttcatggtcgaaagatcactgctaatgagcgtctgaacttctttggaacatctgctgcttgcattaaagttcggagcggatatgcaaagctcgaaacttcgcttcaccatgcccgaatctataggatcactggccaaaagacgagatatgcgatggtgagagtatttgaggcggatcttctgcggatgacgcatgaagatgtatttaccgctcctctcaaggaatccgcaatttccgtgagaacagctggttcaacgattcggaaggctttgcgcgaggggactgctactcagattgggtggcttgtccgaggagatgaactgctgattgaaaacttgcgcctagaagaaggggaagcggctgtgttgtgtgcaaagtaccctcaggccacctcttggagtgtagatgggtttgaagacaataggcgtttgaaacttaggccgttgttgctttcaactgagggtattcctgttgatgaggatcccgtgattgtcggcacaattaaagactcatggcgtgcgtcattagaccagcttctttcccacgcgaatgtcaccatagtacgtcggaatgcattgggcgagattcgtacaagaggatcctcgcttcccactacaaccagattgagctgacatggcagaacagtggcgtgtgatcgatctctgtgagtttgaggggacgcttcattccacacgaggtgggatagaggtgtgtcctgagggaaagaagccagttactcttcccgttgcagagcttgcggtagtccttattgggatgaaggtcgatctcagcgccgctgttctgcaccggcttgcggatgcagatgttgcggttctcttctgtgattggagggggattcctgaaggtggttgttattcctggtcggatcatgggcgggtagcggctcgtcatcgggctcaggctgacatgactcttcctcgaaagaaaaatgcgtgggcacgcatcattagagcaaagattgagggacaggcaaatgttcttcagaatcttggtcgttcagggagtagcgagctttttgcactcgcggaccaggttcgctcaggtgaccccgacaatattgaggcccgtgcagcacgtttttactggtcgcgtgttctaggtgaggggcgacagcccggtgctggtcagctcattggttcgaatgcgtgtcttgattatggatatgccgtgttgcgtggtcacgtgattcgggcggtactgtccgctggattagctccggcgttaggtatctttcatcgtggaaggggcaacgctttcgcgcttgcagatgacctcatcgaacctttccgcccggcgattgatgaagttgctctgcaattgtctccaactgcatctccttcagatagtgatgtgaagcgggtattggttgccgcggcttcacagaagttcgatgcggatggttatggcatttcggcagttgctcaagatcttgcgcagcaatacgggcgttatgttgaaggagaagaagaacgtctaaaagttccctcatggcagggacctgcatccactgatctgagtggttgagatggttgatggtcctatgtggtgtctggtgatgtttgatttaccggttgaaacaaaagatcaacggcgagaggcaactcgtttcaggcaaaatttgctcgactggggttttagcatggttcagttttctgtctacgtgaagtattggccgaccggaggccagaatcatgcgactcttcggcagattcagtctcatcttcccgaaggcgggcaagtacgagtgatcggaattacggatcgtcagtgggcgactggacttcattttgagcaagcgaagaaaaagaaaactgagggggctcccgagcagctcactatcttttaattcgccagccgattccattaatagggttcagaggtgcagagcatagcgagaagctgcccgttccaatgagggtgcttcatgagcgcgcatcctcttcctcaacacgctgaatagcttcaaaaaccttgccgtacacgccttcagggaaatcaatcaaatagaagtcatagaagggattcccttcttcgggcggaacaatcggatcaatgtccgtgacttgttcaggaatcgtataaatccccatgtcgtaatgaacgtacaagcgggcgaactcttctaaggtgatattcccttctaagaactcatcccccatacgtttaaccgtgcacacgcgctctaggtcgagtctttcaagaacgcgcggtgcttgctcgcgaatcatgtcagcaaccgcgtgaaagtcgatcagttccatccactcaaaaccataggtatcgatcttttgacgcgtacccgtatagaagtaatcgaagtgggagaggagagcgtaaagctcttgctcatccaggttacgctgcctgtattcctcaaccatttgggcggttgttagcaggcgatctaagccaagctctgcataccccctgggcgcagcttctcgcacgatcttctcaatctcatcacgagacatcgacagatcaggggtcatatatttcttcgtcacgataagccaccttgccttcatcgccaacggtctagaactgtcgtagcgtaactttatttcgtaagtacttataactttaagcgaactacctcaacttatagcaagtattttctgtgttgggaatcagttaccaatcctcttgatagacttcgacgccctggtcgccgccaggcccctacgttgggaatcagttaccaatcctcttgatagacttcatggcatccatccaggacggcgcctggcgttgggaatcagttaccaatcctcttgatagacttccaaaccccggccggcctcgcatggaatcgttgggaatcagttaccaatcctcttgatagacttctggccgcttatcagactgtcccggcgaagttgggaatcagttaccaatcctcttgatagacttcgtcgaaggcgtccacacgacgcgctcccgttgggaatcagttaccaatcctcttgatagacttccactgaggaattcaacgcatcttcaggggttgggaatcagttaccaatcctcttgatagacttcattcccgcgaaatcgtgggggaacccacgttgggaatcagttaccaatcctcttgatagacttcctacctgtgcgccggtctctactttggagttgggaatcagttaccaatcctcttgatagacttccccgcccccacacccatggaacaattttgttgggaatcagttaccaatcctcttgatagacttcgagcttcgcgccgtttgcgatcagttctgttgggaatcagttaccaatcctcttgatagacttcagagccagcgggggccgctgtggccatcgttgggaatcagttaccaatcctcttgatagacttctgctttggaagtgaaacgatcttcctcagttgggaatcagttaccaatcctcttgatagacttcgattcttgttgactactcacccagcgacgttgggaatcagttaccaatcctcttgatagacttcgcatccagggccgcgtcaacgtcgaaacgttgggaatcagttaccaatcctcttgatagacttcggctcgggagtctcaccgcccatggggtgttgggaatcagttaccaatcctcttgatagacttccttcgttcagcctatacttatgcagttcgttgggaatcagttaccaatcctcttgatagacttcaagcccagatccgcgaactgctggccgagttgggaatcagttaccaatcctcttgatagacttcggttcactctgacattgaaggccctatggttgggaatcagttaccaatcctcttgatagacttcaacgctggcaacggcgttttcaagctctgttgggaatcagttaccaatcctcttgatagacttcttcagcgattgatgggcacttctcctaggttgggaatcagttaccaatcctcttgatagacttcactagaacaccccacctacttgaaggaggttgggaatcagttaccaatcctcttgatagacttcggcgcaccgtagggctgccgatggtgtagttgggaatcagttaccaatcctcttgatagacttctgactttattgaagtattgagcgtactagttgggaatcagttaccaatcctcttgatagacttccaaagtgtgaagggcaaagaacctttctgttgggaatcagttaccaatcctcttgatagacttccccgtcgatgatcgactgaaggagctgcggttgggaatcagttaccaatcctcttgatagacttcggccgtactcgcagtcttacacgctgtcgttgggaatcagttaccaatcctcttgatagacttccgaggagccaacggattcaccgccggtcgttgggaatcagttaccaatcctcttgatagacttcgaccaggcgggcaccggcaggcaggctcgttgggaatcagttaccaatcctcttgatagacttccttcttcccacctagtgctgttaccagtgttgggaatcagttaccaatcctcttgatagacttcacatttcgtcatgtactcggtaaccggcgttgggaatcagttaccaatcctcttgatagacttcaagcgcgcaccgaggacatggacgaggagttgggaatcagttaccaatcctcttgatagacttcgaaaccgattccaaaaacgagggcggttgttgggaatcagttaccaatcctct

SEQ ID NO: 4361 - DNA, 13251 bp, synthetic construct
  source 1..13251: mol_type = other DNA
  misc_feature 1..13251: note = Synthetic
ccttttgacggccgcgccccatggcgtcgaccccctccgcgtcgttcgggtccgcgtgaagcggttccctgggtgttcaaaatgtttcgtgggaccatcatagctaatgacaggccttgacctcaccttggattgggttttgcgcgctcagcggagcgttgcgatgggcgcgtatgcccacgaaaccggggaaagagaaccggcgcaacccgcggccagtgtggctggagttacgccggttcgcgtcagttgatgcttacagggcctcggtgacgttggacttgagggcctcgagcgtgcgcgccgcagcctcgtgggcggcgcggcgggcctcgcgacgggaacgacgcgacgagcgggtcgccagcaggacgatcacgccgatggcgccgaccgtggacagggcgacgacgccgatcttcttgagggcctcagcgttaccgccggcggcgtcctgcagggtcagcgacgcggactccttgaaggaggcgaagcgggcgctggcctcatccttcgcctcctgggcgagggccgccggctgcacgcgcgcgtacagctggtcgatcgtggcggccagctcggcgcgctgacgctcgaggtcggcggtgatctgggcttccgtgcgcggctcggcgggggcggcctcgccgacggtcacgttgcgcgggtcgaggttggtgctcacttgcccagtcccttctcgatggcttccttggtggcggcgaccgacgcggccgggtcggggcggtgggcctgcgcgctcttgagagagctgacgcccacgagcgccagaatcagcacgatcaggaggaggatgccgacgacgatcagcgacgccgcccacgcggggacgacgagtgcgagcgcgacctcgatcgtgtggaagacccaccccaggaggtagagggcgaagaccgcggcggccacgaggaggccgatgcccttgccgctcttggacgcgaaggcacgcagcttcgccttgttgagctcgatctcgccgcggatgatcgcggagagctgccccgtcacggacgcgaagagggcgccgatgctgggacgcgcctcgccggcggcgggtgcgggggcagcgggcgggtactgcccgggctggggattgggctgagtcatggatgctcctgcgcgtacgggtgaacgaggcgatgcctcgcctgatacgcctagtgtctcacgaagaatggcggctcgcagtgaccgttgcgttactcctgcggggcgatcgagccgggcaggtcggagaggatcttgcgggcgcgcacgaccaggtcggagacctcgggctcggccagggccgggtcctcggcttcgacgacggggatgccgcgcatcgcggtctcggtgcggggctcgggcgaggcctgcggaacctcggtgggggacacctccacgcgggtggtcgccgcgtcgagggcggcctcggcggggtcggtgtcctcgggttcggaggcctgctgcgcgttcgcggtctgcgtcccggcctcgtcggcggtgccgagcgggtgccacgcgggggctgaggtggcctcggtgggggagatgacctcgtcgaaggaggcgggcagcgccgaggggatcgggccgaggagggccttggggtcctcggggttggcctccagggaggcggcgatgatcgcggcggacgggctcggggcgtcgagcgtgacccggccgttcgtcaggaggatcgcgcggtcggaggcggccgcgacctcggcgttcggggtcgcgatgacgaccgcgcagcccgcgtccgcgagggagcgcaggagggggccgagctcgtcgcgcgcggcggcgggcagggtgaccgggtcttcgacgaggaagacctcggcgccggacacgatcgcgcgggcgatgagggccttgaagcgctcccattcggagagatcggaggggtacacgtcgacgcgctgggcgaggcccgtgatctgcagggcgcccacgaggttgtcccagtcggcgacggagcccgtggccgagaggggggcgaggatgttctggcggatcgtcagggactcgtcgagcggggagtctgcgcggatcagcgcgaccgagccgatgcggcccgcgaggcgcgcggacagcgagcgcgagggcgcggccacgatgcggccggcctgcggctcctcgaggcccgcgaggatcaggaagagggcgcgggcgcggcggcccgtcgggtccaggatcgcgctcagcgagcgggcgcggaagcccaggtcgatgtccgcgaggaggaccgcgccggtcacgtggtccgtgtaggtgatgcccaggccggcgacctggacgcggccgccgcggcccttcgcggagaaggaacggcgcgagcggtaccaggggcgcggctcggcgggcggcaggtggaccggggcggcgagggcgacctcgtttcggggcgtcgctgaggccggggcgggatccgcgtccgtgtcctgggcgggctgctcggcctgctgggcgggttcggtttcgggtgcgatgtcgctggcggtctctggcgtggtctctgttgctgctgcggcagcgtcggttgcgagcgcggtgggggaggcctcggccgcgtcggtggcgaccaggggagcgtcggacacgagggtctcctgcaggtcctgcgcgccgtcgtcggcggcgggggtgtcggcctcgtgggtggcgccgctgaggatctcctcgaacgacgagagggcgctgcgctgggtgggcgactcgtcggaggtgagggcgggggtcgaggcggctcgctcggcgccggtgcgcgcggcgtcggccgtcacgtcggccagctcctggctgtccgagccatgcaggttttcacgcgggtcattcgacatgcccccattgtttcaggatcgcgcccctcgtgtcgcagtggcgcgcggaagtgggtggggtgggctcgccgaataatccttgcggatgtggcttgcatctctggaaatggagaggtatgctgtaagcgattgattctcagtaagagccgactcgttagcggctccgaatgctccaccgggtccttctccgcgaagggcccggtaattttttaaagcgtacgcaaatgtgtgtgcggtgtgacactatgtgtctatggttacttcctcagaaaacattccgggtatccgctatcgcgtcggcatcgatgtcggcctgaaatctattggcttctgcgcggtcgaggtcgaccgcaacgatcacccagtcaagctgctcaactccatggttttcattcacgacgctggtgtcgacccgaatgagaataaggccgcgaagagccgcaagctgacggcgggtgttgctcggcggacgcgccgcctctaccgcacgcgccaccagcgcctggtgaatttagatcgtgttctctccaaagagttcggatggccgttgcctgacctgacggctttcaaggatcctcgtgagccctggcatgtgcgtgcgcggctactcgagggttatattgcggacgatgataagagaaaggcagcgctgtcgatcgcgctgcgtcacatggcccggcaccgcggctggcgcaacccctacgccaaggtagagacgttgctacagcccgccgagccgagcgatttcctcaacgggctgaacgagcgcatcagtacatcccttggtaggagcttcccggctgacgcgacccccggtcagctcgtggatgcgtacctcgcacatcccgactatgtgaagaaggctggcactcccaagcttcgaggccctgagggtatcctcgcgggcaaactccatcagagtgacaatgccgaggaaatccgccggatctgcgaggtgcagcagattgatcctgcggaccgtgatcggctgatccgagccgtcttccaggcgaagtcgcctaagggcagtgccaaggaacgagggctcgtgggccatgacgagctgccgggtcagggcaagcatgtgcgcgcggagaaggcgcatcccgtcttccagaagttccgcatcgtcagtgtattggcgaacctgcgtattcgtgaggggcgcgcggagcggccgctgactccggaggagctgcaaggtttgactgacttcctgctgatcgctggtctcaagcaggaggtcacctggcaggatctggcggataacctgggtatcgagcgttcggatctgcggggtacagcaaaggcctcgttcgacgggtctccggttctacgcaaccctccgaccgacgtcaccaccgagaagatcctggcctgcaaggtcaagtggctcaaggagtggtggaaggacgccgacgatgagcagcgcggctactttgtcgacgcattctcgaactccggtggttccgaagataccagcgacgtgaacgatgaggtcgcggagctgcttgagcaggcaacagaggacgaccagctggagtttgagaagatctcacttccccagggacgggcggcatactcgctcgatagccttcgtcgcctgacagacaggatgcttcgtgatggcgttgatctgcacactgcgcgtcgcctggaattcaatgtcggagacgactggaagccggcagtggagccgatcggtgctccgacgggtaacccggccgtcgatcgcgtgctcaagcaggtgagccgatggctgcatgcggcgaccgagcgctggggagagccgacggtcatcaacatcgagcatgcgcgcgacggcctggggtcggagcgcgtggcgcgcgaacttatgcgcgaaaacgataggaggcgcagtgcaaatgctgcggccgttgccgagatggcggcacagctgaagctgtccggtcgggtgcgtcgttccgaccagatccgctatttcgcgctgcagaggcaaaacaatgagtgtctgtactgtggcactgaaatcacgtttacgacggcggaaatggaccatattgttccgcgtgcggatgggtcctcgacgaacgatcgctccaacctggctgcggtgtgccgtacgtgtaaccacaagaagggggccattccctttgcggcgtgggcgtcatccgatcaggcgaataagggcgtctccctgaagggtgctcttgatcgtgtgaagttctgggtgcgcgataacggcatgtcgcccaagcagttcaagcagctgcagcgcgaggtgtctgcccgtctcaagtctcgtaagccggatgaagagttcgatggtcgctccatggagtccgttgcatggatggctgttgaactgaggactcgtatcgagggcttctaccgcacgcgcgacgaagaatcggtgccctccgtgtgcgtttaccgtggtcagctgacggcggaggcccgaaaggcctcgggcttcgagagccgagtcaacttgattggcggccgaggtaagactcgtttcgacaggcgtcaccatgcaatggacgcgctcgtcatcgcgctgatgaatccgtcggtgtcccgcacgcttgccctgcgcgtcaacatgcgcgatgcgcagcgtatcgcaggcctcgaggagacatggaagaacttctatgggaagcctggcgaggcttcgaaccgcttcgagtcgtggcgtgagtcgatgctgcgcggggtcgagttcttcaatattgcgttgagtgataacgcgattccctttgtcgagaatattcgtctgcgcgttggatcgagtgtcattcacgatgcgacggtgcactcattctgccccccgaagacgccggatggcgagcagatcatcacgaagggctacggcgagcaacacaggcttggggacgctctccccgttgaactgatcgaccgtgctgagacgcccgcgctatggacagcgctcacgcgttgcccggacttcgatccgaagaaggggcttcctgaaaacccgaatcggacgatctccgtgaacggtacgcgcgtcggtccgatggagttgttgaacttcttcgagtattcgaaggaaggaattaaggcatgtttgaaggtacggggcgggtacgttgagctcggcagctcgattcaccatgccaggatctaccgcattgatgggaagaagacggcgtacgcgatggtccgagtcttccaggtcgacctgatgcgtatgaaagacagggatgtattcaccatgcccttgaagtcatcaacgatctccatgcggactgcagagccgaagattcggcaagccctagccaatggcactgccgcccagattggatggcttgtccgtggagatgagcttctcgttgatactcttgcctaccccgatggcaaaatcggtcgcgtaatgacgaaatatcccgaagcgatccactggaaagtagcaggatttcctgagccaaagaagattaagatgcgtccttatttgctgtccaaggaaggtcttagtgaagatatggaggagtcgattcggacggtggttgatacaaaaggctggattactacgattcagaagttactcgaggctggtgaagtacaggttatccgtcgaaactgcctgggtgaggagcgctggtgctcatcggtgtcattgcctgtatcgatgatactggagtgatttctgatggcagagcagtggcgtgtgattgacctgtgtggttttgagggtgagcttcgatcgacgcgtggtggggtcgaggtgtgctctgaggagggaacgccaacgactattcccgtcgctgaggttgctgttttccttgtgggcatgaaggtcaacttgagcgccgctgttctacatcgtttagcggaggctgatgtcgccgtcctcttctgtgactggaggggtattccggagggtggctgctactcgtggtcagatcatggccgagtagcagcccgccaccgagcgcaggcggaggtctccctcccgcgtaagaagaacgcatgggcgcgtctgatccgggcaaagatcgagggacaagccgcggttctggagaaccttaagattcggggcagtggcgaactactcgcgcttgcggatcaggttcggtcgggtgatccaggaaacgttgaggcccaggccgctcgtctgtactggtcgcgtgccctcggaaagggcgtagggcgtcagcctgcggcgggacagctcatcggtgcgaatgcctgtctggattacgggtactcggtgctgcgtgggcacctgatgcgcgctgttctggcggcggggctggcgccagcactcggagtattccatcgaggccgaggcaacgccttcgcccttgccgacgatttgatcgaaccatttagaccggcgatcgatgaggtcgccctgcagctcccgcccacggcgtctccttctgatcgcccggtgaagcagcttcttgtggctgccgcgtcgcagcgctttgatggaggagggcatggaatcccggctgttgccgaggcactggcccagtcattcggtcgctacgtggagggcgacatcgatcgcctcaacgtgttgtcgtggcaggggccgtcgtccgtgggtgcgggggattgaaatggcggatgacgcgatgtggtgcctggtgatgttcgatctccccgtggagacgaagaagcagcgtcgcgaggcaacgcgttttcgcaatgacctgctggactggggcttctgcatggtccagttcagcgtgtatgtaaagtactggccgaccggtggtcaggatcatgcgacgctgcgggcgattaaggctgatctgccggagggtgggcaggtgcgggtgctggcgctgacggataggcagtgggcgacggggctccgttttgagaacgcaaagccgcggaaggagcgtggctcgccggagcagctcatgattttctaacgaagatcccctggttttccgctgcatttcagggaaaactaggggatctaagtatatcaaaggggattggtgattgattcccagctctacatcggcaatggtctgctcgctcaaagtatatcaaaggggattggtgattgattcccagcaccgctacagtgaggatccggagtttctaagtatatcaaaggggattggtgattgattcccagctctgggaggggcgcgtgtatctggtggaaagtatatcaaaggggattggtgattgattcccagcacccccacacgctgaaggccctcgtccgaagtatatcaaaggggattggtgattgattcccagctcgatgttgatcacgtcgacgtcggtcgaagtatatcaaaggggattggtgattgattcccagcggcggggggagcgcaggccggtcgcggcaagtatatcaaaggggattggtgattgattcccagcaggccgaaatcatcgacgagcaggccccaagtatatcaaaggggattggtgattgattcccagctcctgggcagcatcgaggaggtggcggtaagtatatcaaaggggattggtgattgattcccagcttatgcgaggcgagttaggcgggtagtgaagtatatcaaaggggattggtgattgattcccagctttcacctctgagggcaccagcaagcacaagtatatcaaaggggattggtgattgattcccagccgctcaaccacataattgtcgatgggataagtatatcaaaggggattggtgattgattcccagcgtgtatcactcgaaggacctcgcgggcgaagtatatcaaaggggattggtgattgattcccagcgtagtaattgcgcagctcgtgtcagtgtaagtatatcaaaggggattggtgattgattcccagccccagcttcacgaacgccgtgttgagcgaagtatatcaaaggggattggtgattgattcccagcataatctgccagtccatcctagcaagaaaagtatatcaaaggggattggtgattgattcccagccagcctcgcggggcccttcttttcttgtaagtatatcaaaggggattggtgattgattcccagcacggcttcgctttcgacacgggcttcgaaagtatatcaaaggggattggtgattgattcccagctagccgtcgattgcggccttgatggcgtaagtatatcaaaggggattggtgattgattcccagcgcacctggccgtgcgcgtccaacgtcgaaagtatatcaaaggggattggtgattgattcccagcgtgcaggacatcgcctgcccgtcgtgcaaagtatatcaaaggggattggtgattgattcccagcgtcaaacgctagccggttgcgcgccagtaagtatatcaaaggggattggtgattgattcccagcacaccggcggcgaatcccgcgtcatcggaagtatatcaaaggggattggtgattgattcccagcgtgaccgcgctaggcaaagcgcagcgccaagtatatcaaaggggattggtgattgattcccagcgcggaggcctgacgcagcagcaaagtgaaagtatatcaaaggggattggtgattgattctcagcggagcggatgacgagtccgcggcgttctaagtatatcaaaggggattggtgattgattcccagcgaagaaccagcgcggccagtgggaactcaagtatatcaaaggggattggtgattgattcccagcggaccacgcaggaagtcgatcgcgcagcaagtatatcaaaggggattggtgattgattcccagccgcgccgccgaagccctcatgactgaccaagtatatcaaaggggattggtgattgattcccagctgacctgctattcatgggcactagcgagaagtatatcaaaggggattggtgattgattcccagctggacaccatcgccgtcgcactcatcaaaagtatatcaaaggggattggtgattgattcccagcttttctggtgagggcatcgcgggcgtttaagtatatcaaaggggattggtgattgattcccagcgaggccgtgagggcgtccaggtgcttggaagtatatcaaaggggattggtgattgattcccagcgcgacattctcgtagtcgccctcagccaaagtatatcaaaggggattggtgattgattcccagcgactcctctcgaaagcccgcgagtctttaagtatatcaaaggggattggtgattgattcccagcggatgcggcggcgcgttgtgcggacgtgaagtatatcaaaggggattggtgattgattcccagcattcgggcatctacgcgcgcgtctccataagtatgtcaaaggggattggtgattgattcccagcgccggcgaacctgaccgtcccgcagggcaagtatatcaaaggggattggtgattgattcccagcgccccagtcgagggtctcgtggtcgcagaagtatatcaaaggggattggtgattgattcccagctagcgcgtctgcgggctggaatcggtcgaagtatatcaaaggggattggtgattgattcccagccaacggcgctcgtggtcggcgatttcacaagtatatcaaaggggattggtgattgattcccagcggactggacgctcaccccgcctcccgagaagtatatcaaaggggattggtgattgattcccagctagaagcgcgcgaccagaagtaacccgcaagtatatcaaaggggattggtgattgattcccagctgatcgtcggtgctgacgcgggcatatcaagtatatcaaaggggattggtgattgattcccagccccgatacatgcgcgcgaccggactcaaaagtatatcaaaggggattggtgattgattcccagctagaagcgcgcgaccagaagtaacccgcaagtatatcaaaggggattggtgattgattcccagcgttgataagtctggtcgcgcgtgtgggtaagtatatcaaaggggattggtgattgattcccagctgactcccggccgcgccgcttcgactacaagtgtatcaaagggcattggtaatagtagtttcaattgtggacttctttgatgtgtgttggggagtgatcgcgacattttgctgcaagaagggggtatgaagacgatctgacctcttcttgacgttagttaatttgcttgcgagtgaccgattcgccgcgcaagtgggcatgagaagttattgaaatcgtcatgcaatgtgcatgagggtggcagcctgcctgccgggagcgatccccgggcaggtgggccacccttgtcgcgtagtgggttttcttcgcctgaacctggatttgtgtcgggattcaagtgtgagtcccaggcctggcgttgctatgtgtggaagtctcgccgtgggcgtggtcgcagcccggtggaagtgatgggcgctagaagtggctagtcgcaggtgacaatacagacccttgcacttcttagcattcctgccgcatcctactcggctacccgcaatcggatgaagagagggcgaggatatgaacgcggcgcagacgcagattcgcgcgcgcatcacgcacgtgggcagcgagtatcgcaaggccgtcacctcgggcacctgcgagctctgcatcaccgactggagcgcccgcatccgcgacatctcattcgaactcacggatgttaacactggcgccacgtggcaggtgactacccctaccctccacgtcggctgatggaacgacatcggggagttccgcgtgagcccctggcacctctccaaagccctcgcccacgttaccctcattgtcgacacggaccgcctgaacgacgaaaatggcggcgcgctcatcgccctcggcatcctcgaggccgtcgaagcctgcacccgcacctccgaaatggtcgagcgcctcgacggtgcctacatccatgacgacgactgggacgaggagcagttcgtcctcgagccctgacgcatcgcgggtgactccgacgaagggcgaacgatccctcgttgacacccggaccatccgaaagggccggccgtttctgtcgagaaaagcgcgatgggcaaggcgagaaaacggcgaaaaacgatcagccaaacgcccccgcaaaaactcgctgcctgttactctggtcactgttcctcaggagttctctatctcttgcttctgtgaaacatcctgtgtaaacggacgcgcccacgcgaccgctcgccgccggtctccacctcactctcccggcgattacgagcgcgcgtgggcgcgttcgcgtaaaacgccaaactgggacacacccaagtagcgacttgagctgctgctcagtgcataacacgtgttgcaaccacccctagaatctgccgatggctggctgtgatggggggttgcactacttgaagccctctgtacgcgtgtcgccggcgtgttgtgcccctaatggtgcgattcccccgattggcggcagtgaggccgcaatgtgaggtggtctgctgcccaaactgcagaccacctcggcggaaaacgctaaaaatgggccgttcagggcgaggtggtctgcgttttgggctaaacggtgccggtcatggtgcgcgcaggtgggctgatgctccggtgggtgagtgcgcgcatcctggggttcgcgccgacgttactcgcaggcgaccccgtcgttgtcgcggtccagattcgagctgtacccgggatctccgcggtagagaggggctgcgcctgcttcacgggcctgcttgcagcttgagaagcggacgggagctggagccggcttgggagccggagctgggggagcgggctcttcagcgggttcctcctcgggctcgacgactggctcctctgcgacaggctcaggctccgtcgtctcctcgggggttgggctcgtgtcatccgacgcctcggaaggcgtctcagacggagtcgacactaatcctgcgatctcgctcttggtgaccgtcagggtgatcgtctgtgtcgttggaatatcgctgccctgagcgtcctgctccgtgaccttgtagccgtcctcgtagtgcgactcggtgatcgacattccgtggtcgtcgacgaccgcgagttccttgtatccggcattctcaagacgctcgaccgcctttggtagggcatcgccgaccacgttgggcacatatggatcacaggcgctcagtgcgcccattactgcacatgtgccaacgagcatagccacgagacgcttccataccgacattggtacccctcctattgggcaggaaaatgtgtgcgacaacacgtatcgttagtcggtatcctataggagttgagggattggcgggtaattatgggtgtgagtgtcaacgatgtgcaggcctgagggcgatgcgcattcgcgcccacggctacctcgccgcgggcaaaacaaaaaccccgaagcgaatgcttcgggggcttgctggtggctccgaccggcgtcgatccggtgacctttcgattttcagt

SEQ ID NO: 4362 - DNA, 13012 bp, synthetic construct
  misc_feature 1..13012: note = Synthetic
  source 1..13012: mol_type = other DNA
cccgccccgacacgacgatcggcgggcgccggatcgtggctgcgcgccacgagatgggcgccgccctcgcgcgcgaaaaccccatcgaggcggacctcgtgatccccacgcccgactcgggcacgcccgccgcgatcggctacgcgcaggaggccgggatccccttcgcccaaggcctcgtgaagaacgcctacgtgggccgaaccttcatccagcccacgcagtccctgcgccagctgggcatccgcctcaagctcaaccccctgcgcgaggtcatcgaaggcaagcgcctcgtcgtcatcgacgactcgatcgtgcgcggtaacacgcagcgcgcgctcgtcaagatgctgcgcgaggccggggccgccgaggtgcacgtgcgcatttcgtccccgccggttgcgtggccgtgcttcttcggtatcgatttcccgacgcgcgccgaactcatcgcctcgtccatgagcgtcgagcaggtccgcgactcgatcggtgccgactctctggcgtacctgtcgatcgacggcatggtcgcggccaccggacagggcacatccctgtgcctcggctgcttcaccggcgaatacccggagacgatccccgccggcacgcccgtgcccggaacccccgacgctaccccctgctaacccctacgcccgcggcgcaccagcaccgcgggcgttgttctcaccccgaccacccgacacggcctcgtcgagcgccacctgcgaaaggcaccacccatgaccgacacccccctggattacgcgaccgccggcgttgacaccgcggcgggcgaccgcgccgtcgagctgatgaagagcgctgtcgccgccacccacgactccaccgtgctgggcgcgaccggcggattcgccggcatggtggacgcctcggcgctgctgggcatggagaagcccctgctcgcgacctccacggacggcgtgggcacgaagatcgcgatcgcgcaggccatggacgtgcacgacacgatcggccaggacctggtcggcatggtcgtcgacgacatcgtcgtgatcggcgcacgcccggtcctcatgaccgactacatcgcatgcgggcacgtggtccccgagcgcatcgcctccatcgtcaccggcatcgcgcgcgcctgcgaggccacgggcacgcccctcatcggcggcgagaccgcggagcacccgggcgtcatggagcccgacgactacgacatcgcgggcgcggcgaccggcgtcgtggacgcctccaagctgctgggccccgagcgcgtgaccgacggcgacgtcgtcatcgccatggcctcttcgggcctgcactccaacggctattcgctggtgcgctcggtcgtctcgcgcgtgggcgcgtccctcgactcccacgtggcagagttcggccgcaccctcggcgaggagctcctcgagcccacacgcctgtacacgcgcctgtgcctcgacctggtcgagcgcttcggcatcggcggcattcacgcgtactcgcacgtgaccggcggcggcctggccgcgaacctgtcgcgcgtcctgccagtcggcgccatcgccaccgtggaccgctccacgtggaccgtgcccgccgtcttcgactgggtacgccgcggcggcgacgtcacctgggtcggcatggaggattccctgaacctgggcgtcggtatggtcgccgtcgtctccgcgtccgtcgcctccgaggtccaatccgcgatcaacgaggccggggtggccgcgtgggtcctgggctccgtcacgtcggccggtgccgacggcactgtggctgggtttgggtctgtgtctgacctgagcgctgattcctccggcgtgcgcctcatctccggcacgaagggtgtccaggcgggcgccgtgctgctgcacggcgagtaccgcgtgggttgagctgcgctgagcttcgctgagctgcgcgcctgtgttgagcgcgttgctgtgtgtgaggggtcgaggcctgcgggcctcggccccttattgcgttggcgggggtgcgagtgcgggtgtgtggacgcgcttatgcgcgtgcgacgcctcggcggccctcgatgagcccggagtgatcaggaaacgttgttcgggtacgccaaagcggcggaccggctagcggtccgccgtgtggctgagccgttacttagtggaggatccacccgtccagaaggactcatcgagctgcttcgggtcgatgtcgtcgtcttctgcgggaatctcggcgaagtcggcgtatttcgagtagaggtcgtcgtcgatcgcatcgtcctcttcgggctcgtccgccggcgcgtgtgccaggtacgagtcctcatccgccagctcgcgctggagtgcgtttaggtcggtgtcggggctgaaatacttcagcttccgagcgactttcatctgcttagccttttgacggccgcgccccatggcgtcgaccccctccgcgtcgttcgggtccgcgttgagcggttccctgggtgttcaaaatgtttcgtgggaccatcatagctaatgacgggccttgacctcaccttggatcgtgttttgcgcgctcagctgagcggcactcggcccgcgaaagcccacgaaaacggggaaatgtaaccggcgcaacccacggccggtgtggccggagttacgccggttcgcgtcagttggtgcttacagcgcctcggtcacgtcggacttcagggccgcgagcgtgtgcgcggcggcctcgcgggctgctcggcgggcctcgcgacgcgaacgacgcgacgagcgggtcgccagcaggacgattacgccgatggtgccgatcgcggacagggcgacgatgccgaccttcttgagggcctcggcgttgccgccggccgcgtcctgcagggtcagcgacgcagactccttgaaggaagcgaaacgggcgctggcctcgtccttcgcctcctgggcgagggcggcgggctggacgcgcgcgtacagctggtcgatcgtggcggccagttcggcgcgctggcgctcgaggtcggccgcgatctgggcctccgtgcgcggctcagaggaggggaacgcgggggcggactcgccgacggtcacgttgcgcggatcgaggttcgtgctcacttgcccagtcccttctcgatggcttccttggtggcggcgaccgacgcggcagggtccgggcggtgcgcctgcgcgctcttgagggagtgggcgccgacgagggcgaggatcaggacgatcaggaggaggacgccgacgatgatgagcgacgccgcccacgcgggcaggacgagcgcgagcgcgatctcggcggtgtgcagcgtccagccgagcaggtagagcgcgaagaccgcggcggccacgaggagggcgacgcccttaccgctcttggctgcgaaggtgcgcagcttcgccttgttgagctcgatctcaccgcgaataatcccggagagctggccggtcacggacgcgaagagggcgccgatgctggggcgggcctcgcctgcggcctgcgcggtgttgacgggcggcggcgggtactgcccgggctggggggtgggctgagtcatgggtgctcctgcgcgtgcgggtgagcgaggcggtgcctcgcctgatacgcctagtctctcatgaaggaggtcggctcgcagtgaccggtccgttactcctgcggggcgatcgaaccgggcagatcggagaggatcttgcgggcgcgcacgaccaggtcggagacctcgggctcggccatggccgggtcctcggtgtcaacgacgggaatgcctcgcagcgcggtctcggtgcggggctcgggcgaggcctggggcacctgcgttgcctggcctgcctggtttgcctggcttgcctgcgcgggcgctgtctccacacgggtggtcgccgcgtcgagggccgcctcggcgtggtcggccatccccgtcgtggggttttcctcgggtgcggatgcctgctgcgcgttcgcgggctgtgccccggcctcgttggcgcccagcgggtgccacgcgggggccgaggaggacccggtgggggagatgacctcgtcgaaggaggagggcagggccgaggggatcgggccgaggagggccttcgggtcctcggggttggcctccagggaagcgttgatgagtgcgacggaggggccgggcgcatcgagggcgacgcggccgttcgtcagcaggatcgcgcggtcggtggcggcggcgacctcggggttcggggtcgcgaggacgaccgcgcagcccgcgtccgcgagggcgcgcaggagggggccgagttccgtgcgggcggcggggggcagggtgatcgggtcttcgacgaggaagacctccgcgccggacacgatcgcgcgggcgatgagggccttgaagcgctcccactcggaaagctcggaggggtggagttcgacgcgctgggcgaggcccgtgatctgcagggcgcccacgaggttatcccagtcggcgacggaacccgtcgcggacaggggggccaggatgttctggcggatcgtcagggactcgtccagcggggagtccgcgcggatcagtgcgaccgagccgatgcggcccgcgaggcgcgctgccagcgagcgcgagggcgcggcgacgatgcggcccgcctgcggctcctcgaggcccgcgaggatcaggaaaagggcgcgggcgcggcggcccgtcgggtccaggatcgcgctcagcgagcgcgcgcggaagcccaagtcgatgtttgccaggaggaccgcgcccgacgcgtggtccgtgtaggtgatgcccaggccggcgacctggacgcggccgccgcggcctttcgcggagaacgagcggcgcgagcggtaccaggggcgcggctcggcgggcggcaggtgcacgggggcggcgagggcgacctcgttgccggtggtgttgcttgctgcggtgttggtgttcgttgccgcgctgttggcgctgttgggcgcgctgttggcgctgttgggtgcgctgttagcgggcgtgatgagggggccgtcggacacgagggtttcctgcgggtccagtgcgccggcctcggcgagcgtggccgctgcttcctgctcggagggtgcgccgacctcgtcgagggcgctgagcgtctcctcgaacgacggggcggacatctcggcgagcgcgtccgccatcgactgggcgggcgtctgcgaggcttgctcggcggcggccgtcacgtcggccagctcctggccatccgaaccgtgcaggttttcacgcgggtcattcgacatgcccccattgtttcaggatcgtgccacttgtgtcgccatggcacgcggaagtgggtggggtggcatcgccaaaaagtcctagcggatgtggcttgcatctctggaattggagatgtatgctgtagtcacgattgaatctcagtaagagccgactcgttagcggctccgaatgctccaccgggtccttctccacgaagggcccggtaattttttaaaacggacacaaatgtgtgtgcggtgtgacaccatgtcttcatgattaattcctcagaaaacattccgggtatccgctaccgcgtcggcatcgatgttggcctgaaatctattggtttctgcgcggtcgaggtcgaccgcaacgatcagcccgtcaagctgctgaactccatggttttcattcacgacgccggtgtcgatccgaatgagaacaaggcggcgaagagtcgaaagctgacggctggcgtcgcccggcggacgcgccgcctctaccgcacgcgacaccagcgcctggtgaacttggatcgagttctctccaaggaattcggatggccgctgcctgacctgacggcttgcaaggatccgcgcgagccctggcatgtgcgctcgcggctgctcgaggggtatatcgccgatgaggctaagaggaaggctgcgctgtcggtcgcgctgcgacacatggctcgccaccgcggctggcgcaatccctacgccaaggtggagacgctcctgcagcccgctgaaccgagcgacttcctcaaagggttaaacgagcgcatcagcacgtcccttggtaggagcttcccagctgacgcaacccctggtcagcttgtggatgcgtatctcgctcatcccgactacgtgcagaaggcaggtactcccaagctacgcgggcccaacggtattctcgccggcaagctccaccagagcgacaatgccgaggaaatccgccggatctgcgaggtgcagcagattgatcctgctgaccgtgatcggctgatccgagccgtcttccaggcgaagtctcccaagggcagtgcgaaggaacgtggccttgtaggccatgatgagctgccggggcagggcaaacacgtgcgcgcggagaaggcgcatcccgccttccagaagttccgcatcgtcagcgtgctggcgaacttgcgtatccgcgaggggcgtgcggagcgtgcgctgactccagaggagttgcaggggctgactgatttcctgctcgtcgctggactcaaacaggaggtcacctggcaggacctggccgataacctcggtatagagcgttcggatctgcgaggtacagcgaaggcctcgttcgacgggtcgccggtcctgcgcaaccctccgacggacgtcaccaccgagaagatcctggcctgcaaggtcaagtggctcaaggagtggtggaaggacgccgacgatgaacagcgcggctactttgtggacgccttctcaaactccggtggttccgaagatagtggcgacgtgaacgatgaggtcgcagagctactcgagcaggcaacagaggatgatcagctcgagttcgagaagatctcactgccccaggggcgagcggcatactcactggattccctgcgtcgtctgacggacaggatgctacgagatggtgttgatctgcacactgctcgtcgtcttgagttcaatgttggggatgactggaagccggccgtggagccgatcggggctctgacgggtaaccccgcagtcgatcgcgtgctcaagcaggtgagccgatggctgcacgcggcgactgagcgctggggcgagccgacggtcatcaacattgagcatgcgcgtgacggcctggggtcggaacgcgtggcccgtgagctcatgcgagaaaacgataggcggcgcagtgcaaatgctgcggctgtcgccaagatggcggcacagctgaaactctctggaaaggtgcgtcgttccgatcagatccgctacttcgcgctgcaaaggcaaaactgtcagtgcctctactgcggtaccgacattacgtttatgacggcggaaatggatcacatcgttcctcgtgcggacggctcctcgacgaatgaccgttccaatctggctgctgtgtgtcgtacgtgtaaccacaagaagggggctattccctttgctgcgtgggcgtcgtccgaccaggcgaacacgggcgtctccctggagggcgctcttgaacgtgtgaagatgtggcagcgtgacaacggtatgtcgcctaagcagttcaagcagctgcagcgtgaggtgtcggctcgtctcaagtcccgtaagccggacgaagagttcgatggtcgctcgatggaatccgtcgcctggatggctgtcgaactgagaactcgtatcgagggcttctaccgcacgcgcgacgaagaggcagtgccttccgtaggcgtctaccgtggtcagctgacggcggaggctaggaaggcctcgggcttcgagagtcgagtcaatctgattggcggccgaggtaagactcgtttcgacaggcgtcatcacgcaatggatgcgctcgtcatcgctctgatgaatccgtcggtgtcccgtaccctcgcgctgcgtgtgaacattcgagacgcgcagcgtcttgcgggcgtcgaggagacgtggaagaacttctacgggaagccaggtgaagcgtcccagcgtttcgagtcctggcgcgaatcgatgcttcgaggcgtcgagctcttcaacattgcgttgagcgataacgcgattcccttcgtggagaatattcgtttgcgcgttgggtcgagcgtcatccatgacgcgacggtgcactccttctgccccccgaagacgccggacggcgagcagatcatcacgaagggctacggtgagcagcacaggcttggggacgcgctccctgtcgaactgatcgaccgggctgagacgcccgcgctctggacggcgctcacacgctgctccgacttcgacccgaagaagggtcttcctgagaattcgaatcggacgatctccgtgaatggtacgcgcgtcgggccgacggagttgctgaacttctttgggtcctccgccgcgtgtctgaaggtccgtggcggatatgtggagctcggtagctcgatccaccatgcaaggatctaccgcattgacgggaagaagacagcgtacgcgatggttcgagtcttccaggtcgatctgttgcgcttgaaggatcaggatctgtttaccacgcccctgaagccttcaacgatctcagtgcggactgcagataagaaaattcggaaagccttgattgaagggaccgcgacgcagattgggtggctggtcgagggagacgagctgcagattgacgtatccaagttttccggaggatttattggcgatcttcttgcccaatatccacaaattagcaactggagggttgcgggtttcatgaatggtacccagcttcgactcaagcccctgctgctttctaaggaaggttttgttgatgagaaacaagcagtccggctaggcattgaaccgacggcggaggcaattcaaaagactgttgatactcctggctggcttccggctgcgaatgttctgttaggctctgggggcgtctatgttgttcgccgcaattgtttgggtgaggaacgcttgcaatcgtcgggttctttgcctgtcacgatgatgttggagtgatttccgatggcagagcagtggcgtgtgattgacctgtgtggtttcgagggtgaacttcgttcgactcgtggcggggttgaggtgtgccctgaggaaggagcaccaacgactattcccgtcgctgaggttgcagtcgtcctcgtgggcatgaaggtcgctctcagcgccgctgttctgcatcgtttagccgaggctgatgttgccattctcttctgtgattggagggggatccccgagggaggctgctactcgtggtctgatcacgggcgagtggccgcccgccaccgagctcaggcggaggtatcgctgcctcggaagaaaaatgcgtgggcgcgtctgattcgggcaaagatcgagggccaggcctcggttctggaaaacctcaaaattcgaggtagtggtgaactacttgctctcgcggatcaggttcgttcgggtgaccctggaaacgtggaagcacaggctgcgcgcctatattggtcgcgggctttgggtaaaggtgtggggcgtcaacccgcagctggtcagctgatcggcgcgaatgcgtgcttggattacggctattccgtgctccggggatacctgatgagggccgttcttgcggctggtctggctcccgccttaggagtgttccaccgcggccgaggcaatgccttcgcccttgccgacgatttaatcgagccttttaggcccgcaatcgacgaggttgcactgcagcttccgccgacggcttcaccctctgatcgcacggtgaaacaactactcgtggctgccgcgtcacagcgtttcgattcggatggacatggtatcccggccgtatccgaagccctggcccagtctttcgggcggtacgtggaaggtgacattgatcgcctcaacgtgttgtcgtggcaggggccgtcagtcgcgggtacgggagattgacatggcggatgacgcgatgtggtgtttggtcatgttcgatctcccggtggagacgaagaagcagcgtcgcgaggcgacgcgctttcgtaatgatctattggactggggcttctcgatggtgcagttcagtgtgtacgtgaagtactggccgactggtgggcaggatcatgcgacgttgcgggcgatcaagactcatctgccggagggcggacaggttcgggtgctggcgctgacggatcgacagtgggcgacggggcttcgatttgataacgcgaagccccggaaggagcgtggatcgccggagcagctcatgattttctaacgaagatcccctggttttccgcagtatttcgcggaaaacaaggggatctaagtatatcaaaggggaatcacgattgaatcccagccttgaatctttgttgcgtgtcggtcccaaagtatatcaaaggggaatcacgattgaatcccagccgggcctacccatcttgtcccatgcaagaagtatatcaaaggggaatcacgattgaatcccagcgcagtgcttcaacagcggcggcattgataagtatatcaaaggggaatcacgattgaatcccagctgctcaggcgttccagtacgcctaccttaagtatatcaaaggggaatcacgattgaatcccagccgtcacgcacattcttgaagcccaagtcaagtatatcaaaggggaatcacgattgaatcccagccgtaagtgtcacatccctgtaaacgtagaagtatatcaaaggggaatcacgattgaatcccagccggcttcctttcgggttgtttcgtttgcaagtatatcaaaggggaatcacgattgaatcccagcattcatagggacggcccatcttgtcccaaagtatatcaaaggggaatcacgattgaatcccagcttggcttcaagcgccttagcgcgctcaaaagtatatcaaaggggaatcacgattgaatcccagcattcagtctggaagtccacactagtataaagtatatcaaaggggaatcacgattgaatcccagctgatctccaggacggcgtttttgccgttaagtatatcaaaggggaatcacgattgaatcccagctagcggaccatgaggcgctcggcgcggcaagtatatcaaaggggaatcacgattgaatcccagcaccacgacaggaggcggatgtacaggagaagtatatcaaaggggaatcacgattgaatcccagcctgtcaatccagtcattgaagccgcagcaagtatatcaaaggggaatcacgattgaatcccagctgtggggtgggctgctcagtgcgtcagcaagtatatcaaaggggaatcacgattgaatcccagcaccgcgtgcgtgatcgtcttacggcgataagtatatcaaaggggaatcacgattgaatcccagcgagacggtcggcggcgactgcgcgcatgaagtatatcaaaggggaatcacgattgaatcccagcgcccttctggaggatatttgcctgtcgaaagtatatcaaaggggaatcacgattgaatcccagcgcgccagcgatcgcgcgctgggagaaggaagtatatcaaaggggaatcacgattgaatcccagccatcgtgctacatcctgatacatgggagaagtatatcaaaggggaatcacgattgaatcccagcgactcactcgcgacgccgagcgaacagcaagtatatcaaaggggaatcacgattgaatcccagcccgacgcgctcgccaaatgtggggcgctaagtatatcaaaggggaatcacgattgaatcccagcacgatgtcctgaacggtctgctcgttcaaagtatatcaaaggggaatcacgattgaatcccagcaccgatccaagcggcctaccagggcctcaagtatatcaaaggggaatcacgattgaatcccagctaattcgcgccggtctcatagtcgaggtaagtatatcaaaggggaatcacgattgaatcccagctcgtcgtggtcgtgggtttcggcgttttaagtatatcaaaggggaatcacgattgaatcccagcctggagctgggtgaacgtagcgacatctaagtatatcaaaggggaatcacgattgaatcccagcgacctgggcgctcggatcgacagtattcaagtatatcaaaggggaatcacgattgaatcccagcaagcgcctcctggcgaagcatggggcgtaagtatatcaaaggggaatcacgattgaatcccagctcgtttgcggtgatgagcttgctgcgcgaagtatatcaaaggggaatcacgattgaatcccagcgctacgagcgtgtcaagtgctggagagcaagtatatcaaaggggaatcacgattgaatcccagctcctcgctctcctcgtcacggtccggcaaagtatatcaaaggggaatcacgattgaatcccagctggtagtcggcgagcgcaaagccgctgaaagtatatcaaaggggaatcacgattgaatcccagcccgccgcgatccagacgctgatcgacgcaagtatatcaaaggggaatcacgattgaatcccagcgcatggtcgtggtgccgatggtcaccagaagtatatcaaaggggaatcacgattgaatcccagctcggtgcgcgaccacgtgatggacatctaagtatatcaaaggggaatcacgattgaatcccagcgcggcgctatggaagcgcatcgaaaccaaagtatatcaaaggggaatcacgattgaatcccagcttcgtcttaaagcagccgctgtaccgaaaagtatatcaaaggggaatcacgattgaatcccagcgggccgcagcgcaagcgcatcacggacgaagtatatcaaaggggaatcacgattgaatcccagcccagcaacgatgtccccagtggagcgctaagtatatcaaaggggaatcacgattgaatcccagcgctctcgccacgtttgcagcagcgcaagaagtatatcaaaggggaatcacgattgaatcccagcatcgcctggatggggtcgaaggtcgcggaagtatatcaaaggggaatcacgattgaatcccagccgtgatccgctcgtggcctggtctggttttgtggaccgggtgttttgagggttgttggttgttattggtggtgt

SEQ ID NO: 4363 - DNA, 12687 bp, synthetic construct
  misc_feature 1..12687: note = Synthetic
  source 1..12687: mol_type = other DNA
ggcgcgcgccgggcgcggcctgctcgggtgcggcgggcggcgggtactgcccgggttgggggatcgaatgggtcataggggctcctgcgcgtgcgggggtaacgaggcgtcgcctcgcctgataaacctagtctctcacgaagaaaggcggctcgcagtgacccgtgcgctactcgtcgcgttactccttgggggcgatcgagccgggcagatcggagaggatcttgcgggcgcgaacgaccaggtcggagacctccggctcggcgagcgccgggtcgtcggcgtcgaccgtaggaatgtcgcgcgcggcggcgtcggcgcgttcctggtccgaggcctgagctgtgtccgtggagatcggcgccatgagggcggtctcgtcggccgcggggtcaccgaaggtcgggcccggggtgggggcgtgcgcggaggagccggccacgacctcgtcgaagggggagggggtagccgcggggatcgggccgaggagggccttggggtcctcggggttggcctccagggaggcggtgatgatcgcctgcgaggggccgggcgcgtcgagggcgacgcggccgttcgtgaggagaatcgcacggtccgtggaggcggcgagctcgacggagggggtcgagacgacgaccgcgcagcccgcgttggccagggagcgcaggaggggttcgagctcggcgcgcgcgtcagcgggcagcgagacgggatcttcgatgaggaagacttcggcgccggagacgatggagcgggcgatgagggccttgaagcgttcccattccgtcagctcggaggggtgcaggtccacgcgctgggcgaggcccgtcacctggagggcgcccacgaggttgtcccagtcggcgacggagcccgtggccgacaggggagcgaggatgttctggcggatcgtcagcgcgttgtcaaggggtgtatccgtgcggatcagggcgaccgaaccgatgcggccggcgaggcgcgccgcccacgagcgcgagggcgcggcgacgatgcggccggcgtggggctcttcgaggcccgcgaggatgaggaagagggcgcgggcgcggcggcccgtcgcatccaggatcgcgctgagcgtgcgcgcacggaagcccatgtcgacgtcggccaggaggaccgcgcccgtggcactgtccgtgtaggtcaggcccaggccggcgacgaggaccttgccgccgtggcccttcgcggcgaaggagcggcgcgaccggtaccaggggcggggctcggtggtgggcaggtgcgcgggcagcggcgcgatgacgacctcgccctgcgtgggctggggggtctgctgttgcggctgctgtggctgttgcggttgctgctgttgcgccggggcgtcgcccacagacgaggccgtggccccctcgatagcagcgtcaaccgccgcggcggcggtcggttccgagatggcctgcccggtggtggccgactccttgacggtctgcccggtggtggccgtcaggtcggccacgtcctggccatccgtaccctgcaggttttcacgcgactcgttcgacatacccccattctttcaggatcatgccgattgtgccgtcaaggcgcgcgggggcggggtgggtgggtctgctgaaagtcggtcctcgtgtggcttgcatctctggaatcggagaggtatgctgtaagtgattgattctcagtaagagccgactcgttagcggctccgaatgctccaccgggcgtttcctcgcgaaacgcccggtatttttctgaaatggacgcaaatgtatgtggggtgtgacactatgtgttcatgattacttcctcagaaaatgttccgggtatccgctaccgggtcggcatcgacgtcggcctgaaatccattggcttttgcgcggtcgaggttgaccagtacgatcagccagtcaagctgctcaactcgatggtcttcgtccatgatgccggtgtcgacccgaatgagaacaaggctgctaagagtaggaagcttacggctggagttgcccgccgcacgcgccggctctaccgcacgcgccaccagcgcctcgtgaatcttgatcgggttctctctcaggaattcggctggcccctacccgatttcgcttcattcaagtacccgaccgagccgtggcatgtgcgtgcccgtttgatggatggctatatctcggatgaggaagagcgcaaggaagcgctctcgatcgcgttgcgccatatcgcccggcaccgcggttggcggaatccttacgcgaaggtggagaccctcctgcagcctgccgagccgagcgacttcctcaagggactcaacgagcgcatcagtacggcgctgaagaggactttcccagcagatgcgacccccgggcagctcgtggatgcctacctggcacaccccgactacgtgaaggaaccggggacaccgaagctgcgcggccccgaggggatcctcaagggcaagctgcaccagagcgacaacgctgaggagattcggcggatttgcgaggtccagaagattgccccctcggaacgcgatcgtcttatcagggcggtcttcgaggcaaagtctccgaagggtagcgccaaggagcgaggcctggttggctacgatgagctgcccggtcagggcaagcacgtgcgagccgagaaggcgcatcctgcgttccagaagttccgcatcgttagcgtgctggcgaacctgcgtattcgcgaggggcgagaggaacgcccgttgacccccgacgagcttgagggtcttgtcgacttcatcgatcaggtgagcctcaagcaggaggtcacgtggcaggatcttgcggacaacctgggtatcgagcgttccgacctgcggggtacggcaaaggcgtccttcgatggctcgccggtgctgcgtaatcctccgacggatgtgaccagcgagaagatcatggcctgcaaggtcaagtggctcagggaatggtggaagaatgcggatgatgagcagcgcggctgctttgtggacgcgttctcgaactccggcggctccgaggatggaaccgatgtcaacgacgaagtcgctgagcttcttgagcaggcgaccgaggaggatcagctcgagttcgagaagatctcgctcccgcaagggcgtgccgcgtattcgctggattccctgcgtcgtttgactcatcggatgctctccgagggggttgatctgcatactgcccggcgcatggagttcaatgtcggtgatgactggaagccggccgtggagccgattggagccccgacgggtaatccagcggttgatcgcgtgctcaagcaggtgagccggtggttgcatgctgccactgagcgttggggggagccgactgtcatcaatatcgagcatgcgcgcgacggcctcgggtcggagaaggtcgcccgtgagctcatgagggacaatgagaagcggcgtaaagcaaacgccgccgccgttgctgacatggcccagcagctggggctttcgggcaaggtccgccgctccgatcagattcgctacttcgccttgcagcggcagaattgccagtgcctgtattgtggcgctccgatcacgtacacgaccgcggaaatggaccacatcgttccgcgcgcggacggttcgtcgacgaacgaccgctccaacctggctgcggtgtgtcgtacatgcaaccacaagaagggcaagatcccctttgctgcgtgggcgtcttccgataaggcaaacactggagtgtctctgcagggggcgctcgaccgcgtgaagatgtgggagcgtgacaatggcatgtcgcccaagcagttcaagcagctgcaacgcgaggtgtcggctcgcctcaagtcgaagaagccggacgaggagttcgacggccgctcgatggaatccgtcgcctggatggctgtcgaactgcgaacgcgcattgagggcttctatcgttctcgaaacgaagagtttgtgccttccgtgggggtttaccgaggacagttgacagcggaggccaggaaggcctcgggcttcgagagccgcgtcaacctgatcggcggccgagggaagacccgtttcgataggcgccaccacgcgatggacgcgttggtgatcgcgctgatgaacccgtcggtgtcgcggacgctggcactgcgtctcaacatgcgcgacgcgcagcgcctgacgggcgttgaggagacatggaagaacttctacggaaagcccggagaagcgtccaagcgcttcgaggcctggcgcgagtctatgctccacggcgtcgagctcttcaacatcgcgctgagcgacaatgcgatccccttcctggaaaacaagcgacttagcatgaactcaagcgcggtacacgaagatactctcttttctttctctcatgcgaggccagtcgaaaagggctcgaagactttgaaggaaaaggggcagcagcgggaactcgggtccgcaatgtccgttgagctgatagatcgagccgaaacgtcggctctgtggacggcgctgacccggcgccccgacttcgacccgaagaagggcctgcccgagaatccctcgcgcagtatttctgtgaacgggactcgtgtgggctcaacggagttggtgaacttctttgggacctcctccgcttgtctgaaagtgcgtggcgggtatgtgaaacttgctaattcgattcatcatgcgaggatctaccgcattgacggtaagaagacctcctacgcgatggtgagggtcttccaagtcgatctgttgcgtttgaagcatcaggacctcttcactacaccgctcaagccatcgactatctcgattcgtacagcggaagccaagattcgtcgagcgctggccgacgggaccgcgacccagatcggatggctggttgaaggggacgagctgcggatcgacaccagcaagtaccgaggcggtttcattggcgaggtgttggcgaaatatccagaagcagtgaactggcgtgttgcgggctttgcagataaagcgcagctgcggctgcgtccgtaccttcttgcgggtgaaggactggagagcgacgcgatgcaaggaatgaaggagcttctcgaaggcaaggggtggcgtccgtccgtgaatgttctctttgctccggggtcggtagaagtggttcggagaaattgtcttggtgaagaacggaaagttctcggcagggggcttccagcttctgcattgatgaggtgaacgatggctgaacagtggcgtgtgatcgacctatgtagtttcgaaggagagcttcgagcagcacgtggtgcggtggaggtctgtccagaggatggagctccgactactgttcctgtcgctgaggtcgccgttgtcctcgtagggatgaaggtcaacttgagcgccgctgttctccatcgcctggccgaggcagacgttgcggtccttttctgtgactggaggggtattccggagggtggctgctattcctggtcggatcatggccgagtagcggcccgccaccgggcgcaggcggaagtgtcgttgccgcggaagaaaaacgcgtgggctcgcctgatacgggcaaagatcgaggggcaggcctcggttctggagaacctgaagattcgtggtggtggcgagctgctcgcgcttgccgaccaggtgcggtcgggcgatcctggaaacgtcgaggctcaggccgctcgtctctactggtcgcggacacttgggaggggagtgggacgacagccgtctgctggccagctgatcggagctaatgcatgtctggactatggctattcggttcttcgcgggcatctcatgcgtgccgttctcgccgcgggccttgcaccagcgctcggtgtcttccataggggcagagggaatgcttttgctctggcggacgatttgatcgagccgtttaggcccgcgatcgacgaggtggcgttgtcgctccccgagactgcgtccccgtcggatcgggaagtgaagcagcttctggttgctgccgcgtcgcagcgatttgacggggacgggcatgggattcccgctgtcgccgaggcacttgctcagagctttggtcgttacgtggagggggaccttgatcgtctccgtgtgctgtcgtggcaggggccgtctgtggttggcgtgggtgactgagatggcggatgacccgatgtggtgccttgtgatgtttgatctcccggtggagacgaagaggcagcgtcgtgaggcgacgcgtttccgcaacgatctgctggattgggggttttgtatggtccagttcagtgtgtatgtgaagtattggccgacgggcgggcaggatcatgcgacgttgcgtgcgatcaagtctcatctgccggagggtgggcaggtgcgtgtgctcgcgctgacggatcgtcagtgggcgacggggctccgtttcgataacgcgaggcctcggaaggaggccggaagccccgagcagctcatgattttctgacgttgaaccccgagtttttggctgttttatgccgaaaactcggggttctcagtatatcaaaggggatggatgattgattcccagccagccctgtcgaggtatcccgcgccgaacagtatatcaaaggggatggatgattgattcccagcgaggtgcggctaagtcgatgtacgcggccagtatatcaaaggggatggatgattgattcccagccctgccatgtggacacgtcgcacgcttgcagtatatcaaaggggatggatgattgattcccagcaccgggagggccgcgaggcgggagaggccagtatatcaaaggggatggatgattgattcccagcctttcccgtcgcgtgtgcatccgtagaacagtatatcaaaggggatggatgattgattcccagctgctctacccagccgaagtccccgcggccagtatatcaaaggggatggatgattgattcccagctcaggtggacgaggcgagcggcctcctgcagtatatcaaaggggatggatgattgattcccagctgctgtgcaagcatccggcgatgcgtttcagtatatcaaaggggatggatgattgattcccagcgaatgggacggacgcatctggtgggtgccagtatatcaaaggggatggatgattgattcccagcctacactccatgtgtcaagtgatttgcccagtatatcaaaggggatggatgattgattcccagcttaccgccgcaaagaagctcgccgatttcagtatatcaaaggggatggatgattgattcccagcctgaagtttgtgtccacaaactccactgcagtatatcaaaggggatggatgattgattcccagcgcgggtagagtcaggtagttctccaccgcagtatatcaaaggggatggatgattgattcccagcaggccctcactgcgcagctatacgtggacagtatatcaaaggggatggatgattgattcccagcggagccgggtaggttggcggacgggacgcagtatatcaaaggggatggatgattgattcccagcgccggtcaaacgtcggccccggagtgttcagtatatcaaaggggatggatgattgattcccagcggcctgcggcggtggtgatgtcgagggtcagtatatcaaaggggatggatgattgattcccagcttgttcaggtggttgacccatcgggggccagtatatcaaaggggatggatgattgattcccagcgcacggtcaaggaagtgcccgcgacctacagtatatcaaaggggatggatgattgattcccagcgacgtcgttgagccggtctggacgaacgcagtatatcaaaggggatggatgattgattcccagcaaccctcgtccgcgacggtgatccacgacagtatatcaaaggggatggatgattgattcccagcgatacctaagggtcgtttgcggtgattccagtatatcaaaggggatggatgattgattcccagcagtcttcgcgccgctcacgatggcccgccagtatatcaaaggggatggatgattgattcccagcacatgctcctcgcagccgtcaacggctccagtatatcaaaggggatggatgattgattcccagcttcaggtagtcgatcaccagcttctggacagtatatcaaaggggatggatgattgattcccagcacaacaacacgagcggtaccagcgcattcagtatatcaaaggggatggatgattgattcccagcctggaaccagcgctcaagccgtagcgcacagtatatcaaaggggatggatgattgattcccagcgcctcttcggcttcccgtgcggcgactgcagtatatcaaaggggatggatgattgattcccagctccaagggcttgtagcgcatcattggggcagtatatcaaaggggatggatgattgattcccagcttgccagatcaacgccaacgcagacgcgcagtatatcaaaggggatggatgattgattcccagctcattgggtttttcgagcgattcggacccagtatatcaaaggggatggatgattgattcccagcccaatacctggcgcgcgaactcgcccggcagtatatcaaaggggatggatgattgattcccagcaggttctttttccactgcatgcgccacgcagtatatcaaaggggatggatgattgattcccagcgtggaatcggcctgtgcaggcaaggctgcagtatatcaaaggggatggatgattgattcccagcacatcggggatgaggagccaggttgtgacagtatatcaaaggggatggatgattgattcccagcgccactccatcacgtccctggacgtcgacagtatatcaaaggggatggatgattgattcccagccatatcggggatgaggagccaggttgtgcagtatatcaaaggggatggatgattgattcccagcacatacagctcgcactcagcaacggaaccagtatatcaaaggggatggatgattgattcccagcaggtctccttccgattttagaggggtggcagtatatcaaaggggatggatgattgattcccagcttcgtgagcgtggtaccgttgatctgcacagtatatcaaaggggatggatgattgattcccagcgtgaggttgtcggtgagcgtgagcatggcagtatatcaaaggggatggatgattgattcccagcgcgtcgggagggccttcgccttcctgtccagtatatcaaaggggatggatgattgattcccagccaaatactcgcccctacacctcacaccgcagtatatcaaaggggatggatgattgattcccagccctatctacccctcgcgatctcatgacccagtatatcaaaggggatggatgattgattcccagctgagcttttccggttcgccttcgcactgcagtatatcaaaggggatggatgattgattcccagcggacgcggcaacgaatctcgcgtccgcgcagtatatcaaaggggatggatgattgattcccagccgatcgcgactggctcatgaccggcgctcagtatatcaaaggggatggatgattgattcccagctgcattcgctgcttgatgttgtcgagagcagtatatcaaaggggatggatgattgattcccagctgacgccctcgacatagcaggccacccccagtatatcaaaggggatggatgattgattcccagcgccgtggtttgcacggtcgccgcgaggtcagtatatcaaaggggatggatgattgattcccagcggagtttgggacggtattaagcagatcgcagtatatcaaaggggatggatgattgattcccagcgctaccgcatcgagtccctgcccgagggcagtatatcaaaggggatggatgattgattcccagccctacgccgcgactatcgccgccatgttcagtatatcaaaggggatggatgattgattcccagccagcctatcagctcggctgtcaggctgtcagtatatcaaaggggatggatgattgattcccagctacttcaggtcgagcacgtgaatagccgcagtatatcaaaggggatggatgattgattcccagcggcctctcgttgatgaccgacacagcggcagtatatcaaaggggatggatgattgattcccagcacgaccacgccgagctgatccagtccaccagtatatcaaaggggatggatgattgattcccagcgcaccttgaaatgtggctgcttgggcgtcagtatatcaaaggggatggatgattgattcccagccacgtataagccggtctgcgaatcgggtcagtatatcaaaggggatggatgattgattcccagcgcgacgttgtcggaggcggtgagggtgacagtatatcaaaggggatggatgattgattcccagcggcgcgcccgtccgcctcgaccgcgacgcagtatatcaaaggggatggatgattgattcccagcatgccggcgttgcccgactgctcgaggtcagtatatcaaaggggatggatgattgattcccagccctcacccacgggcaccgtcacaacgccacagtatatcaaaggggatggatgattgattcccagctgctccccgcatctccgcgccgcacactcagtatatcaaaggggatggatgattgattcccagcgagaaaaaagtgtcaggtgagcgccaggcagtatatcaaaggggatggatgattgattcccagctgacatgggcgtggggtctgactgacctcagtatatcaaaggggatggatgattgattcccagcgctcgcgtccgagattcgccgtctggtccagtatatcaaaggggatggatgattgattcccagcggccgggcagggtgaacctgcctcaccccagtatatcaaaggggatggatgattgattcccagccaatcgggtatgacgcgcagtgggtcaccagtatatcaaaggggatggatgattgattcccagcttggtgagcgtggtaccgttgatctgcacagtatatcaaaggggatggatgattgattcccagccccatttgttggaacctgccgggcgggacagtatatcaaaggggatggatgattgattcccagcccgccgggcaacacccctcggccaagaccagtatatcaaaggggatggatgattgattcccagcataggtcagtcgcaggtgacgcaggtcgcagtatatcaaaggggatggatgattgattcccagcatgccccgagaacttcgcgcgcttcgcgcagtatatcaaaggggatggatgattgattcccagcagcggcatcaacgatcgcgcgaatccgacagtatatcaaaggggatggatgattgattcccagcgggtacgagtcggcgacgaagcgctgagcagtatatcaaaggggatggatgattgattcccagctggtgtgcggtttggacatcgagcctgacagtatatcaaaggggatggatgattgattcccagctctgcgtcggcgccgttgatggcggtgacagtatatcaaaggggatggatgattgattcccagcaaccggcgctaagcggatgcgaccaaaacagtatatcaaaggggatggatgattgattcccagcccgaccgcatggctaaccgcatctacgccagtatatcaaaggggatggatgattgattcccagccgcgcgcccatcttcgtgtacgacacggcagtatatcaaaggggatggatgattgattcccagctcatcgtttccaggtcggtgagcgagggcagtatatcaaaggggatggatgattgattcccagcgtcccaggtgactctgtctgatggtggtcagtatatcaaaggggatggatgattgattctcagccagtcagacgacgttcgccgtgcgcgcgcagtatatcaaaggggatggatgattgattcccagcccgtcgttgactacgcgtgcggatgcaccagtatatcaaaggggatggatgattgattcccagcgcatttcggcggcggtctgatcgagttccagtatatcaaaggggatggatgattgattcccagcagctccaggacgcggcgctgatcggcggcagtatatcaaaggggatggatgattgattcccagcgtgagcgcgcagctgtggtggatgctcgcagtatatcaaaggggatggatgattgattcccagctgaatctgtagtccttgagggtggcatacagtatatcaaagaggatggatgattgattcccagcgttcagggaggtccaacagtagtgtccgcagtatatcaaaggggatggatgattgattcccagcatcaccgcaggcctcaccggcaccctcgcagtatatcaaaggggatggatgattgattcccagcacctcggcaacggatacggctccagcctcagtatatcaaaggggattgatgattgattcttggccttgtgtttatctatgtggtggggggcttgatttgaataggtgttccgttaatcaactctgggtgcccatttgtgataggctactgcaagtaggggtcaagaaggcagtccaccctatacgcttcgcgtcggacagcaggatcgccctactcgcggtggtagccaacccacccgggagtggttgtttccccgcgtaagcggggacaatcctccacatgatgcggcgggttaagggtcaaaatgtgtgtctggctcggcgtgtcgcgggggttagatttg

SEQ ID NO: 4364 - DNA, 12566 bp, synthetic construct
  misc_feature 1..12566: note = Synthetic
  source 1..12566: mol_type = other DNA
tgcgggcgcgcacgaccaggtcggagacctcgggctcggccagggccgggtcctcggcctcgacgacggggatgccgcgcatcgcggtttcggtgcggggctcgggcgaggcctgggggacctcggtcgcctgggtcgcttggacgggggcggcctccacgcgggtggtcgccgcgtcgagggcggcctcagccgggtcggtttcctcgggttcggaggcctgctgagcgtccgaggtctgcgccccggcctcgtcggaggtgccgagcgggtgccacgcgggggccgaggcggacccggtgggggagacgacctcgtcgaaggaggcgggcagggccgaggggatcgggccgaggagggccgtcgggtcctcggggttggcttcctgggaggcggcgatgatcgcggccgaggggttgggtgcgtcgagcgcgacccggccgttcgtcaggaggatcgcgcggtcggaggcggccgcgacctcggcgtttggggtcgcgataacgaccgcgcagcccgcgtccgcgagggaacgcaggagggggccgagttcttcgcgcgcggtggcgggtagggagaccgggtcttcgatgaggaagacctcggcgccggacacgatcgcgcgggcgatgagggccttgaagcgctcccattcggagagctcagaggggcgcaggttgacgcgctgggcgaggcccgtgatctgcagggcacccacgaggttatcccagtcggcgacggagcccgtcgcggataggggcgcgaggatgttctggcggatcgtcagggactcgtcgagcggggagtccgcgcggatcagcgcgaccgagccgatgcggcccgcgaggcgcgcggccagcgagcgcgagggggcggccacgatgcggccggcctgcggctcctcgaggccagcgaggatcaggaaaagggcgcgggcgcggcggcccgtcgggtccaggatcgcgctcagcgagcgggcgcggaagcccaggtcgatgttggcgaggaggaccgcgccggtcacgtggtccgtgtaggtcaggcccaggccggcgacctggacgcggccgccgcggcccttcgcggagaaagaacgacgcgagcggtaccaggggcgaggctcggcgggcggcaggtgcacgggggcggcgacggcgttgttggcgttcgttgatgcggtgttgcccgtggtgttggtgctgttggcgggcgtgagctcctgggcgggctgctgcggcgcggcctgcggggtcgcggtctcgggcgcgatgtcgctggtggtctccgctgtggtctgtgctgctgccgccgcgtcggtggtgagcgcggcgggggaggcctcggcctcgtcggttgtgacgaggggagtggaggacacgagggtctcctgcaggtcctgcgcgccgtcgtcggcgagcgtttccgtcgtttcgtcggcggtgggggcgtcggcctcgtgggtggtgccgctgaggatctcctcgaacgacgagagggcgctgcgctgggcgggcgcctcgtcggaggtgtgggcgggggtcgaggcggctcgctcggcgccggcgcgcgcggcgtcggccgtcacgtcggccagctcctggctgtccgagctatgcaggttttcacgcgggtcattcgacatgcccccattgtttcaggatcgtgtcgattgtgtcgtaatggcacgcggaagtgggtggggtggcctcgcggaaaagtcctcgcggatgtggcttgcatctctggaattggagatgtatactgtaagcgattgattctcagtaagagccgactcgttagcggctccgaatgctccaccgggtccttctccgcgaagggcccggtatttttttaaagcggacacaaatgtgtgtgcggtgtgacactatgtgttcatgagcacttcctcagaaaacatccccggtatccgctaccgcgtcggcatcgatgtcggcctgaaatccatcggcttctgcgcggtcgaggtcgaccgtcatgaccagcccatcaagctgctcaactccatggttttcatccatgacgccggcgtcgacccgaacgaaaacaaggcggcgaagagtcgaaagctgacggccggcgttgcccgtcgaacgaggcgcctctaccgcacgcgccatcagcgcctggtgaatctcgatcgcgttctctcaaaggagtttgggtggccgctgcccgatctgtccgccttcaagtatccgaccgagccgtggcacgttcgggcgcgcctgcttgaggggtatatcgcagacgacgagaaacgtcaggctgcactgtcgatcgctctgcgacacattgcacggcaccgcggctggcgtaatccgtatgcgaaagtggagacgctgctgcaggctacggaaccgagcgatttcctcaaggggcttaacgagcggatcagtgcgtcgctcgggaggcagttcccggtcgatacgacgcctgggcagctggtgaacgcatatctagctcaccccgactacgacaaggaggtgggaactcccaagcttcgcggaccggaggggatcctcgcggggaagctgcaccagagcgataacgccgaggagattcgccgcatctgcgagatgcagaagatcgatcgtgcttactgtgatcggctcattcgcgctgtcttccaggcgaagtcgcccaaggggagcgcgaaggaacgcggcctcgtgggccacgacgagctgccgggccaggggaagcacgtgcgtgccgaaaaagcgcaccccgcgtttcagaagttccgtatcgtcagtgtgctcgcgaaccttcgcattcgtgaagggcgtgaagaacgtccactcactccggatgagctgcagggactgacggacttcctacttgtcgctggcctgaagcaggaggttacctggcaggacctggcggacaacttgggcatcgagcgttcagacctgcgcggtaccgcgaaggcttccttcgacgggtcaccggtcctgcgcacccctccgacggatgtgactaccgaaaagatcctggcttgcaagatcaagtggctcaaggaatggtggaaggaagcggatgatgagcagcgcggctacttcgtggacgctttctcgaactccggcgggtcagaagacagcagtgacgttaatgatgaggtcgctgaactccttgagcaggcgaccgaggacgatcagctcgagttcgagaagatctcgttaccccagggacgagccgcctattcgctggactccctgcgtcgcctgacggacaggatgttgcgtgatggcgtcgatctgcacactgcccgccgcatcgaattcaacgttggggatgactggaagcccgccgtcgagccgatcgaggctccgactggcaaccctgcagtggatcgtgttctcaagcaggtgagccgctggctgcacgccgccacggagcgctggggagaaccgacagccatcaacattgagcatgcgcgtgacggtctcgggtctcagaaggttgcgcgtgagctcatgcaggcaaacgagaagcgtcgtaaggcgaacgcggcggctgtcgcagccatggctgaaaaactgaagctgtcgggcaagattcatcgatctgatcagatcaggtactttgcgttacagagacagaattgtcagtgcttgtattgtggcgctccgatcacctacacgacagcggagatggaccacattgttccgcgcgcggacggttcgtcgacgaacgatcgctccaatctggcggcagtgtgccacgcgtgtaaccaaatgaagaatgcaattccgttcgcaacttgggctgcatccaactcggcgaatgtcggcgtctctcttgagggtgctctcgatcgtgtcgatatgtggcagcaggacaatggcatgtcgaagaaacaattccagcagcttcggaaagaggtgaaggcacgcctcaaatcaaagaagcccgacgaggagttcgacggtcgatcgatggaatctgttgcctggatggcggtcgagctgcgcactcgcatcgagggcttctaccgcgcgcacgacgaagagtccgttccctccgtgggtgtctaccgtggccagctgacggcggaggcccggaaggcctcgggcttcgagagccgagtcaatctgattggtggccgaggtaagacacgtttcgataggcgtcaccacgcgatggatgcgctcgtgatcgcgttgatgaacccgtcggtgtcccgcacgctcgccctgcgtgtgaacatgcgtgacgctcagcggctcgccgggctcgaggagacctggaagaacttctatgggaagccgggcgaagcatcccagcgtttcgagtcctggcgcgaatcgatgctccgcggcgtcgaactcttcaacattgcgctgagcgacaacgcgattcctttcgcagagaacattcgtctgcgggttggttcgagcgttattcacgatgcgacggtgcactccttctgtccgccgaagcgacccgatggcgagcagatcatcacgaagggctacggcgaacagcacaggctcggttccgctctcccggtcgagctgattgaccgcgctgagacgccggccctgtggacggcgctcacccggtgcccggactttgatccgaagaagggcctgcccgagaacccctcgcgcagtatttcggtgaacggaacacgcgtggggccgtcggacctgctgaacttcttcgagttttcgaatgaaggaatcaaagcttgcttgaaagtccgaggaggctatgttgagcttggaagctctattcatcatgcgcgaatttaccgcatcgacggcaagagaactgcgtatgcaatggtgcgagtgttccaggtggacctgatgcgcatgaagcatcaagatgtctttacggctccactcaagccttccgcgatctcgatgcgaacggcagaacccaagattcgcaaggcgctggcggacgggacggcgacccagatcggatggttggtgcgaggtgatgaactggtcgtcgaaaccgaagcatacagtgaaggcaagattgctcaggttatggagcagtatccagagctcaagcattggagggtagctggctttcccgaagccaagaagatcaagatgcgtccgtacctgctctcgaaggaggggcttgatgataacgaacagggacctattcggactgttcttgatgttaaaggttggattacgacgatacataagctgtttggtgccgggggtgtgcgtgtgattcgccgaaattgcctgggtgaggaacgctttaggtcgtctgcttcgcttcctgtcaccatgccgttggagtgaatccctatgtctgagcagtggcgtgtcattgacctgtgtggtttcgaaggagagcttcggtcgacgcgtggtggggtggaggtgtgtcctgacgggggcgctcctacgaccgtgcctgtcgcggagctcacggttgttctcgtgggtatgaaggttagcttgagcgccgctgttctgcatcgtctggccgaggcggatgttgccatcctcttctgtgattggagaggcattccggagggcggctgctactcatggtctgatcacggccgagtagcggcccgccaccgagcccaggctgaggtaacgctgccgcggaagaagaatgcctgggcgcggctggtgcgggcaaaaatcgagggacaggcttcggttctggaaaacctcaagattcgcggtagcggtgaactcctcgcgcttgcggatcaggtgcggtcgggcgatcctggaaacgtggaggcccaggcggctcgcctgtactggtcgcgggctctcggtcggggtgtgggtcggcagcctgcagcggggcagctcatcggagccaatgcgtgcctggattacgggtactcggtgctgcgtgggcatctaatgcgtgccgtcttagcggcgggtctggctccagcgctaggcgtcttccaccgtggccggggcaacgccttcgcgcttgctgatgatctgattgagccgtttaggccagcgatcgatgaggttgctttgcagcttcctcctacggcgtctccttcggatcgttcggtgaagcagcttctcgtggcggcagcatcccagcgctttgatggagatggacacgggatccctgctgttgctgaggccctggcccagtctttcgggcgttacgtggagggtgacatcgaccgactgcgcgtgttgtcgtggcaggggccgtctgcggttggtgtcggtgagtgagatggcagacgatgcgatgtggtgtctggttatgttcgatctcccggtggagacgaagaagcagcgccgcgaggcgacgcggtttcggcacgacttgttggattggggattctgcatggtccagttcagcgtctatgtgaagtactggccgacgggcgggcaggatcatgcgacgttgcgggcgataaagactcatctgccggagggtgggcaggttcgtgtgctggcgttgacggatcggcagtgggcgacggggctccgttttgataacgcgaagcctcggaaggatgctgggaaccccgaacagctcatgattttctgacgttgaaccccgagtttttggctgttttctgccgaaaactcggggtttccagtatatcaaaggggattggtgattgattcccagctccaactcgtcggtgtgatcgtgtgggacagtatatcaaaggggattggtgattgattcccagcgccgagcgcggacggtctcgatgacgggcagtatatcaaaggggattggtgattgattcccagccgcggcgaacgcgttcgtcgccgccgaacagtatatcaaaggggattggtgattgattcccagcgcaaaagcgtgcgcggtgctgtcgcggccagtatatcaaaggggattggtgattgattcccagctaaccctccgtctctcactgaccgcgtgcagtatatcaaaggggattggtgattgattcccagcgtctcctcgatcagggcgcccgaatggacagtatatcaaaggggattggtgattgattcccagcctcatgatgtcgccgctgagtccgtctgcagtatatcaaaggggattggtgattgattcccagctccgggttgcgctgggtcgcgtaggcggcagtatatcaaaggggattggtgattgattcccagcgtcatggtgcgcgaccgacgatgaggaccagtatatcaaaggggattggtgattgattcccagccgcggcctggacttgccgatctcccaggcagtatatcaaaggggattggtgattgattcccagcgtcgcctcgcccgcctgaccgccatcgacagtatatcaaaggggattggtgattgattcccagcttcaggcgcagcttcaggagatgcgcgacagtatatcaaaggggattggtgattgattcccagccaaccctcacaagccagtacaccgtgaccagtatatcaaaggggattggtgattgattcccagctgatcaaccgccttgaaaaggagaacagcagtatatcaaaggggattggtgattgattcccagccacgtcgaggatgagcttggatgtgacgcagtatatcaaaggggattggtgattgattcccagctatcggtcaggcaatcgtcgcccaccaccagtatatcaaaggggattggtgattgattcccagcggcctgacggaggaggagtatccccgcgcagtatatcaaaggggattggtgattgattcccagccgtggtgtcgtccccgttctggggtgtgcagtatatcaaaggggattggtgattgattcccagcacacgtcgatcaggcggcggcgcgcctgcagtatatcaaaggggattggtgattgattcccagcactcgccccagtgagtcccaacgaggtccagtatatcaaaggggattggtgattgattcccagcgttaggcgtgaccacgggacgcgcgggtcagtatatcaaaggggattggtgattgattcccagccaagcctcccgtccccctccaggccgtacagtatatcaaaggggattggtgattgattcccagccacgacgggcaccacgcgcaggtccggccagtatatcaaaggggattggtgattgattcccagcctactacatgaatgtgtcggccaagcgtcagtatatcaaaggggattggtgattgattcccagcgcgtcggtgatgatctgcgtgaggtcgccagtatatcaaaggggattggtgattgattcccagcttcccgttgagctgctcgtgggcgcgcacagtatatcaaaggggattggtgattgattcccagcgcatcatctgaatagccatgcccctagccagtatatcaaaggggattggtgattgattcccagcatggaacgcaaagaaccgtgcggcaaaccagtatatcaaaggggattggtgattgattcccagcatgacgcgttgcatgtggtggattcgaccagtatatcaaaggggattggtgattgattcccagcggggtgtagcatcgccgtggaggggtctcagtatatcaaaggggattggtgattgattcccagccgagcttgcggccgccgcgaagaaggggcagtatatcaaaggggattggtgattgattcccagccgagcgcgccgcccgcttcggggtcaaacagtatatcaaaggggattggtgattgattcccagcccggtttcgccactcatctgccgctcttcagtatatcaaaggggattggtgattgattcccagcaaagacctcgacagccgggagggataaccagtatatcaaaggggattggtgattgattcccagctagaggtatgtgggtagcctagagggggcagtatatcaaaggggattggtgattgattcccagctgcagggcctgataccggttgtcggtggcagtatatcaaaggggattggtgattgattcccagccccatgcgcttgcccgcgtgacggggatcagtatatcaaaggggattggtgattgattcccagcgggcttcgtcgtcaatggtgagtcggatcagtatatcaaaggggattggtgattgattcccagcttacacgggccgtctcgccggtccgtggcagtatatcaaaggggattggtgattgattcccagcaagtcggtaatctgtcggatgctcaggccagtatatcaaaggggattggtgattgattcccagccacacgtgcaggcacccgtcggggcgcacagtatatcaaaggggattggtgattgattcccagcgcgaggacttcaactgtatcccagagcgcagtatatcaaaggggattggtgattgattcccagccttatttggacccattctcgatgaagaacagtatatcaaaggggattggtgattgattcccagcgcgcgaacgggctgatgaacgaaccgcgcagtatatcaaaggggattggtgattgattcccagcgaattcggcgatgccctgctcgaaggcccagtatatcaaaggggattggtgattgattcccagcttcgtagtcatcggcgcgagcaagtcgccagtatatcaaaggggattggtgattgattcccagccgtgctggtgtacccggatgggcgcgtgcagtatatcaaaggggattggtgattgattcccagcagaactcgcggtggcgtgtcgtgagcgccagtatatcaaaggggattggtgattgattcccagcctcggtcggagaagggcgttcgctcatccagtatatcaaaggggattggtgattgattcccagccagcgatgggtttgcccattcctctggccagtatatcaaaggggattggtgattgattcccagctggacggcgcgcacctggtagagggggccagtatatcaaaggggattagtgattgattcccagcttcgcggacttcggtcacggttgcgccgcagtatatcaaaggggattggtgattgattcccagcgggcgttggtggtgccgatcgtgttcgacagtatatcaaaggggattggtgattgattcccagcaggatgctaattgcccgcaaaagcaaaccagtatatcaaaggggattggtgattgattcccagcgggcgttggtggtgccgatcgtgttcgacagtatatcaaaggggattggtgattgattcccagcaggatgctaattgcccgcaaaagcaaaccagtatatcaaaggggattggtgattgattcccagcgagcggatgacgagtccgcggcgctcggcagtatatcaaaggggattggtgattgattcccagcagatcgtgcacacgcccgtgtagtgaggcagtatatcaaaggggattggtgattgattcccagcgcgtgcagatcccggcgaccgccgtcaacagtatatcaaaggggattggtgattgattcccagcctcatttgtggccgtgtgggacgaggagcagtatatcaaaggggattggtgattgattcccagcccaataaggaagaatcgggctcgctggtcagtatatcaaaggggattggtgattgattcccagctcacccgcgtgaaggtcggtgtctaccacagtatatcaaaggggattggtgattgattcccagctgttgaggtgtacccgtgtgggttggcgcagtatatcaaaggggattggtgattgattcccagcgcaccactttatcggcctgcaaatcaatcagtatatcaaaggggattggtgattgattcccagcgacggatcggccagtggcgcgtgtcggccagtatatcaaaggggattggtgattgattcccagcaagcggacagggaaggccaggccgacagcagtatatcaaaggggattggtgattgattcccagccacacggtaggccgctgatcggggccgtcagtatatcaaaggggattggtgattgattcccagctcctggtccgggagcaagtcggcaaggccagtatatcaaaggggattggtgattgattcccagtgatagtggagatgggctccgttcggaaattgctcaatcaaaatgctcctgaacatagttcaggagcaaatgaaaagcgagaggatttcttggtgcaggggtctttacagcctaaagctgaaggcagtcccacacacgaagtcgctgaagcggattcctttgaatgtctgttaccagacgtcctacgcatcctctcgctaggtcgataccagcctaaaagctgagtttcggtcgaggaaggtatgaacagcgctctcttgctaaaactggttgatcaaagtttcccctctgagcgggggtgagtcgttctcgaaacagtgctagggtgcgtatgagggtggcagccagcccaactgggagtgatccccgggcaggcgggccaccctcgttgttttccccacgcgagtggggggtgggatcatgtgaatctttgctgtggtgtcgtcctccgcatttcctgtttgggccgattgacaatgcgttatgctacttgctggtaggggtcaagaaggcagtccaccctatacgcttcgcgtcggacagcaggatcgccctacttgcagcggtactcaatccgcacgggagtgatcgcctccccgcgcaagcgggggcgactctccacaaggtgcagtctgtttcggcggctgcaccttttctcgtgccggcagcgagagtgtcatcatcggcgacgatcaaaatcgcgcggtcgcctcttcgagcgcgagcctccgacgggttggtcaaagcgcctgcaaaaaatgaggagcgaggcccattgcccgggccttccgacggtcgattatttcacgactagcccaggggggattcccactcctactggcaggataccttacccatgctcagttgcaagtgtcggtggcttcctgagatctcaacccaatttccgtggtgcgcattcgttgtgcctgtacggggatactggttggtggctggcgagcagatggcagccaccgccttggttgtgtcggctgctggccaacagaattaggcatcagaaacagctatcccaatttcctgtccgtgtccttgcgctctccgccctacctgccgtatcctgctcggctacccacaagcagatgaaggagagggtgaggacatgaatgcagcacaggtgacgcagcaaggcgcgggcgtagacggcaaggcgcaaatccacgcgcgcatcacgcacgtgggcagcgagtatcgcagggacgtcacctcgggcacctgtgagctctgcatcgccgactggagtgcccgcatccgcgacatctccttcgagttcacggacgtcaacactggctccacctggcaggcgaccacccccaccctccgcgtcagccgctggaacgacgtctgggaactccgcgtaaaccccttccacctctccaaggccctcgcgcacgtcaccctcgtcgtcgatacggaccgcctagacgatgcagacggccgcgttctcatcgccctcggcatccttgaggccgttgaagcctgcacccgctcctccgagatggttgagcgcctcgacgctacctacatccacgacgacgactgggatgaggaacaattcgtcctcgagccctggcc

SEQ ID NO: 4365 - DNA, 11130 bp, synthetic construct
  misc_feature 1..11130: note = Synthetic
  source 1..11130: mol_type = other DNA
gacctgagcgcggactcctccggcgtgcgcctcatttccggcacgaagggcgtccaggcgggtgccgtgctgctgcacggcgagtaccgcttcggctgattcttctgtgtctccgagctcgagcgggcggggctggggccgggtggcctcggccccgctgtgcttggggatggacgaggcctcggcgcgatcagtcgggagatttcagcaggcgcgcgtgacagcgacgcatgcgtgacagcgatgcgcgcggtacgctgacgcgcgcggtcgtgaaccggaatctgacgccaggtttcgggtacgccaaagcggcggaccggggccggtccgccgaatggctcagccgttacttggtggaggaaccacccgtccagaaggactcatcgagctgcttcgggtcgatgtcgtcgtcctctgccggaatatccgcgaagtcggcgtatttcgagtagaggtcgtcgtcgattgcatcgtcctcttcaggctcgtccacggcactgttcgtcgtgtacgagtcctcatccgccagctctcgctgaagtgcgtgtaggtcggtgtcggggctgaagtacttcagcttccgagcgactttcatctgcttagccttttgacggccgcgccccatggcgtcgaccccctccgcgtcgttcgggtccgcatcaagcggttccctgggtgttcaaaatgtttcgtgggaccatcatagctaatggaacggcttgacctcaccttggatcggtttttgcgcgctgagcggattgacccgaagggggtgaatccccggcaacacgccgaaaacgtgcgcgacgcgcagcatcatgtgaacggtattacggattaatctgtcaggcgcgcagatgcgcaatcccctcgcacgagcgggatgcccgggcgaggggagcacacggaaaggaggaagagtcaggcgtccacggcctcgtcggccttcgcgagcgcggcgagagtctgcttggcggcctcgcggccgatgcggcgagcctgacggcgtgcgcggcgcggcttacgcgtggccagtaggacgaggacgccgatggcacccaccgtggacagggcgacgacggcgaccttcttgatggcctccgcgttgccgccgacggcgtcctgaagagtcagagacgcgctctccttgaaggacttaaagcgcacggtggcctcctccttcgcttcctgggcgagggtggcgggctgcacgcgtgcgtagagctgattgatcgtggcggctagctcggcgcgctgacgctcgaggtcggcctcgatctgggctgcggtgcgcgggccggaaggctgagcggcgcgctcgccgacggtcacggtgcgcgggtcgacggagttgctcacttgcccagtcccttctcgatagcttccttggtagcggccaccgatgcggccggatccggacggtgcctctgcgcgctctggagggcgttcttacccgccagagccagggttgccacgatgaccagtaggatcacgacaacaatcagcgacgccgcccacgccggaagcacgagggccaggaggacctcgaccgtgtggagagtccaacccagtaggaaaagcgcgaaaacggcggccgtgatgagcaggcccgcacccttaccactcttggcggcgaaagcgcgcgccttcgtcttattgagctcgatctcgtcacgcagaattcccgacagctggctggtcaccagtgcgacgaggctgccaatgctggggcgtgcctcggatgcgggagccgcgtgctgcggcgcgtgctgcgtgggggcctcgggcggcgggtactgcccgggctgggggatagactgggtcatagggactcctgcgcgtgcggggtaacgaggcgacggctcgcctgataagcctagtctctcatgaagagaggcggctcgcagtgacccgtacgctactcctcgcgttactccttcggtgcgatgggacccggcagatccgacaggatcttgcgggcgcgcacgaccagctcggagacctcatcctcggcctgtgctgggtcctcagaatcgaccgcggggatgtcgcggagcggcgcgttgtcggccgaaccagcgttcgtttcaaccggcgcaatgagcaccggctcgtccacagggatctcgtcaaaagacagatcctgagcgttcgtcgccgcgccaatcgagcggcgggcgggaaccgacgagggaagggaaccggaggtgccagccacgacctcgtcaaagggggaggggagtgatgcacggagggtgctctgatcctccgggttggcctccagggacgtcgcgatgatcatgggcgtggggttcggcgcgtcaagcgacactcgaccgttcgtgagcagaatcgcacggtccgtcgaggcggctagctccggggatggcgttgaaatgacgaccgcgcagcccgccttggtcagcgacctcaggagcggctcgaactcggtgcgtgcctcatcgggcagggaaatcggatcctcaatgaggaacacctccgcaccggacacgatcgcgcgagcgatcagcgccttgaaacgctcccacggcgtcagctccgagggataccgatcaacgcgctgcgccagacccgtcacctggagcgaccccaccaggttatcccagtccgcgaccgaacccgttgccgacaggggttcgaggatgttctggcggatcgtcagcgtctcgtccagcggggaatccatacggatcagtgccaccgagccgatgcggcccgccaggcgcgccacccacgaacgcgacggcgcagcgacaatgcggccagcctgcggctcttcgaggcccgcaaggatcaggaacagggcgcgagcacggcggcccgtcggatccaggatcgcgctcagcgtgcgcgcgcggaaacccatgtccacgttcgccaggaggagcgcgcccgtcgcatgatccgtgtaggtcaggcccaggccggcgaccaggaccttgccgccgccgcccttcgccgcaaacgagcggcgtgaacggtaccacgggcgcggctcagtcgcgggcacgcgtgcaggcaccggcgcgaccatgaccttactctgcgtccggcgaggagccggtggctgcggagagtgctggggggcctgcgcgccgctctgggggctgtgcgcgtacggggagttctggggctgctgagcgtcagtcaggacggcctcgtcctgcgcgcccgtcgtcgacgaggccgtggccccctcgacggcagcgtcgaccgcagcagcggcggtcggctccgagacggcctgcccagcggcagccgtcaagtcagccacgtcctggccatccgtaccctgcaggttttcacgcgagtcgttcgacatgcccctattgtttcaggatcgtgtcgtttgtgccgtaatggcgcgcgggagctaggggagtggagctggtgatgttgctcgaaacttactcacaatgtggcttgcgtcgcgtgttgtgtggtgatacgctgtaagcgattgattctcagtaagggtcgactcgttagcggctctgaatgctccaccgggcgtttcctcgcgaaacgcccggtattttgtgaaatgagcgcaaatgtgtgtgcagtgtgacaccatgtgtctatgattgattcctcagaaaatgttccgggtatccgctaccgggtcggcatcgacgtcggcctgaaatccattggcttttgcgcggtcgaggtcgatcgcaacgatcagcctgtcaggatgctgaactctatggtgttcatccacgatgctggcgtcgacccgaacgagaacaaggcagctaagagtcgaaagctcaccgccggtgtcgcccgccggacgcgtcgcctctaccgcacgcggcaccagcgcctcgtgaatcttgatcgtgttctgtccaaggaattcggctggcctctacccgatctcacttcctttaaggatcctcgagagccttggcatgtacgtgcccgtttgctggatgggtatatcccagatgagggcaagcgcaaggaagcgctctcgatcgcgttgcgtcatatcgcccgtcaccgaggctggcggaatccctacgcgaaggtggagacgctgctgcagccctccgaacctagtgacttcctgaagggcctcaacgagcgcatcagtacggcgctgcgcacgaccttctcagcggaggcgacccccggtcagctgatcgacgcctacctggcgcatcccgactacgtgggccgtgccggtactccgaagctcagaggcccccaggggatcctggctggcaaacttcaccaaagcgataatgcgcaggagattcgtcggatctgcgatgttcaaaggatcgaacccgcggaacgtgatcgtctgattcgcgttgtattcgaggcgaaatccccgaagggaagcgccaaggaacgcggcctcgtcggctacgacgaactgccgggacagggcagacacgtgcgcgccgagaaggcgcatcccgcattccagctgttccgcatggtgagtgtgctggcgaacctgcgcattcgtgagggacgcgaggaacgtcccttgactcccgacgaactccagggactcgttgacttcatcaatgaggtcagcctcaagcaggagatcacctggcaggacctggcagacaacctcggtatcgagcgttccgacctgcggggtacggcaaaggcgtccttcgatggctcgccggtcctgcgcaatcctccgaccgacgtgaccaccgagaagatcatggcctgcaaggtcaagtggctgaaggagtggtggaaggaagcggacgacgaacagcgtggctacatggtggacgcgttctcgaactccggtggatctgaggatgggaccgacgttaacgacgaggtcgccgagctgctcgagcaggcaactgaggatgatcagctcgagttcgagaagatctcgcttccgcagggacgagccgcgtattcgttggattccctgcgtcgtctcaccgacaggatgcttcgcgacggtgttgatctgcatacggctcggcgcctggagttcaacgtcggtgatgactggaagcccgccgtggagccgatcggcgcgccgacgggtaacccggccgtcgaccgcgttctcaagcaggtgagccggtggctgcatgctgccactgaacgttggggtgagccgacggtcatcaatatcgagcatgcgcgcgatgggcttgggtctgagcgggtcgctcgtgaactcatgcgcgagaacgagaagcgacgcaaggcgaatgcttcagctgtcgctgagatggctgcaaagctcaagctctctggaaaggtgcatcgctccgaccagattcgttacttcgccttgcaacggcagaactgccagtgcctgtactgcggagcgccgatcacgtatacgaccgcggaaatggaccacattgttccgcgtgcggacggttcatcgacaaacgaccgctccaacttggctgcggtgtgccgtacctgcaaccacatgaagggcaagattccctttgccgtgtgggcatcgtcagacaaagcgaatcagggagtgtccctgacgggtgcgctcgagcgcgtcaatatgtggcagcgcgataacggcatgtctcccaggcagctcaagcagctgcagcgcgaagtctgtgcgcgcctcaagtcgaagaagccggaccaggagttcgacggtcgatccatggaatccgtcgcctggatggctgtcgagctgcgcacccgcatcgaggggttctaccgcgtgcgagacgaggagtcggttccctcggtgggcgtctaccgaggacagctgaccgccgaggctcgtaaggcctcgggcttcgaaagccgcgtcaacctgatcggtggtcgaggcaagacccgattcgatcggcgtcaccatgcgatggatgcgctcgtcatcgcgctcatgaacccgtcggtgtcgcggacgctggcgctgcgactcaacatgcgcgacgcgcagcgtctgacgggcgttgaggaaacctggaagcatttctacgggaagcccggcgaggcatcgaagcgtttcgagtcctggcgagaatcgatgctgcgcggcgtcgagctcttcaacattgcgctgagcgacaatgcgatccccttcgttgaaaatatccgcttgcgcgttggttcgagcgtcattcatgacgcgaccgtgcgctcgttctgcccgccgaagaccccagacgggaagcaaaccatcacaaaggggcgcggtgagcagcatgcgctcggttctgccatgcccgtcgaactgattgatcgcgccgagaccccggccctgtggacggcactcacccggtgccccgacttcgacccgaagaagggcctgcccgagaacccacagcgcacgatctcagtgaacggaacccgcgtggggccgacggagctggtgaacttcttcggttcctctgccgcttgtctgaaggtccgcggcggatacgtggagctcgggagttccattcaccacgcgaggatctaccggatcgacggaaagaaaaacacatacgcgatggtgcgcgtcttccaagtagatctgctgcgcctcaaggatcgggatcttttcacgacgccgctcaagccgtcgaccatctcgatgcgaaccgcggaacctaagattcgcaaggcactggccgacgggacggcaacgcagatcggctggctggttgaaggcgacgagcttgtgattgacaccagcaagtattccaatggctttgttggagaagttctcgcacggtatccagaagcgaccagctggcgcgtggcgggtttcatgaatggtactcagttacgactcaagccgctactgctttccaaagaagggtttgttgatgagaagcaggctgagcgactcagtgtcgaaccaacttcagaagcaatcaaaaagactgctgatagtcctggttggcttcctgcggcgaatgtgctctttggctcaggtcaggttcgtgtcattcgccggaattgtctgggtgaggaacgctatcgttcttcggcttcgctccctgtatccatgatgctggagtgattccccatggcagagcagtggcgtgtcgttgacctgtccgctttcgaagggagcctgcgagcggtgcgaggtggcgtggaagtatgccctgaagaaggcatgtcgacggttctgcctgttgcagagctggctgtggtccttattggcatgaaggtcaacctgagcgccgctgttctccaccgtctgtctgaggcggatgttgcggtgctcttctgtgactggaggggcatcccagagggcggctgctactcgtggtcggatcacggtcgagtagcagcccgtcaccgggcgcaggcagaggtctcggtgccacggaaaaagaacgcgtgggcacgcttggttcgcgcaaaaatcgagggccaggcatccgttctcgagaacctgaagattcgaggcagcggcgagcttcttgcgcttgcggaccaggtgcgctcgggtgaccccggaaacgttgaggctcaggctgctcgtctctactggtcgcggacgctcggtcggggagtggggcgacagccagcggccggtcagctgattggtgccaacgcctgcctggactatggctacgcggtgcttcgtgggcatctcatgcgcgccgttctcgcagctggtctcgctccggcgctcggtgtgttccaccggggacgcgggaacgcgtttgcgctggccgatgacctgatcgagcctttccgacctgcaatcgacgaagtggcgctacctctccccgccacggcctccccgtcggatcgagaggtcaagcagcttctggtcgctgctgcgtcgcagcgttttgatgtggatggtcatgggattcctgctgtcgccgaggcgcttgctcagtcttttgggcgctatatcgaaggggatattgatcgccttcaggtggcgtcgtggcaggggccatcgcgggttggcgtgggtgactgagatggcggatgacgcgatgtggtgcttggtgatgttcgatctcccggtggaaacaaagaaacagcgtcgtgaggcgacgcgtttccgtaacgatctgctggattgggggttctgtatggttcagttcagcgtgtacgtgaagtactggccgacgggtgggcaggaccatgcaacgctgagagcaatcaagactcatctgccggagggcgggcaggtgcgggtgcttgctctgacggatcgacagtgggcgacggggcttcgttttgataatgcgaagccccggaaggaggctggagcacccgaacagctcatgattttctaaccaaaaaccccgagttttcggctattttctgccgaaaaatcggggttctcagtgtatcaaaggggattggtgattgattcccagcacaactgaccatttctgagagtcaagcccagtgtatcaaaggggattggtgattgattcccagctcgcgcctcgcgagaccggcatgcgtcacagtgtatcaaaggggattggtgattgattcccagccgggccatcctgacgggatcgacgcaggcagtgtatcaaaggggattggtgattgattcccagccccatcagcccgccgcgctggtcttctgcagtgtatcaaaggggattggtgattgattcccagcggcaaaaatgaagggaaggtccttcccccagtgtatcaaaggggattggtgattgattcccagcacgagggcacggaggacacggcccacggcagtgtatcaaaggggattggtgattgattcccagcgccgtcgcggctgaccgtatcctggcctcagtgtatcaaaggggattggtgattgattcccagcgcagttatacagggtgcgtggattcttccagtgtatcaaaggggattggtgattgattcccagccggcagcaggaccgtctgccatgaccatcagtgtatcaaaggggattggtgattgattcccagccgccgaccgcgtacgggatcgtgcgcctcagtgtatcaaaggggattggtgattgattcccagcagggcgtcgcgggtcagctcggcgagggcagtgtatcaaaggggattggtgattgattcccagctcgctgcccttggacgcgtaacgctcgacagtgtatcaaaggggattggtgattgattcccagcgtcgcgtcgcagcgtcttcgcgtggcggcagtgtatcaaaggggattggtgattgattcccagcggttaacgtggatgtcggtagggttaaccagtgtatcaaaggggattggtgattgattcccagctcaaccattagcggggcgatgtcgtcaacagtgtatcaaaggggattggtgattgattcccagcacaggccgtcgtggcagctgacccgcaccagtgtatcaaaggggattggtgattgattcccagccaccgccggatgcccaccgttccagatgcagtgtatcaaaggggattggtgattgattcccagcttgcatggctcgcgggatcgcatgcgtacagtgtatcaaaggggattggtgattgattcccagcacccccgagcctaccccggcgccgcacgcagtgtatcaaaggggattggtgattgattcccagcttgagacctacgatctcccctacgagcccagtgtatcaaaggggattggtgattgattcccagctgggccgcgcgccccacttcttcgctgacagtgtatcaaaggggattggtgattgattcccagccagcggcgtcacgggacgggggcaggaccagtgtatcaaaggggattggtgattgattcccagccgctgcatgcgctcacagaggaggccctcagtgtatcaaaggggattggtgattgattcccagcaagcgtcgagtcgccatctactacaccacagtgtatcaaaggggattggtgattgattcccagctggtctgcaggtaatcgccgaagtttgccagtgtatcaaaggggattggtgattgattctcagcgcgggcatgtccgcctacaccctcaccgcagtgtatcaaaggggattggtgattgattcccagcgctgatactcagcctcaaaccgcaggaccagtgtatcaaaggggattggtgattgattcccagcgatggcgagctgtgcattggtgtgccaaagtgaggatgcttagaagagtacaacggtagttctgatcgattctgcagtataactatgatgatagcggtgaatttagtgagtggaacggatccgaatacctggatgatccgacgaactagtatcctaggaactaattttctgagcgctgcggaagctgctttcattggttggatgtctgatgtgcttgtggtcgctcgtatctgtgtctgactagactttctagttgtgtttccttggttgtaggagtgcgatagaaggagtagcttaggggcaagcgttcaactgcgcttccataatctgcctgagctgtgtgatgtttgcacagatcagacggtgtgttccccgcgtaagcagggatgatccgctctcgttgagactgttcttcccgtgggccaggtgttccccgcgttagcagggatgatccccgggattcgaacgcgatcaccgtagccgacgggtattccctgcgtgagcagggatgagtccttctcggaatagcggcacggcacgcatgagggtggcagccagcccacctgggagtgatccccgggcaggtgggtcaccctcgtcgcgttatgcgttttcacgtggagggggatcgcagggctactggcggtagcccgggtggagagggaggggttgcaggggcgacgccttcccggattcgctcaaatcgcagaccacctcacccacaacagcccatttttgccgtttttcggcgaggtggtctgcactttgggcggcacttcccttatgagagtcactcgtgccggtgatacgccgattcgacgcttctcatgccaccacgaccccaaaccacccagacaccgggtaccacagggcacgagagtgcagctccagtgcccaatggcggccaggttcaaagctgatgccccgtggccacagtgcaaacaacgagcggagcgccagaccgcgcgtgggcctgacatctagcgacacaacacggcaacaccatgtgtccaatagcccgttttccatgcccacgcggggaagatc

SEQ ID NO: 4366 - DNA, 10592 bp, synthetic construct
  misc_feature 1..10592: note = Synthetic
  source 1..10592: mol_type = other DNA
gacgaggtcgttgccggtgttgttgtgggccgggctgttggcgctgttggcgggcgtgatgagggggccgtcggagacgagggtttcctgcgggtccagtgcgccgtcctcggtgagcgtggctgctgcttcctgctcggagggtgcgccgacctcgtcgagggcgctgagcgtctcctcgaacgacggggcggacatctcggcgagcgcgtccgccatcgactgggcgggcgtctgcggggtagccatgtgcatggcggcttgctcgccagcttgctcggcggcggccgtcacgtcggccagctcctggctatccgaaccgtgcaggttttcacgcgggtcattcgacatgcccccattgtttcaggatcgtgccacttgtgtcgccatggcacgcgggagtgggtggggtggcatctccgaaaaatcctcgcggatgtggcttgcatctctgagattgaggaggtatcatgactcatgatcaattcttagtaagggtcgactcgttagcggctccgaatgctccaccgggtccttctccgcgaagggcccggtaattttttaaaacggacgcaaatgtgtgtgcggtgtgacactatgtgtccatgcttacttcctcagaaaacattccgggtatccgctatcgcgtcggtattgacgtcggcctgaaatctattggcttctgtgcggtcgaggtcgatcacaacgatcagcctctgaagctgctgaattccatggttttcatccacgacgctggcgtcgatccgaatgagaacaaggcggcgaagagtcgaaagctgacggccggtgtcgcccgtcgaacgaggcgcctctaccacactcgccgtcagcgattggcaaatctggatcgtgttctctccaaggatttcggatggccgctgcctgaccaggccacattcaagtatccgacagagccatggcatgcacgggcacgtcttgtggagcgctacgttgcggatgatgaggatcgtaaagcttacctatcgatcgctttgcgacacatttcccggcaccgcggctggcgcaatccctacgccaaggtggagacgttgctgcagcccgccgagccgagtgagtttctcaaaggactgaacgaacgaattagtgcctccctcggtaggagcttcccggctgatttgacccccggtcagctcgtggatgcgtaccttgctcaccccgactatgtgaaggcccctggtacgccgaagctgcgtggccccgagggtattctcgagggtaagctccatcagagcgataatgcggaggaaatccgccggatctgcgacgtgcagcggattgatgctgtggaccgtgatcgactcattcgagccgtttttcaggcgaagtcccccaaggggagcgcgaaggagcgtggcctcgtggggcacgatgagctgccgggtcagggtaagcatgtgcgtgcggagaaggcgcatcccgccttccagaagttccgcatcgtcagtgtgctggcgaacctgcgtattcgcgaggggcgcgcggagcggccgctgactccggaggagctgcaaggtctgactgacttcctgctgattgctggcctcaaacaggaggtcacctggcaggatctggcggataacttgggaattgagcgttcggatctgcgtggcaccgcgaaggcctcgttcgatgggtcgccggttctgcgcacccctccgactgacgtcaccaccgagaagatcatggcctgcaaggtcaagtggctcaaggattggtggaaggacgcggacgatgagcagcgcggctactttgtggacgctttctcgaactcaggcggttccgaagatagtggcgatgtgaacgatgaggtcgcggagctgctcgagcaggcgacagaggatgaccagctcgagtttgagaagatctcacttccccaggggcgagcggcatactcgctggactcactacgccgcctgacggacaggatgctgcgtgatggcgtagatctccacactgcgcgtcgcctggaattcaatgtcggagacgactggaagcctgcagtggagccgatcggtacgccgacgggcaatccggccgtcgatcgcgtgctcaagcaggtgagccgatggctgcatgcggcgaccgagcgctggggcgagccgacggtcatcaacatcgagcatgcgcgtgacggtctgggatcggagcgtgttgcccgtgagctcatgcgtgaaaacgataggcggcgcagtgcgaacgctgcggccgtcgctgagatggcggcacagctgaagctctccggtagggtgcgtcgttccgaccagatccgctacttcgcgttgcagaggcaaaacaatgagtgcctttactgcggcactgaaattacgttcacgacggcggaaatggaccatattgttccgcgtgcggatgggtcctcaacgaacgatcgcgccaacctggctgcggtgtgtcgtacgtgtaaccacaagaagggggccgttccgtttgccgcgtgggcgtcgtctgatcgggcgaatacgggcgtctccctgaagggcgctcttgatcgtgtgaagttctgggtgcgcgataacggcatgtcgcccaagcagttcaagcagctgcagcgcgaggtgtctgcccgtctcaagtctcgtaagccggacgaagagttcgatggtcgctccatggagtctgtcgcatggatggctgttgaactgaggactcgtatcgagggcttctaccgcacgcgtgacgaagagtccgtgccctccgtgtgtgtttaccgtggccagctgacggcggaggcccggaagtcctcgggcttcgagagccgagtcaacctgattggtggccgaggcaagactcgtttcgacaggcgtcaccacgcaatggatgcgctcgtcatcgcgctgatgaatccgtcggtgtcctgcacccttgccttgcgcgtgaacatgcgcgatgctcagcgcctcgcaggacgcgaggagacatggaagaacttctatgggaaaccgggagaagcctcgcgtcgcttcgaatcctggcgtcaatcgatgttgctagcatctgagctcttcaacagtgcactgtctgcaaacgcaattccatttttagagaataagcgcctacgggcaaactcgagcgcaatgcacgaggccacgcagttttctttctctcatgcgaagccgatcaaaaagggatcgaagatattgaaggaaaagggagagcaaagaatgttaggagctgcgatgtccgttgatttgattgatcgggctgaaactccggctttgtggaccgctcttacgcgatgcccagacttcgatccgaaaaatgggcttcctgcgaatccggagcggacgatcacggtgaacggtacgcatgtagggccgacggagctgctgaacttcttcggatcgacatcagcatgtctcaaggtgcgtggtggctatgtcaagcttgcgaactcaattcatcatgcaaggatttaccgtatcggtggcaagaagacaacgtatgcgatggttcgcgtcttccaggtggacctcctgcatctgaaagacaggaagctattgaaagatgggaatctatttgaggcgccactcaagccttcgtcaatctcgatacgtacagctgataagaaaattcgtcgggctttagctgaggggacggccaagcagatcggatggttagttgaaggtgatgaactgcaaatcgacactagtaagtataccggcgggcttatagaagacgttctcacgcagtatccagaagctgtgagctggcgtgtagcaggttttgctgataagtccaagctacggttgcgcccgtatcttctttccgctgaaggactagatgaggatgccccccaggggatgaaggagcttcttgaagggaggggatggcgccctgcggtgaatgttctatttagtccacgatcggtggtggttgtccgtagaaactgtcttggtgaacaacggaagcgcctcgatagcggcctgcctattactgaagttttgcgatgagctatggcagagcaatggcgtgtgattgacctgtgtggattcgagggtgaacttcgatcgatacgcggtggggtcgaggtgtgccccgaggaaggaccgccaacgactattcccgtcgctgaggtggcagttgtcctggtgggtatgaaggttgctctcagtgccgctgttctgcatcgtttagctgaggccgatattgccatactcttctgtgactggaggggaatcccggagggtggctgttactcatggtcagatcacggccgggtagcagcccgccaccgagctcaggcggaggtatcgctgcctcggaagaagaacgcatgggcgcgtttggttcgcgcaaagattgaggggcaagcatcggttctggaaaacctcaagattcggggtagtggtgaactactcgctctcgcggatcaggttcggtcgggtgacccaggaaatgttgaggcccaggcagctcgcctgtattggtcgcgcaccttgggcaagggcgtggggcgtcagccagcagccggtcagctgattggttcgaatgcctgcctggattatggctattccgtgcttcggggacatctgatgagggctgttcttgctgcggggttggctcccgccttaggagtgttccatcgtggccggggcaatgcgtttgccttggccgacgacctaatcgaaccttttagacccgcgattgatgaggttgcattgcagttgcccccaaccgcatctccttcggatcgttcggtgaagcaactactcgtggcggctgcgtcgcagcgcttcgacggggatggccacggtgtcccagctgttgccgcggccctggcccagtcgttcggtcgctacgtggagggtgacatcgatcgcctcaatgttttgtcgtggcagggaccgtcggtcgtgggcatgggagattgaaatggcggacgatgcaatgtggtgtctggtcatgtttgatctcccggtggagacgaagaagcagcgtcgcgaggcgacgcgctttcgtaatgatctattggactggggcttctcgatggtgcagttcagtgtgtatgtgaagtactggccaaccggtgggcaggatcatgcaacattgcgggcgatcaagtcacacttgccggagggtgggcaggttcgggtgttggcgttgacggatcgacagtgggctacggggcttcgttttgagaacgcgaagcctcgggaagagcccggctcgccggagcagctcatgattttctaacgaagatcccctggttttccgctatttttcaggaaaaaccagggggtctaagtgtatcaaaggggaatcacgattgaatcccagcggtgatttcggggggcggggcggggatgaagtgtatcaaaggggaatcacgattgaatcccagcgcttacggaaccgcctaccgccgttgggaagtgtatcaaaggggaatcacgattgaatcccagccgggtcgggcgcgcggcggtctcggcttaagtgtatcaaaggggaatcacgattgaatcccagcgcttgatggcattaaggaaggctacctgaagtgtatcaaaggggaatcacgattgaatcccagctgacagtgcgagacttggggccgccgctaagtgtatcaaaggggaatcacgattgaatcccagccctcgaggccgcgatcaccggcgggctcaagtgtatcaaaggggaatcacgattgaatcccagcctttgggtgagcatgtctcggtcgacgaaagtgtatcaaaggggaatcacgattgaatcccagcgatgctgagacgggtgagccgtcgctgcaagtgtatcaaaggggaatcacgattgaatcccagcgaaggaggtgtgagtctgtgattattgtaagtgtatcaaaggggaatcacgattgaatcccagctccactttcgattagccatgctgtgcctaagtgtatcaaaggggaatcacgattgaatcccagcttgtgggttagcttgcatcccgttaatgaagtgtatcaaaggggaatcacgattgaatcccagccaccgggtgacagcgactaggccagcgaaagtgtatcaaaggggaatcacgattgaatcccagcttgccgccgggcagcgcagcgccacctaaagtgtatcaaaggggaatcacgattgaatcccagcccacctggacgggggcactgatcgtcgcaagtgtatcaaaggggaatcacgattgaatcccagcccacctggacgggggcactgatcgtcgcaagtgtatcaaaggggaatcacgattgaatcccagcctcccgcgtcgcacggctctttggtatcaagtgtatcaaaggggaatcacgattgaatcccagccgagggcttccgtgatcttgtctgcgaaaagtgtatcaaaggggaatcacgattgaatcccagcaccagatcacccgcgccgacctcgacacaagtgtatcaaaggggaatcacgattgaatcccagccggctcgtcctaaaccgtgcgacgcaataagtgtatcaaaggggaatcacgattgaatcccagccgcgggtcagggtgaggtcgagtgtccaaagtgtatcaaaggggaatcacgattgaatcccagcttgtctttccagtggggccgcgaaaccagaagtgtatcaaaggggaatcacgattgaatcccagcgctgtcctacctagggatcaaatcgccctaagtgtatcaaaggggaatcacgattgaatcccagctgatgcgctcctggatcgtcgtcgcagaaagtgtatcaaaggggaatcacgattgaatcccagcgcctgcccgtcgatctccaggcgacgctaagtgtatcaaaggggaatcacgattgaatcccagcgcacgaatctttgcccgaacccctctttaagtgtatcaaaggggaatcacgattgaatcccagcggatggttcgtcttcctcagcgtctaccaagtgtatcaaaggggaatcacgattgaatcccagctggacgtgaactccatcggggcactcgcaagtgtatcaaaggggaatcacgattgaatcccagcgtagccaagcggcgatctgcgcgagcataagtgtatcaaaggggaatcacgattgaatcccagcgctaagcgcgtcggcgtgtccgtgcctcaagtgtatcaaaggggaatcacgattgaatcccagctgcgctcgctctgtccggcggcgaagccaagtgtatcaaaggggaatcacgattgaatcccagcagaagggcgctatggtggcgggcaaggtcaagtgtatcaaaggggaatcacgattgaatcccagcctcaatggtgatgatctgtgcctgtgcgaagtgtatcaaaggggaatcacgattgaatcccagcacggttgttcgcaccgtgtttcaggttgaagtgtatcaaaggggaatcacgattgaatcccagcccgccgacgcgtcgtcgccgtccgtagtaagtgtatcaaaggggaatcacgattgaatcccagcttctggcacttctcatcgtgtcgatcctaagtgtatcaaaggggaatcacgattgaatcccagcgggcgcgggcgcgggcgcgtcggcgagggcggtgaagtgtatcaaaggggaatcacgattgaatcccagcgggagacctcaaaccgcgccgcccgtctaagtgtatcaaaggggaatcacgattgaatcccagccacgtccgggtagttacgcagcgacttaaagtgtatcaaaggggaatcacgattgaatcccagctgaagctcgtaggtgatgagcttgccgtaagtgtatcaaaggggaatcacgattgaatcccagcgcgtcgttgtagactctgccgacgtcgcaagtgtatcaaaggggaatcgcaattgaatcccagcaatcccgaggttgtaggttcgagtcctgaagtttatcaagggggaattacgattgaaacacggtgtcgctacgagagcttgtaggtctcaagaagagtataagagtataaaaggggattggtgattaatttccaggtgtgcatcgattgtgaattgtgctatcaaattgagcatacaaaatgctcctgaacatagttcgggagcaaatgaggcgagaggatatcatggtacatggggtctttacagcctgaagctgaaggcagtcccacacccgaagtcgctgctgcaacttcctttgaacgtgctgttaccagacgtcctaccgtatcctctcgctaggccgatattagcctaaaagctgggtttcggtcaaggaagacgtgaacaacgctctcttgctgacaccggttgatcagagtttcccctctgagcaggggcgattcatcctcgaaatagtgataaggtgcgtacgagggtggcagccagcccacctgggagcgatccccgggcaggtgagccaccctcgttacgttttcctcattgagtgggtttgaggcagtgtggaacgcagctgtgagaatggcatgagcagtgacgatcagaatcgttctgctgcgcctcgggcacgcacccgcggccggttgaccagaacgcctgcaaaaagtgaggagcgaggcccattgcccggacgttctgacggtctattatttcaagactagtccaggggggattcccgctccgaagcccagtctagacatgctccaagtgattggacgcggaaagggcagcgattggatgaggcgtgaactgggcaaacagatgccgagactgcccgcctcggcgttgcctcgtgacgccgcgtccgcctcgtctaattctcggaatcaaccatggggttacgcagcaaggctatactggcccggacaaaggagttctcatgccagatacgcccctgcaagccctgtcgaacgcgcaaacgatccgcgaattgaaggggcgcagcaccgtcgccttccccgacacgtactgcgtgattgacgtcgagaccacgggacgcagtccccagtgggaccacatcatcgaagtcgcggccgtcaaaatctcgggcggccaggaggttgggcgctttagctcgttgattcaaccgccgagcatgccgggcggggccttcgtcgacgacttcatcgaggcactgacgggtatcaccgatgagatgctcgcaggagctccatttgctcccgacgtgctcgaggagttcgcggcctttgttggggatgtgcccatcgttgggcattgcgtcagcttcgacatcaacttcctctacgattccttcgaccgctacctggaccggccgttctccaacgactacattgacaccttgcgtctcgctcgaaagctgcatcccgagatggctcaccatcgcctggccgatctcgtgcagctgttcgatgtcgcgcacaacgacgctcaccgcgccatgggtgacgtcgaggcgaccgcccagtgtttcgcacgcctcaaggctgaggccctcgaacgtcacggaagcgaagagggatttcaagaactattccgttcgatgcgcacgcggcgtcgcatggtgtctgaaggacgtcacacgggcggcagtcacagcgtcaaggccgccgatattcacggcgacgcccagaaaatcgacgaagacagcccgatcttcgggtgcgcctgcgtcttcacgggcaagctcgagaaattcacgcgagctgaagccatgcagatcgtcgccgacctgggaggcatcaaccaagacggtgtcaccaagacgacgcgctatctgatcctcggcaacaacgactactgcgccagtatcaaagacggcaagagcaacaaacagaagaaggctgaaaagttggcccttaagggttctgggatcgaaatcctcccggagaccgctttctacgacatgctcggcgaggaactcctgagggaccactaggggtttcctcgcgtatgactgtgcctcgacctcgtcaatacgaggccggggctcttgccgggcagcacattgactggcgtcatcttgttcgcttagctctgttagtggtgtaggccgcgcattccgccttgctgtcgggatcatggagcgtgacgtgttgacgacggggggtgggtgggggttttgcactacacgaagccctcttgcggcgtgtcgccggcgtgtcggaggcttgtgtagtgcaattcccccgattggtagtagctcgacccgctcgtagtagaggacgggaggcttgtgtagtgcaattccccccgattggtagtggtggggtcgcgccgtggggtctaggagtctcgggtctccggaaatttcgcacgtaattcccttgagggtgcttcaaaccttgaatgagcactgttggaatcgcaacgttttctgacgtgcttgaaaaatgaccgttggaaattatgtgcgaaatttgtctggtgaggtgtgttggtcgcgcgtgtgtccctagatgtgcgcgttaaccccttggtgcgcgcgttaacccctagatatgcgtctgggcggcgctgcctgcgcgcacatcgtcgggttaacgtgcgaggtgagcggccccgtcccaggcaaaaaaaagccccgaagcgaatgcttcggggacttgctggtggctccgaccggcgtcgatccggtgacctttcgat

SEQ ID NO: 4367 - DNA, 9702 bp, synthetic construct
  misc_feature 1..9702: note = Synthetic
  source 1..9702: mol_type = other DNA
catgcccccattgtttcaggatcgtgccacttgtgtcgccatggcacgcgggagtgggtggggtggcatctccgaaaaatccttgcggatgtggcttgcgtctctggaggtggagaggtatcgtgtacccacgattgaatctcagtaaggaccgcctcgttagcggttccgaatgctccactgcattgcagtaacaccgggtccttctccgagaagggcccggtaatttttttaaagcggacccaaatgtatgtgcggtgtgacactatgtgtcccatgactacttcctcagaaaatgttccgggtatccgctaccgcgtcggcattgacgtcggcttgaactccattggtttttgtgcggttagagtcgacctccatgatcggcctcttgaactattgaactctatggtgtttgtccatgattccggggttgatccaaatcaaaaggacaagcatgacacgcggaagtacgtggggggcgatgcgcgccgaactcgtcgtctctataaggtcagacgacagagactcttcaaccttgacaagctgttgagtagagaattaggttggccgctacctgaaatggcttctttcgatgaccctcacgaaccctggcatgttcgagcacgcctgctggatggctacatccccgaggaaggcaagcggaaggaatggctatctattgcgatgcggcatatggcacggcataggggctggcgcaacccctacgccaaggtggaaacgttgctgcagcccgccgagccgagcgacttcctcaaggggctaaacgatcgcatcagtaagtccctcggcaagatttttccggctgatgcgacccctgggcagcttgtggatgcatacctcgctcaccccgattacgtgaatagggccggcacgcccaaggtgcgtgggcctgagggtatcctcgcgggcaagctccaccagagcgataacgctggggaaattcgccggatctgtgagatgcaacggattgatccgtcggtttgtgaccggctgattcgcgctgtcttcgaagcgaagttcccgaaaggagcgcgtcgcctggtagggcatgatgaactgccggggcagagccggcatgttcgtgctgaaaaggcgcaccccgcgtttcagaagttccgcatcgtcagtgtgctggcgaacctgcgtattcgtgaggggcgtacagagcgaccgctgactccggaggaactgcagagactgactgacttccttttgattgctggcctcaagcaggaggttacctggcaggatttggcggataagctcggtatcgagcgttcggatctgcgtggaactgcgaaggcctcgttcgatggagcgccggtcctgcgtaatcccccgaccgatgtcaccgccgagaagatacttgcctgcaaggtcaagtggctcagggagtggtggaaggatgcagatgctgagcagcgcggctacttagttgatgccctttcccattctggtggctcggaagatgaagctgacactaatgatgagattgcggaactgcttgaacaggcaactgcggaagagagagtagcgtgtgaagaggtatcgctgccccaggggcgagcggcatactcgctggactccctacgtcgcctgaccgacaggatgctgcgtgacggcgtagatctccacaccgcacgtcgcctggaattcaatgtcggagacgactggaagcctgcagtggagccgatcggtgcgccgacgggtaaccccgcagtcgatcgcgtgctcaagcaggtgagccgatggctgcacgcggcgaccgagcgctggggtgagcccacggtcatcaacatcgaacatacacgcgaagggctggggtcggagaaagtcgctcgcgagctgattcaagcgaataaacgtcagcgcaaatctaatatcaaagctgctgaagagattgcagcgaggctgaaactatcaggaagagttcggcgttcagaccgaatccgctactttgcgttgcagaggcaaaactgtcagtgcctctactgtggtaccgacattacgtttatgacggcggaaatggatcacatcgttccccgtgcggatggctcctcgacgaatgaccgctccaacctggctgcggtgtgtaggacatgtaaccacatgaagggagctaatcccttcgccgtatgggcctcgtccgaccgggcgaacgcgggcgtctccctgaagggcgctctagagcgtgtgaagttctgggtgcgcgataacggcatgtcatccaagcagttcaagcagttgcagcgcgaggtgtcggcgcgtctcaagtctcgtaagccggatgaagagttcgatggtcgctccatggagtcggttgcgtggatggctgttgaactgaggacgcgtatcgaaggcttctaccgcacacgcgacgaagagtctgtgccttccgtgggcgtttaccgtggtcagctgacggcggaggctaggaaagcgtcgggctttgagagtcgagtcaacctgattggcgggcgaggcaagactcgtttcgacaggcgtcaccacgcaatggatgcgctcgtcatcgcgctgatgaatccgtcggtgtcctgcacccttgccttgcgcgtgaacatgcgcgatgctcagcgcctcgcaggacgcgaggagacatggaagaacttctatgggaaaccgggagaagcctcgcgtcgcttcgaatcctggcgtcaatcgatgttgctagcatctgagctcttcaacagtgcactgtctgcaaacgcaattccatttttagagaataagcgcctacgggcaaactcgagcgcaatgcacgaggccacgcagttttctttctctcatgcgaagccgatcaaaaagggatcgaagatattgaaggaaaagggagagcaaagaatgttaggagctgcgatgtccgttgatttgattgatcgggctgaaactccggctttgtggaccgctcttacgcgatgcccagacttcgatccgaaaaatgggcttcctgcgaatccggagcggacgatcacggtgaacggtacgcatgtagggccgacggagctgctgaacttcttcggatcgacatcagcatgtctcaaggtgcgtggtggctatgtcaagcttgcgaactcaattcatcatgcaaggatttaccgtatcggtggcaagaagacaacgtatgcgatggttcgcgtcttccaggtggacctcctgcatctgaaagacaggaagctattgaaagatgggaatctatttgaggcgccactcaagccttcgtcaatctcgatacgtacagctgataagaaaattcgtcgggctttagctgaggggacggccaagcagatcggatggttagttgaaggtgatgaactgcaaatcgacactagtaagtataccggcgggcttatagaagacgttctcacgcagtatccagaagctgtgagctggcgtgtagcaggttttgctgataagtccaagctacggttgcgcccgtatcttctttccgctgaaggactagatgaggatgccccccaggggatgaaggagcttcttgaagggaggggatggcgccctgcggtgaatgttctatttagtccacgatcggtggtggttgtccgtagaaactgtcttggtgaacaacggaagcgcctcgatagcggcctgcctattactgaagttttgcgatgagctatggcagagcaatggcgtgtgattgacctgtgtggattcgagggtgaacttcgatcgatacgcggtggggtcgaggtgtgccccgaggaaggaccgccaacgactattcccgtcgctgaggtggcagttgtcctggtgggtatgaaggttgctctcagtgccgctgttctgcatcgtttagctgaggccgatattgccatactcttctgtgactggaggggaatcccggagggtggctgttactcatggtcagatcacggccgggtagcagcccgccaccgagctcaggcggaggtatcgctgcctcggaagaagaacgcatgggcgcgtttggttcgcgcaaagattgaggggcaagcatcggttctggaaaacctcaagattcggggtagtggtgaactactcgctctcgcggatcaggttcggtcgggtgacccaggaaatgttgaggcccaggcagctcgcctgtattggtcgcgcaccttgggcaagggcgtggggcgtcagccagcagccggtcagctgattggttcgaatgcctgcctggattatggctattccgtgcttcggggacatctgatgagggctgttcttgctgcggggttggctcccgccttaggagtgttccatcgtggccggggcaatgcgtttgccttggccgacgacctaatcgaaccttttagacccgcgattgatgaggttgcattgcagttgcccccaaccgcatctccttcggatcgttcggtgaagcaactactcgtggcggctgcgtcgcagcgcttcgacggggatggccacggtgtcccagctgttgccgcggccctggcccagtcgttcggtcgctacgtggagggtgacatcgatcgcctcaatgttttgtcgtggcagggaccgtcggtcgtgggcatgggagattgaaatggcggacgatgcaatgtggtgtctggtcatgtttgatctcccggtggagacgaagaagcagcgtcgcgaggcgacgcgctttcgtaatgatctattggactggggcttctcgatggtgcagttcagtgtgtatgtgaagtactggccaaccggtgggcaggatcatgcaacattgcgggcgatcaagtcacacttgccggagggtgggcaggttcgggtgttggcgttgacggatcgacagtgggctacggggcttcgttttgagaacgcgaagcctcgggaagagcccggctcgccggagcagctcatgattttctaacgaagatcccctggttttccgctatttttcaggaaaaaccagggggtctaagtgtatcaaaggggaatcacgattgaatcccagcggttcggttaggtcggctggtatatttcaagtgtatcaaaggggaatcacgattgaatcccagcggtcgcgtggacgggcacggccccgccgaagtgtatcaaaggggaatcacgattgaatcccagctcgccgccgggcagcgcagcgccgcctaaagtgtatcaaaggggaatcacgattgaatcccagccgtcaagtagcagacgttgccctcgaacaagtgtatcaaaggggaatcacgattgaatcccagcggtaggtcatataggagggacggtacttaagtgtatcaaaggggaatcacgattgaatcccagcgaggggatgcgacgtccgcgcaggaaacaagtgtatcaaaggggaatcacgattgaatcccagcacagcaacatcttcgagaacgatggtacgaagtgtatcaaaggggaatcacgattgaatcccagcgtcacgttgtcaaggtgtcagtagtcgcaagtgtatcaaaggggaatcacgattgaatcccagccagtctcacatatccctagttgcatagcaagtgtatcaaaggggaatcacgattgaatcccagcgtgttcacgcccgcgctccgccgcatcaaagtgtatcaaaggggaatcacgattgaatcccagcgtgttcacgcccgcgctccgccgcatcaaagtgtatcaaaggggaatcacgattgaatcccagcttctcgatcagtccttccgcttcgagctaagtgtatcaaaggggaatcacgattgaatcccagcacgccttccatgagtagattgaggtcgaaagtgtatcaaaggggaatcacgattgaatcccagcagcagaattctgcttttgttactgcggcaagtgtatcaaaggggaatcacgattgaatcccagcaccactgcgcggccagccagatctccgcaagtgtatcaaaggggaatcacgattgaatcccagctggcgctgggggcgctggcgtggtgggcaagtgtatcaaaggggaatcacgattgaatcccagcgtactcctgcgcagcgggccgccgcctgaagtgtatcaaaggggaatcacgattgaatcccagcccgcctgcacgcgggcatgggcctcacgaagtgtatcaaaggggaatcacgattgaatcccagcacggtggtgcgtacggtgtttcaggttgaagtgtatcaaaggggaatcacgattgaatcccagcttttcgcccgcgtggcagcgtcgcgtataagtgtatcaaaggggaatcacgattgaatcccagcctggcgggtctgcgtgaacggtcccgttaagtgtatcaaaggggaatcacgattgaatcccagcctgcggccgcgatcctacccccgacggcaagtgtatcaaaggggaatcacgattgaatcccagcggacggcgacggcaccgtgaagcccgccaagtgtatcaaaggggaatcacgattgaatcccagcctcggctggcggggatgctcgtcgaagaaagtgtatcaaaggggaatcacgattgaatcccagccccaccgccatgccccactcgcggcgataagtgtatcaaaggggaatcacgattgaatcccagcggtaccgcatcgagagtctgcccgagggaagtgtatcaaaggggaatcacgattgaatcccagcgcgtcgatccgtgagggcggcgacggcaaagtgtatcaaaggggaatcacgattgaatcccagccggacacctggtgctggttgtagatgacaagtgtatcaaaggggaatcacgattgaatcccagcgggaggagtgggagcgacagtgcgatgtaagtgtatcaaaggggaatcacgattgaatcccagctcctccaacgcggacaggaccgaggcggaagtgtatcaaaaggggaatcacgattgaatcccagcgcacaacggcaaaggcttcaacaattgaaagtgtatcaaaggggaatcacgattgaatcccagctacataacccacgtccggcgtgccctcgaagtgtatcaaggggaaccacgattgaatcccagcttactagaaagagagtgagtgtgataataagtgtatcaaaagggaatcacgattgaatcccagcgggcgaggatgcgccacgtgtcggtgataagtgtatcaaaggggaatcacgattgaatcccagctctcgatgaatgacctcacgtccgcgacaagtgtatcaaaaggggaatcacgattgaatcccagcatgggcctacgcgattatccacgacggcaagtgtatcaaaaggggaatcacgattgaatcccagcgcgtcgttgtagactctgccgacgtcgcaagtgtatcaaaggggaatcgcaattgaatcccagcgctggcgagcttgcccgccgcgtgggggaaagtgtatcaaaggggaatcgcgattgaatcccagcaatcccgaggttgtaggttcgagtcctgaagtttatcaagggggaattacgattgaaacacggtgtcgctacgagagcttgtaggtctcaagaagagtataagagtataaaaggggattggtgattaatttccaggtgtgcatcgattgtgaattgtgctatcaaattgagcatacaaaatgctcctgaacatagttcaggagcaaatgaaagcgagaggatatcttggtacatggggtctttacagcctgaagctgaaggcagtcccacacccgaagctgctggagtagcttcctttgaacgctctgttaccagacgtcctaccgtatcctctcgctgcgtcgatactagtctcaaggttggtttcggtcaaggaaggcatgaatagcgctctcttgctaacaccggttggtcaaagttgtccctgtgagcagggggagtcgttctcgaaacagtgatagggcgcgtatgagggtggcagctagcccacctgggagtgatccccgggcaggcgggccaccctcgttacttttcccccatggagtggggttgaggccgtgtggaacgcagctatgagaatggcatgatcggtgacgatcagaatcgcgcggtcgcgtcctcaagcgcgccgacccgcgacggattgatcaaagcgcctgcaaaacgtgaggagcgaggcccattgcccggacgttctgacggtctattatttcaagactagtccaggggggattcccgctccgaagcccagtatagacatgctccaagtgattggacgcggaaagggcagcgattggatgaggcgtgaactgggcaaacagatgccgagactgcccgcctcggcgttgcctcgtgacgccgcgtccgcctcgtctaattctcggaatcaaccatggggttacgcagcaaggctatactggcccggacaaaggagttctcatgccagatacgcccctgcaagccctgtcgaacgcgcaaacgatccgcgaattgaaggggcgcagcaccgtcgccttccccgacacgtactgcgtgattgacgtcgagaccacgggacgcagtccccagtgggaccacatcatcgaagtcgcggccgtcaaaatctcgggcggccaggaggttgggcgctttagctcgttgattcaaccgccgagcatgccgggcggggccttcgtcgacgacttcatcgaggcactgacgggtatcaccgatgagatgctcgcaggagctccatttgctcccgacgtgctcgaggagttcgcggcctttgttggggatgtgcccatcgttgggcattgcgtcagcttcgacatcaacttcctctacgattccttcgaccgctacctggaccggccgttctccaacgactacattgacaccttgcgtctcgctcgaaagctgcatcccgagatggctcaccatcgcctggccgatctcgtgcagctgttcgatgtcgcgcacaacgacgctcaccgcgccatgggtgacgtcgaggcgaccgcccagtgtttcgcacgcctcaaggctgaggccctcgaacgtcacggaagcgaagagggatttcaagaactattccgttcgatgcgcacgcggcgtcgcatggtgtctgaaggacgtcacacgggcggcagtcacagcgtctggcctggtctggttttgtggaccgggtgttttgagggttgttggttgttattggtggtgttgtgcccattggcgtgcgtattggttgggtgagagccagcccagcgcgctgtgggggtgctcttcattgtagcgctgggaccaagcaccgatcagggcgcgcgcatggtcgaggccctcgaacatgttgtcctccaggagttcatcacgcatccggttgtgcaaggactccacgaacccgttatgccacggctggcccggcgggatgaacgcttggagcgtgtcatgctcgctggcccagcgccccaaggcggcggcgatgaattcaggcccgttatcggcacgcagcacttggggtgccccatgggtaagggcagccaggtcaagcatttcgatcacgtcggcggcccccatacgccgctcgacgcggaaagccaggtgctgacgggtgaactcatcgatgaggttacagaccttgaacacgcgccccctccaatccgaatcgaactggaaatcaatggcccacacctgccccggcgcactagccttgaccaggcgctggaggcgcggcgcagtgcggggcttgggggctttgcgcgggcgcacgcgcagcccttcggcgcgc

SEQ ID NO: 4368 - DNA, 7977 bp, synthetic construct
  source 1..7977: mol_type = other DNA
  misc_feature 1..7977: note = Synthetic
ctattgttgccgaggcctatgggaagacccaggtttcggagcgtcaccgtcaccgtttcgaggtgaacaatgattaccgcgatcagctggaatcggttggtctgcacatctcgggtacatcacccgatggaaacctggtcgagtttgttgagctggatcgttccttgcacccctactatgtggcaactcaggcgcaccccgagttcaagtcgcgtccgacgaaggctcacccgctattcgcgggcctggttcgcgcagcacttgcgcgtcacgcagagaactacgctgcacgcggtgggcgcaagtaagggctgtggagctttgagctcggtgaaataaccggctctatcgcaccgatctcacggggtcttgagctgttgtggctcagggccccgtggggtttttcgggggtagtgcaaattgtttcaaaaggtgcttgcgtgaagcggtgatcagggtttatagttatgccaactgattctcaataagcgccgacatgttagcggtgttgattgctccaccgggcctttcggggtccggtattttttacccgcgaagcttctggttgacccggttaacatagcttcaaaattgctgaaaaatacctgcagaaactgtacgaaagtgcttgttgtctgtggcatgatttcaccatgacaaagattaatgatgatcttcggtatcgtgtcggcattgacgtcggcttgaaatcaattggtttttgcgctgtggaggtcgatgaaaacgaccagccacttagactgctgaattcaatggtgttcgttcatgacgctggtgtagatccaaatgaaaataaggcggcaaagagccgtaaactcaccgcgggtgtcgcgcggcggactcggcgtctgttgagagaacggaaacgccgtcttgcgcgtttggatgttctgttgtctgagaagctgaactggccaattcctaatcttgaagactttgaagacccctacgagccatggcatacgcgagccgagcttgttgaacatttcattgaggatgagtctgagcgcttggaggcattgtcgatcgctgttcggcacatcgctaggcataggggttggaggaatccgtactcaaatgttgagtctctattagtggaggtctctcccagtaagtttttgtggagtgatgatccggacttgcaggaaacaaccttaaacggtcgtgtagctaaggctgtaggacggagttttgcacctgaaacgacacctggacaacttattagtgcatatttgtcagatcccaggtatgcaccccagatggggcgatctttcagtttctctggtctccgccaacgtcggggtgccgacgaggattatatgaagaaagcatatgctgatcgggtatttttagggaaactaatgcagcatgactatgctgcagagattcgacagatctgtaagacgcagcgaattgatgaggatacacaaaagctattaatttgtgcggtatttgacgcgaaatctccgaaaggttcgtctaagccgttggttgggaaggatgaattacctggccaagaagaacattatagagctgagaaagctcacccatcttttcaacgatttagaattatcacagttctaacgaatctacgtattcgggaagggggatcgaaacgtagcctaacaaccgaggaacttcagagggggatgaagtttctatttgaagatgcagttggcgcaaatgtgagctggacagatcttgccgaacaatttggggttagtcgcactgatttattaggaaccgctgcaccttcgtatgacggttcacctgctttgcctgctccaccgaccgataccacctcagaagtaatcatgaactcaaagatcaagtggttaaaagattggtggaagaacgctgatcttgagcagcgtggttacatggttgatgctttgtcaaattcgggaggatcgagcgatgaagatttcatcagagacgaaatagcagaagtttttcaagaggctagtgatagtgactgggcgaagcttgataaattaaatctccctccggggcgagctgcctattctgtcgatagcatggagcagattactgaattaatcttgcaggaaggtgtagatctttacactgcactgcggcggttattcgatgttgggaaaaattgggctcccactcctgaaaaaatagaagctccagttgggaatccagctgtcaatcgtgtgtttaagcaggtcgcgcgttggctgaagatggtgacagaacgttggggaacgcctgttgtcatcaatattgagcatactcgcgaagggctgaaatcagctcgggtagctgaggaaatatctgcgaaagataaaaagcattggaaggctcatcaacaggcaacggagagaatgctcgctgacttaggtgtttccggtaaacttcgtcgttctgctcgactgcgttactttgcagttcaacgacaaaattgtcagtgcctctactgtgggtgcccgatttcttatgaaacagcagaaatggatcatattgttcctcgcgctaattcggcatcgacgaatctcctttctaaccttgctgctgtttgtcgaaggtgcaatgtccaaaaaggtagtgttccattcgcgctgtgggcttcctcatctagctctccagaggaagtcactcttaaaggaactctcgaccgtgtgaatgcttggaagggaagccccgaattaactggtgctgaattcaaacagtttaagaaggatctgattaaacgtctcaagtccaaagtccctgaggaagaatttgacgggcgctccatggaatcagttgcgtggatggcggttgagcttcgctctcggattctgagcttttatcaaacacaggggtcagttgatgctccatatgtcggaatttatcgagggcaacttactgccgaggctcgtcgggcttccgggtttgaaaaccgggttaacttaattggcggcagagggaagacgcgatttgaccgtagacatcatgcaatggatgcgttagtaatcgcgctcatgaacgcttcgattgcgcgctcactggcttggcgtgtgaatcttcgtgacagccagcgcattactggtacgcaagaaacatggaaggaattctacgaaccttctcagagcagatctcgtgagcgttttattcaatggcaaacagctatgctgcgagcagtagagctattcaacattgctttgacggcaaacgccgttcctttccacgaaaatattcgattacgcgttgactcaagtaaggttcacgaggaaaaaatcttttcgttcaactcacaaaagaaaaaagttaccggtgaaactaaagatggcaagctgaagataaaagcaacgggtattcaggtgacacttggatcggcactttctgctgacctaatcgataaggctgagacacctgcgttatggactgctttgactaggctgcctgactttgattcgaaagatggacttcccgaagataagtcgcgagtgatttatgttcacggtcggaagatcactgcttctgaacaactcaacttctttggttcgccctctgcctgtttgaaggttcgtgacggatatgtggagattgggaactcaatccatcacgcacggatttaccggatcgaaggggagaaagatacaacctacgctatggttcgtgtttttgcgacggacctagtgaaaatggctcatgaagatgtcttcactgcgccgctgaaaccctcgacgatctccatgcgaacggccgatccgaagattcggacggcacttgctgatgggaccgctactcagattggatggctggtcgaaggcgatgagctgcagcttgagacggataagtactctggtggcttcatcggagaggtccttgctgaatacccgcaactcacgagttggcgggttgcgggctttcctgataccgcgaagttgcgtttacggccctacctattgtcggcggaaggcatccctgctgatgcttcagatggtttacgagaaattattgagcgacaaggctggcgtccagcagtaaatgttttactaactagtgggactgtaaaggtgatacggcgtaattgtctgggtgagccgcgcttaaactcagggaattcattgcccgtcactcagtggttgaggtagagccatggcggaacagtggcgcgtgattgacctctgcgaatttgagggaatgcttcattccacacgaggtgggatagaggtgtgtcctgaaggtaaggaaccggttactcttcctgttgcagagcttgcggtagtccttatcggaatgaaggtcaatctcagcgccgctgttctgcaccgtcttgctgaggcagatgtagcagttctcttctgtgattggaggggaattcctgaaggggcctgttattcctggtcggatcatgggcgagtggcggctcgtcatcgagcgcaggcagatatgactcttcctcgaaagaaaaatgcatgggcacgaatcatcagagcgaagattgagggacaggctaatgtccttcagaatcttggtcgttctggcagtagtgagctctttgcgcttgcggaccaagttcgctcaggcgacccagaaaacgtcgaggctcatgccgcgcgcgtgtactggtcacgagtattgaaagatggcaggcagccgggtgcgggacaactcattggttcaaatgcttgtcttgactatgggtatgcagtgcttcgaggacaccttattcgcgcaattctttccgcgggtttggcaccagcattgggggtattccatcgagggcgagggaatgcttttgctctcgcggatgatctgattgaaccgtttcgtcccgcgattgatgaggttgctctaaagttctccccaaccgcctcaccttcagatagcggtgtgaagcgactgctcgttgctgctgcatcgcagaaattcgatagcgacgggtatgggatatcagcagtagctcaagatctggcgcagcaatatgggcgttacgttgagggggatgaagatcgtcttcgcgttttggcgtggcaggggccggcttcagtcgatgtgagtggctgaaatggttgatggtcctatgtggtgcctggtgatgttcgatttgccggttgaaacaaaagatcaacggcgagaggctactcgcttcaggcaaaacttgcttgactggggttttagcatggtccagttttctgtctatgtgaagtattggccgaccggcggccagaatcatgcgactcttcgacagattcagtctcatcttcccgaaggcgggcaagtacgagtgatcggaattacggatcgtcagtgggcgactgggcttcattttgagcaggcgaagaaaaagaaaactgagggggctcccgaacagctcacaatcttctaaatttttaccaatcctcttggtagacttcaccgtatccccaattggacgcaacaagtgttgggaatcagttaccaatcctcttgatagacttcgggtgcaccgcgctagtttgatatcgtagttgggaatcagttaccaatcctcttgatagacttcgcagcttcaataacagcaacggtaagtggttgggaatcagttaccaatcctcttgataagcttttcactcgcccacagtcccacgatgcttagttgggaatcagttactaatcctcttgataagctttggataccaagcgggaagatcagttaccggttgggaatcagttactaatcctcttgataagctttccacgaaacgtaagtggcgcgacgggcggttgggaatcagttactaatcctcttgataagctttacaggcgagtgcagatgcagcgactgaagttgggaatcagttactaatcctcttgataagctttacacttttcgaaactgaacgacgcgagtgttgggaatcagttactaatcctcttgataagctttgcctctgtcgttccccgcgccctggctggttgggaatcagttactaatcctcttgataagcttttccttagcggcttccttgcgcaagtcttgttgggaatcagttactaatcctcttgataagcttttgaataagctggacacagttatcgtgaggttgggaatcagttactaatcctcttgataagcttttcacgaagctcagcccacgcaatcgtgtgttgggaatcagttactaatcctcttgataagctttatctctgctaggcacacttttaacgccagttgggaatcagttactaatcctcttgataagctttgcagatgtcagaggcgatagggatatgagttgggaatcagttactaatcctcttgataagcttttgggtgtcctcctcgttgaggattgcgcgttgggaatcagttactaatcctcttgataagctttggatcaacggcctcgtaaccgcacagctgttgggaatcagttactaatcctcttgataagcttttttgccgaaattcttgttgtcatgttgtcgttgggaatcagttactaatcctcttgataagcttttcacgaagctcagcccacgcaatcgtgtgttgggaatcagttactaatcctcttgataagctttcccgaggtgctcgcgaccggcacgaatggttgggaatcagttactaatcctcttgataagctttcccgtcgaccttagccgacaagatgcccgttgggaatcagttactaatcctcttgataagctttcgtttgcgacgctgggtattgctttcctgttgggaatcagttactaatcctcttgataagctttcgttctgtctcaacgatgaggtcgaatcgttgggaatcagttactaatcctcttgataagctttctgcagcttgcagatgattcactgcggcgttgggaatcagttactaatcctcttgataagctttcaggcgcatcgctaataaagaagcttctgttgggaatcagttactaatcctcttgataagctttcttgccggtttgtcttggcgactgcagtgttgggaatcagttactaatcctcttgataagctttagtgttcgcaatacgctcagtctgcttagttgggaatcagttactaatcctcttgataagcttttgagcgagaacgccccaatccacaagcagttgggaatcagttactaatcctcttgataagctttcgcgtcgcatccagtaaacgcgccgttcgttgggaatcagttactaatcctcttgataagcttttgcgttatcactgaccaaatacgcgacagttgggaatcagttactaatcctcttgataagcttttcgcgtatgcacttgacccgctacaacagttgggaatcagttactaatcctcttgataagctttctcatcttcaatacgtcgagcagccatagttgggaatcagttactaatcctcttgataagctttccagcgcggggcacgcctgcaacactaggttgggaatcagttactaatcctcttgataagcttttcggctggctccaagaccacggcgcagagttgggaatcagttactaatcctcttgataagctttgacgcccagggcgcgttcaaccgcgaaagttgggaatcagttactaatcctcttgataagctttgcgattatcagccgcctggacgaagagagttgggaatcagttactaatcctcttgataagctttaccaccggcgccaggtcagtcttatggcgttgggaatcagttactaatcctcttgataagctttcagttcttcaaacgtgtatgaatcctcggttgggaatcagttactaatcctcttgataagctttcaagtgacccagtacgaagtccacagccgttgggaatcagttactaatcctcttgataagctttagaggattggtttttccttggaatagcaaggttttctgggcttcgaacgattcaaattcggagcccagaacgctatttttggcatcttttggggtctataaaagaaaaactgaaagccaaaaaggcctcgcactacgaccgatcagcctcgatc

SEQ ID NO: 4369 - DNA, 6736 bp, synthetic construct
  source 1..6736: mol_type = other DNA
  misc_feature 1..6736: note = Synthetic
gccatgcaggttttcacgcgggtcattcgacatgcccccattgtttcaggatcgcacccaatgtgtcgcagtggcgcgcggaagtgggtggggtggccccgccgaaaagtccttgcgaatgtggcttgcatctctgagagtggggaggtatcgtgtacccacgattgaatctcagtaaggaccgcctcgttagcggttccgaatgctccactgcattgcagtgacaccgggtccttctccgagaagggcccggtatttttttaaagcggacccaaatgtatgtgcggtgtgacactatgtgtcccatgactacttcctcagaaaatgttccgggtatccgctaccgcgtcggcatcgacgtcggcttgaactccattggtttttgtgcggttagagtcgacctccatgatcggcctcttgaactattgaactctatggtgtttgtccatgattctggggttgatccaaatcaaaaggacaagcatgacacgcggaagtacgtggggggcaatgcgcgccgaactcgtcgtctctataaggtcagacggcagagactcttcaaccttgacaagctgttgagtagagaattaggttggccgctacctgaaatggcttctttcgatgaccctcacgaaccctggcatgttcgagcacgcctgctggatggctacatccccgaggaaggcaagcggaaggaatggctatctattgcgatgcggcatatggcacggcataggggctggcgcaacccctacgccaaggtagagacgttgctgcagcccgccgagccgagcgacttcctgaagggactgaatgaacgcatcagtacatccctcggtaggagcttccgggctgacgcgacccccgggcagcttgtggatgcatacctcgctcaccccgattacgtgaatagggccggtacgcccaaggtgcgtgggcctgagggtatcctcgcgggcaagctccaccagagtgacaacgctggggaaattcgccggatctgtgagacgcaacgggttgatccgtcggtttgtgaccggctgattcgcgctgtctttgaagcgaagttcccgaaaggagcgcgtcgcctggtagggcatgatgaactgccggggcagagcggacatattcgggctgaaaaggcacatcctgcgtttcagaagttccgcatcgttagtgtgctggcgaacctgcgtattcgcgagggccgtgcggagcggccgttgactccggaggaactgcaggaactgactgacttccttttgattgctggtcttaagcaggaggtcacctggcaggatctggcagataagcttgagatcgagcgttcggatctgcgtggtacagcgaaggcctcgttcgatgggacgccggtcctgcgcaaccctccgacggacgtgaccactgagaagatccttgcctgcaaggtcaagtggctcagagagtggtggaagggtgcggacgatgagcagcgcggcttcttagttgatgccctttcccattccggtggctcggaagatgaagctgacgttaatgatgagattgctgaactgcttgaacaagcaactgcagaagagagcgttgcatgcgaagaggtatcgctgccacaagggcgagccgcctattcgttggattccctgcgtcgcctgaccgacaggatgcttcgagacggtgttgatctgcataccgcgcgccgtctggagttcaatgtcggtgacgactggaagccggcagtcgagccgatcggagcgccgacgggcaatccggccgtcgatcgcgtactcaaacaggtgagccgatggctgcacgcggcgacggagcgctggggcgagccgatggtcatcaatatcgaacatacgcgcgaaggactgggatcggagaaggtggcccgtgagctgattcaagcgaatgaacgtcagcgcaagtctaatatcaaagctgctgcagagattgcagagaggctcaaactatcaggaagagttcggcgttcagacaggatccgctacttcgcgctgcagaggcaaaacagtcagtgcctgtactgtggcactgagattacgttcacgacggcggaaatggatcacatcgtcccgcgcgcagatggctcctcgacgaacgatcgttccaacctggctgcggtgtgtcgtacgtgtaatcacatgaagggagctatgccgttcgcagtgtgggcatcgtccgatcaagtgaacgtgggcgtctccctgaatggagctcttgatcgcgtgaagatgtggcagcgcgataacggcatgtcgcacaagcagttcaagcagctgcagcgcgaggtgtctgcgcggctcaagtcccgtaaaccggacgaagagtttgatggccgctccatggagtccgttgcatggatggctgttgaactgaggactcgtatcgagggcttctaccgcacgcgcgatgaagagtccgtgccctccgtgggtgtttaccgtggtcagctgacggcggaggcccggaaggcctcgggcttcgagagtcgagtcaaccttattggtggccgaggcaagactcgtttcgacaggcgtcaccacgcaatggatgcgctcgtcatcgcgctgatgaatccgtcggtgtcccgtacccttgcgctgcgtgtgaacatgcgtgaagcgcagcgtatcgcgggcctcgaggagacgtggaagaacttctatgggaagcctggtgaggcatcccagcgtttcgagtcctggcgcgaatcgatgttgctagcatccgaactgttcaacagtgcactgtctgcgaacacgattccgtttttggaaaataagcggctacgggtgaactcgagtgcagtgcatgaggccactcagttttctttctctcatgcgaagccgatcaaaaagggatcgacgaccttgaaggaaaaaggggagcaaagaacgctaggagcttcgatgtccgttgatttgatcgatcgggctgaaactccggctttgtggaccgctcttacgcgatgcccagacttcgatccgaaaaatggtctccctgagaatccgaaacggacgatcagggtgaacggcactcatgttgggccgacggagctactgaacttctttggatctacttcagcatgcctcaaggtgcgtggtggatatgtcaaacttgcgaactcaattcatcatgcaaggatttaccgtattgacggtaagaagactgcgtacgcgattgtccgtgtcttccaggtggacctgatgcgtatgaaagaccaggatgtattcaccacgcccctgaagccctcaacgatctccatgcggacggctgataagaaaattcggcaagccttggttgaggggaccgcgacgcagattggatggctggtcgagggtgatgaactacagattgacccatccaagttttccggagggtttgtcggtgagcttcttacccaatatccggaaaccaagaactggagggttgcgggttttatgaatggtacgcaacttcgactcaagcctctcgtgttttctaaggaaggttttgtcgatgagaaacaagctgcgcggctaggtgtcgaacccacgtcggaggcaattcaaaaaactgttgatagacccggctggcttcctgctgcgaatgtgctgttcggctccggaggtgttcttgttgttcgccgaaactgcttgggagaagtacgctggcagtcgttgggctctttgcctgtcacgatgatgttggagtgatccaaaatgacagagcagtggcgtgtgattgacctgtgcggattcgaaggtgagctacgatcgacgcgtggtggggtcgaggtgtgccctgaggagggagcatcaacgactattcccgtcgctgaggttgcagtcatcctcgtgggcatgaaggtcgctctgaatgccgctgttctgcatcgtttggccgaggctgatgtcgccatcctcttctgcgattggagaggtataccggagggtggctgctactcgtggtccgatcatggccgagtagcagcccgccaccgagcccaggcggaagtctctcttcctcggaagaagaacgcgtgggcgcgtctggttcgcgcaaagattgaggggcaggcctcggttctggagaacctcaagattcggggcagtggggaactactcgctctcgcggatcaggttcgttcgggcgaccctggaaacgtggaagcccaggcggcgcggctgtactggtcgcgtgctctgggtaagggtgtggggcgtgagccaggtgcagggcagttaattggcgcgaatgcctgcttggattacggctattccgtgcttcgagggcacctgatgagggctgttctcgcagctggcctggcgccagctttgggggtcttccaccgtggtcggggcaatgcgttcgcccttgccgacgatttgatcgagccttttagaccggcgatcgatgaggccgccctgcggcttccgcccacggcctctccttcggatcggccggtgaagcagcttcttgtggctgccgcgtcgcagcgctttgatggagatgggcatggcatcccgaccgttgccgaggcgctggctcagtctttcggacgctacgtggagggtgacatcgatcgcctcaatgtgttgtcgtggcagggatcgtcgtctgtgggcgtgggagactgacatggcggatgatgcgatgtggtgcttggtgatgttcgatcttcctgtggagacgaaaaagcaacgtcgagaggcgaccaggtttaggcacgatctgcttgattggggcttctgcatggtgcagttcagtgtgtacgtgaagtattggccgaccggtgggcaggatcatgcgacgttgcgggcgatcaagtctcatttgccggagggtgggcaggttcgggtgttggcgttgacggatcgacagtgggcgacggggctccgttttgagaacgcgaagcctcggaaggagcgtggatcgccagaacagctcctgattttctaacgaagatcccctggttttccgctgttcttcagggaaagataggggatctaagtgtatcaaaggggaatcacgattgaatcccagcttggggagatggtttatgacgcgtttccaagtgtatcaaaggggaatcacgattgaatcccagcggaacgggatcgacgaaaacggcaaccgaagtgtatcaaaggggaatcacgattgaatcccagccctggcatgacccggcaacgcccacgttaagtgtatcaaaggggaatcacgattgaatcccagctatccgagcgtcgggaactcatcgtcctaagtgtatcaaaggggaatcacgattgaatcccagctagaagcgcgcgctcagaagtaacccgcaagtgtatcaaaggggaatcacgattgaatcccagcagctgatagcgccgccggcctcccagccaagtgtatcaaaggggaatcacgattgaatcccagctgtcatgctgcgaggccccacaggccccaagtgtatcaaaggggaatcacgattgaatcccagctatcacccgaggaagtcgccgatatcttaagtgtatcaaaggggaatcacgattgaatcccagcatgagcgagagtttgcgaagatcggcacaagtgtatcaaaggggaatcacgattgaatcccagccatcatgctcaaccgctacatgccggcgaagtgtatcaaaggggaatcacgattgaatcccagctggtcaactcgtcgccggatggcaagttaagtgtatcaaaggggaatcacgattgaatcccagcaataggattcaacgccgcccaactcgtcaagtgtatcaaaggggaatcacgattgaatcccagcgggacggcgcgcatcgaatccgagatcaaagtgtatcaaaggggaatcacgattgaatcccagctgcttgaccatcaggtactccgcacggcaagtgtatcaaaggggaatcacgattgaatcccagcggtcggagcgcgtgccgacgatggtggcaagtgtatcaaaggggaatcacgattgaatcccagcacctacgagacgcccctggtccagcttcaagtgtatcaaaggggaatcacgattgaatcccagcggtccccagacgctggcggcgctgcgtgaagtgtatcaaaggggaatcacgattgaatcccagctacgtccttagctgtgtgaatgagtgtgaagtgtatcaaaggggaatcacgattgaatcccagcaggttatcccggccccgcgtctgctcgaaagtgtatcaaaggggaatcacgattgaatcccagcggcgcgggcccgttcttgtgcttcttccaagtgtatcaaaggggaatcacgattgaatcccagcgtgtatcccagggcgttgagtcccatacaagtgtatcaaaggggaatcacgattgaatcccagcgatgcgtgggacgaccgagagtctttcaaagtgtatcaaaggggaatcacgattgaatcccagctcgatggcgctggagtgcgacgcgagggaagtgtatcaaaggggaatcacgattgaatcccagcccatcgaagaaggcggtatcggcggtctaagtgtatcaaaggggaatcacgattggtcaagtcctgtggagtggtgtaatcgttttgtgtccttcgggttgggttatgcgctgagtttgagtggggtgtcctcctgcccggtgggttgtggtgcgagtcgtgatctggtgaggatgtcgaggctgaggtagcgtcggccttcggcccattcgtcgttttg

SEQ ID NO: 4370 - DNA, 6179 bp, synthetic construct
  source 1..6179: mol_type = other DNA
  misc_feature 1..6179: note = Synthetic
aaccgtgcaggttttcacgcgggtcattcgacatgcccccattgtttcaggatcgtgccacttgtgtcgccatggcacgcggaagtgggtggggtggcatctccgaaaaatccttgcggatgtggcttgcatctctgagattgaggaggtatcatgactcatgatcaattcttagtaagggtcgactcgttagcggctccgaatgctccaccgggtccttctccgcgaagggcccggtaattttttaatgcggacacaaatgtgtgtgcggtgtgacaccatgtgtcctatgactacttcctcagaaaacatccctggtatccgctaccgtgtcggcattgacgtcggtctgaagtctattggcttctgcgcggttgaggtcgatcgcaacgatcagcccgttgagctgctaaactccatggttttcatccatgatgcgggcgtcgatccgaatgagaacaaggcggcaaagagccgtaagctcacggccggtgttgctcgtcgaacgcggcgcctctaccacactcgccgtcagcgcttggcaaacctggatcgcgttctctccaaggaatttggctggccgcttcctgatcagtctgcattcaagtatcccacagagccgtggcatgtacgggcacatcttgtggagggctttgttgcggatgaggacgagcgtaaagcttcactatcgatcgctttgcggcacatttcccgacatcgcggctggcgcaatccctacgccaaggtcgagacgctgttgcagccgactgaaccgagcgacttcctcaaggggctgaacgagcgcatcagtgcgtccctcggtaggagcttcccggctgacgcgacccccgggcaactggtggatgcgtacctcgcacatcccgactacgtgaagaaggccggtacacccaagctgcgcggccccgagggtattctcgctggcaagctccatcagagtgacaacgccgaggaaatccgacggatctgcgagatgcagcagattgatgctgcggaccgtgatcggcttgttcgagccgtcttccaggcgaagtcacccaagggtagtgcgaaggaacgcggactcgtgggacacgatgagctaccagggcagggcaaacacgtgcgcgcggagaaagcgcatcccgccttccagaagttccgcattgtcagtgtactggcgaacctgcgtatccgcgaggggcactcggagcgccctctgactccgaaggagctgcaggggctgactgatttcctgctcgttgctggcctcaagcagaaggtcacctggcaggatctggctgataacctcggtatcgagcgttcggatctgcgcggtaccgcgaaggcctcgttcgatgggtcgcccgtcttgcgcacccctccgactgacgtcaccaccgagaagatcctggcctgcaaggtcaagtggctcaaggagtggtggaaagcagcggacgatgagcaacgaggctactttgtggacgccttctcgaactccggcggctccgaagatgatagtgacgttgatgatgaggttgcggagctgctcgagcaggcaacagaggatgatcagctcgagttcgagaagatctcactgccccaggggcgagcggcatactcgctggatagccttcgtcgcctgacggacaggatgctgcgtgacggcgtagatctgcatactgcgcgtcgcctggagttcaatgttgcggatgactggaagcccgccgtcgagccgatcggagcgccgacgggcaacccggcagtcgatcgcgtgctcaagcaggtgagccgatggctacacgcggcgacggagcgctggggcgagccgacgttcatcaacattgagcatgcgcgtgacggcctcggatcagagaaagtggcgcgtgaacttatgcaggcgaatgacaagcggcgtaaggcgaacgcggcggctgttgcggtaatggccgagaaactcaagctgtcaggcaaggtacgtcgttctgatcagatcaggtatttcgcgctgcagaggcagaactgtcaatgcctgtactgcggtaccgagatcacgttcgcgacggcggaaatggatcacatcgtcccgcgtgcggatggctcatcgacaaatgatcgttccaacttggcggcggtatgccacacgtgcaaccaaatgaagaacgcaattccgttcgcaacgtgggcagcatccgatcaggcaaatgtaggtgtttctcttgagggcgccctcgaacgtgtcgatatgtggcagcgagacaacggcatgtcgaagaaacaattcaagcagctgcagcgtgaggtgtctgcacggctcaagtcccgtaagccggatgaggagttcgatggtcgctcgatggaatctgtcgcctggatggctgttgaactgaggactcgtatcgagggcttctaccgcacgcgcgatgaagaggctgtgccttccgttgctgtctaccgtggtcagctgacagcggaagctaggaaggcctcgggcttcgagagtcgagtcaacctgatcggcggtcggggcaagacccgtttcgacaggcgtcaccacgccatggatgcgctcgtgatcgcgctgatgaatccgtcggtgtcccggactctcgcgctgcgcgtaaacatgcgcgacgcgcagcgtctagcaggccttgaggagacatggaagaacttctatgggaaaccgggcgaagcctcgcagcgcttcgagtcctggcgtgagtcgatgcttcgcggcgtagaactcttcaatattgagctgagcaacaacgcagttcccttcgtcgagaacatccgcctccgaatgaattcgagtgcggttcatgaggatacgctgttttccttctctcatgcgaagccggtgaagaaggggtcaacaaccatgaaggaaaaagggatgcagcgcgcgcttggtgctgctattcctattgatttgattgaccgtgctgaaactccggctttgtggacggctctcacccggtgttccgattttgatcctgtcaaaggccttcccgagaacccgaatcggacaattgtcgtaactggcaggcatgtcgggccagaggagctactgaacttcttcggatctccttcagcgtgtttgaaagtacggggtggatacgtgaagcttgcaaactccatccaccacgcaaggatttaccgaattgacggtaagaaaactacgtatgcgatggttcgtgtcttccaggtcgatctgttgcgtttgaaagaccaggatctgttcaccacaccccttaagccttcgacgatctccatgcggacggcagagccgaagattcgccaagcgctggctgatggaactgccacccaaattgggtggctcgtcgagggcgacgaactgcagctgaatccagcaatgtatggcgatggttctatcgctaaggtgttttctcggtatccggagctaacttcatggcgggtagcaggtttcaaatcggcctcaaagatgcgaattaaacccctgttactctcgaaggagggttttgttgatgacaagactgctgcgaaatttggcatcgaaccaacagcagacgaggtgcgaaaagctgttgacgatccggggtggatcactgccataaacgtattgctccaggcagggggagtacgagtgattcgtaggaattgcttgggtgaagagcgttggcattcttcggcgatgttgcccgtatcgatgagactggagtgatttccgatggcagaacagtggcgtgtgattgacctgtgtggatttgagggtgaacttcgatcgacgcgtggtggggtcgaggtatgcgctgaggaaggatcaccaacgactattcccgtcgctgaggttgcagttgtcctcgtaggcatgaaggttgctctcagcgccgctgttctgcatcgtttagccgaggctgatgttgccgttctcttctgcgattggagggggatcccggagggaggatgctactcgtggtctgcacatggtcgagtagccgcgcgtcatcgagcccaggcagaggtatcactgcctcggaagaaaaatgcgtgggcgcgtctgattcgagcgaagatcgaggggcaggcctcagttctggagaacctcaaaattcggggcagtggagaactcctcgcgctcgcggatcaggttcgttcgggcgatcccggaaatgtcgaggcgcaggcggctcgcctgtattggtcgcgcaccttgggtaagggtgtcgggcgtcaacccgcggccggtcagcttattggcgccaatgcctgcctggattacggctactccgtgcttcgggggcatttgatgagggctgttctggcagctggtctagctccggcactcggtgtcttccatcgggggagagggaatgctttcgctcttgccgatgacttgatcgagccttttagacccgcgattgatgaggtagcactgcagctacccgtgactgcgtcgcctacggatcgttcggtgaaacaactactcgtggcagctgcgtcacagcgctttgatggggatgggcacggcattccggccgtagccgaggccctggcccagtcgttcggtcgttacgtagagggtgatatcgatcgcctcagcgtcttgtcatggcagggaccgtcggtcgtgggtacgggagattgacatggcggatgacgcgatgtggtgcttggtgatgttcgatcttccggtggagacgaagaagcagcgtcgcgaagcgacgcgctttcgcaatgacttgttggattgggggttctcaatggtccagttcagcgtgtacgtgaaatattggccgacgggcggccaagaccacgcaacgttgcgggcgattaagtctcacttgcccgagggtgggcaggttcgggtgttggcgctgacggatcgacagtgggcgacggggcttcgttttgataacgcgaagccccggaaggagcgtggatcgccagagcagctcatgattttctaacgaagatcccccagtcttccgctgtattccggggaaaactgggggatctcagtatatcaaaggggatgggtgatcaattctcagcaccaggggagcgccgcgcccgtgggcgccagtatatcaaaggggatgggtgatcaattctcagcgaccgcaccaaagagggccgactcgtcccagtatatcaaaggggatgggtgatcaattctcagcaacatcgtcaagggatacatcacatacgcagtatatcaaaggggatgggtgatcaattctcagctggagtctcagacgatcgcggctctcaccagtatatcaaaggggatgggtgatcaattctcagcgtcgacggcggcggtcgccaccaaccgccagtatatcaaaggggatgggtgatcaattctcagctggcactgagcatcccgatggaacttgacagtatatcaaaggggatgggtgatcaattctcagcagcggcctcgttacgggacgttcactcgcagtatatcaaaggggatgggtgatcaattctcagctccgtcgatgagcgccgagagcttaggtcagtatatcaaaggggatgggtgatcaattctcagcagatcggcggccagagtcctcgtcgggccagtatatcaaaggggatgggtgatcaattctcagcagaccactcgaaatacgcggtccgcgagcagtatatcaaaggggatgggtgatcaattctcagccctcgccgctggagtagtagcggttggccagtatatcaaaggggatgggtgatcaattctcagcgcagcgacgagcgggtcacgtgcgacgccagtatatcaaaggggatgggtgatcaattctcagcggagcttctttgagaacgcggactgctgcagtatatcaaaggggatgggtgatcaattctcagccgcgggatcgacgcgccgctcgacttcccagtatatcaaaggggatgggtgatcaattctcagcacaatgaacatcgagaccacgaccgagacagtatatcaaaggggatgggtgatcaattctcagccgggcggcggtgtctcgttccgcctgggcagtatatcaaaggggatgggtgatcaattctcagcgtcaccgacgaggcataccgcgccgaaacagtatatcaaaggggatgggtgatcaattctcagcgcgatcctggacacgctcgctctactcgcagtatatcaaaggggatgggtgatc

SEQ ID NO: 4371 - DNA, 6132 bp, synthetic construct
  misc_feature 1..6132: note = Synthetic
  source 1..6132: mol_type = other DNA
tccacggggtttatccacgacgcaggcgttgacccaaacgagaataaggcggccaagagccgcaagctcaccgcgggggtcgcacgccgcacgcgccgcctctatcagaccaggcgtcagcgtctcgcgcgccttgatcgagttctcgtcaacgagttcggctggcccatcattgacctgactcgagttgaagatccccgcgaaccctggcgggttcgtgcccggttgctggaggggaccgcgataagaggaacagcgcgttatcgattgctgcccgtcacatcgcccgacaccgcggatggcgcaacccgtatgcggacgtacgaaccctcctccagccggccgagccgagcgacttcctcaaggggctcaatgaacgtatcagtacggcgctacgaacgagttatccggctgacgcaactcccgggcagctggtgaacgcctatctctcacacccggattacgccggaagagcgggaacaccgaagatcaggggaccgaaggggattctcgccggcaagctccaccagtcggataacgcggcggaaatccggcggatctgcgacgtgcaaaaggtgtctgccgacgagcgggatcaacttatccgtgcggtgtttgacgcgaagtcaccgaagggcagcgcgaaggaacgcggtctggttggcaacgacgagttgcccgggcagagcaagcatgtgcgcgccgagaaggcacacccggtgtttcaacggttccgcatcgtcagcgtgctggcgaacctgcgaatccgcgaggggcgcgccgagcgtcgcctgagtgctgatgaactggccggattgacagacttcctcatgattgcgggcctcaaacaagccgtgacgtggcaggacctggctgacaatctgggaatcgaacgcgctgatctgcgagggactgccaaggcgtccttcgataattcgccggtgctaaggaatccgccgacggacgtgaccaccgagaagatcctggcatgcaaggtcaagtggctcaaagaatggtggaaggaagcggatgaggagcagagaggctacatggttgacgccttctcgaactccggtggttccgaggatttgacggatgtcaacgacgaggtggcggagctacttgagcaggcgtcggaggaggaccaaagcgagtttgagaagatcgcgcttccgcaagggcgcgcggcctactcgctggacagtctgcgtcggttgaccgacaggatgctcgccgacggagttgacctgcacgaggcgcgtcgaattgagtttggcgtgggtgacgattggaaaccggcggtggaacccattgaggcgccgacgggcaatcccgcggtcgacagggtcttgaagcaggtgagtcgctggctgcacgccgcgacggaccgctggggggagccgacggtcatcaacatcgagcatgcccgtgatgggcttggctccgagagggttgcccgcgagctgatgcaggcgaatgagaggcgaagaaaagccaacgctgcggcggttgcgagcatggcggagaaactgaatatctccgggaagattcatcgttccgaccagatccgttacttcgcgctgacgagacagaattgccagtgcctgtactgcgggaccgccatcacctactcaacggcagagatggatcacatcgtccctcgcgccgatggctcgtcgacgaacgacagatcgaacctggctgccgtgtgccggacctgtaaccacaagaagggtgcgatccccttcgcagtttgggccgcgtccaaacaagcgaatgagggtgtttctcttgagggcgcgcttgagcgtgtcgatatgtggctgcaggacaacggcatgtcgaagaaacagttcaagcagctacagagagaggtcaaggcacgcctcaggtcgaagaagcccgatgaagagtttgacggtcgctccatggagtcggtcgcatggatggcggttgagctgcggacgcgcattgagggcttctatagagcgaggaaggacgatgctgtcccttcgacggccgtatatcgcggtcggttgaccgccgaagcccggaaggcctcgggtttcgagagccgcgtcaacctgattggtggacgcggcaagacgcgattcgacaggcgccatcacgcgatggatgccctcgtgattgcgctcatgaatccgtcggtctgccgaacgcttgcccttcgcgtcaacatgcgcgatgcgcagcgcctcacgggtgctaaggaaacctggaagaccttctacggtaaacccggcgaggcatcccagcgtttcgagacctggcgcgaatcgatgctgcgcggggtcgagctcttcaacatggcactgagcgataacgcgattcccttcgtggagaacaaacgactccgtatgaactcaagcgccatgcacgaagacacactcttctcgttcgctcacgcgcggccagtcaagaagggatccaagacgttgaaggaaaagggggagcaacgcacactgggatccgagcttcccgttgaactgatcgatcgcgcagaaaccccggcgctctggactgcgctcacccgctgtcccgatttcgacccaaagaagggattgcccgacaatccgcagcgcacgatctcggtgaacggaagccgcgtcggacccgcagatctattgaacttcttcggttcctccgccgcctgtctgaaagttcgtggtggatacgtcaagcttgcaaactcgattcatcacgcgaggatctaccgcatcgatggtaagaagaggacgtatgcgatggtccgtgtcttccaggtggatttgctgcggatgaaacatcaagacctcttcacgactccgctcaagccttcgacgatctcgatccgaaccgcagaacccaagatccgacaggcgcttgcagacgggagtgcgacgcagatcggctggcttgttgagggcgatgagctccggatcgagacggacaagtacacgggagggcttattggcgatgtcctgaagcggtatcccgaggcgacgagctggagggtggcgggcttcccagatcgtgcgaagctccgactccgtccgtatctcctatccgccgaggggcttgagaaggatgctcccaaggagatgaaggacctccttgacggaaagggatggcggccctccatcaacgttgtgctctcttccggggtagttacggtggtccgacgaaactgtctcggcgaggagcgctacggttccgcgacgtcgctccctgggacaatcgtgttggagtgatcgggcgtggcagagcagtggcgggtgattgacctctgtgagttcgagggccgggtcgcgtctgtccgcggaggaattgaggtctgtccggaaggtgggacttcgacgactgtgcccgtcgccgaacttgccgtcgttctcgtcggcatgcacgtcgatctgagtgctgctgttcttcaccgtcttgccgaggcggatgtcgccctgcttttctgcgactggaggggtgttcccgaaggtggttgttactcctggtccgaccatgggcgggtggcagcccgccaccgggcgcaagccgacgtctcgttgccgcggaagaagaacgcgtgggcacggctggttcgcgcgaagatcgaagggcaagccgcagtcctggcaaacatgaaaatccggggcggtggcgagcttctggccctggctgatcaggttcgttctggtgatccgggtaacgtggaggcgcaggcggctcgcctgtactggtcgcgtacgctggggcgagaagtggggcgtcagccttctgctggccagctgattggtgccaacgcgtgtctcgactatgggtattcggttctacgagggcacctgatgagggcggtgttggctgcaggacttgcccccgctcttggggtattccacaggggacgtggcaacgcgtttgcgttggcggacgatctgattgagccctttcggccggcgatcgatgaggtcgccctgcagctgccgtcgacggcatcaccgtcggatcgcgaggtgaaacaactcctggtggcggccgctgctcagcgttttgaccgagatgggcacggaatccctgcggtggcggaaggtctggcgcagcgtttcggccagtacgttgaaggggacgtcgatcgcttgcaggtcatttcgtgggaggggccgtccacggtcgtcgtgggagagcacgatggctgatgatcccatgtggtgtttagtcatgtttgatctgccggtcgagacgaagaaccagcgtcgtgaggcgacccggtttcgtcacgacttgttggactggggtttctgcatggtccagttcagtgtctacgtcaagtactggccgacgggagggcaggatcatgcgaccttgcgtgcaatcaagacgcatctcccagagggcgggcaggtccgtgtgttggcgctgactgatcgccagtgggcgactgggcttcgtttcgacaacgcaaggccgcgcaaggaacctggcagccccgagcaactcatgattttctgaccaaaatcccctagttttcattggtattccaacgaaaaccaggggatctcagtatatcaaaggggattggtgattgattcccagcgacatgaatgaagccgaaatgagtccctcagtatatcaaaggggattggtgattgattcccagcccggtcgtcggtgggttccgggcgttgacagtatatcaaaggggattggtgattgattcccagcgcagggcggtaatccgttcaactttggtcagtatatcaaaggggattggtgattgattcccagctctttgcggccgcgcacatcggcgtctgcagtatatcaaaggggattggtgattgattcccagccttcgcgggcgaaggctccgtgcgcgtccagtatatcaaaggggattggtgattgattcccagcctcacgtaacgggtcggcgtgtagttgacagtatatcaaaggggattggtgattgattcccagccagtctatgcccgaccgtgccccgaacgcagtatatcaaaggggattggtgattgattcccagccggaactcggacggcacccactggcaggcagtatatcaaaggggattggtgattgattcccagcagttcgacctcgccgcgcttgacggcgccagtatatcaaaggggattggtgattgattcccagcccgtgcgtgagcgtgtaggcgccgtcttcagtatatcaaaggggattggtgattgattcccagctggacagtggaagttcgctccgtacactcagtatatcaaaggggattggtgattgattcccagccgctcgatcctgaacctggagaccgccgcagtatatcaaaggggattggtgattgattcccagccgttggccgtgattgtggtgacgtagttcagtatatcaaaggggattggtgattgattcccagctgcggagccaggtgcctgggatgcggtccagtatatcaaaggggattggtgattgattcccagctgatacttactgccattcttctccctttcagtatatcaaaggggattggtgattgattcccagcaggttaaggatgtgacggtaggcgtgtgcagtatatcaaaggggattggtgattgattcccagcgcttgaagtcgctgatgaggtggggtgacagtatatcaaaggggattggtgattgattcccagcactgctgaggcacgccgggccaccggatcagtatatcaaaggggattggtgattgattcccagcggctgtcgcgtggttttgaggtcaacgacagtatatcaaaggggattggtgattgattcccagcatgggcgcggtcatgtgatcctgcgcctcagtatatcaaaggggattggtgattgattcccagcacgcccgcgtaggggaggcgggactttgcagtatatcaaaggggattggtgattgattcccagcttcgtggagatgggtccgcccccgcctgcagtatatcaaaggggattggtgattgattcccagcaactcattgatgctgggtttgggtatggcagtatatcaaaggggattggtgattgattcccagcctgagtggatcgggcggctggttgggcgcagtatatcaaaggggattggtgattgattcccagcgtggcgtcctcggg

SEQ ID NO: 4372 - DNA, 4292 bp, synthetic construct
  misc_feature 1..4292: note = Synthetic
  source 1..4292: mol_type = other DNA
ccttgcctccgccgcccttcgccgcaaacgagcggcgtgaacggtaccacgggcgtggctcagtcgcgggcacgtgcgcaggcaccggcgcgaccatgaccttactctgcgtccggcgaggagccggttgctgcggagggtagtggggggcctgcgcaccgctctgggggctgtgcgcgtacggggggatctgggactgctgagcgtcagtcaggaaggcctcgtcctgcgcgcccatcgtcgacgaggccgtggccccctcgacggcagcgtcgaccgcagcagcggcggtcggctccgagacggcctgcccggcggcagccgtcaagtcagccacgtcctggccatccgtaccctgcaggtttttacgcgagtcgttcgacatgcccctattgtttcaggatcgcgtcgtttgtgccgtaatggcgcgcgggagtgggggagtggggcaggtgatgttgctcgaaacttactcgcaatgtggcttgcgtcgcgtgttgtgtggtgatacgctgtaagcgattgattctcagtaagggtcgactcgttagcggccccgaatgctccaccgggcgtttcctcgcgaaacgcccggtattttgtgaaatgagcgcaaatgcgtgtgggatgtgacactatgtatccatgattgattcctcagcaaatgtccagggtgttcgctaccgggtcggcatcgacgtcggcctcaagtctattggtttttgcgcggtcgaggtcgaccagcatgaccagccaattcagctgctgaattcgatcgtgttcatccacgacgccggcgtcgacccgaacgagaacaaggcagctaagagtcgaaagctcaccgccggtgtcgcccgccggacgcgtcgcctctaccgcacgcggcaccagcgcctcgtcaatcttgatcgtgttctgtccaaggaattcggttggcctctacccgatctcgtttctttcaaggatcctcgagagccgtggcacgtacgtgcccgtttgctggatgggtatatcccagatgagggtaagcgcaaggaagcgctctcgatcacgttgcgtcatatcgcccgtcaccgaggctggcggaatccctacgcgaaggtggagacgctgctgcagccctccgagccgagcgacttcctcaaggggcttaacgatcgtattagtgagaagctggggagggctttcccggctgatgcgactcccgggcagctggtggacgcctacctggcgcatcccgactacgtgggccgtgccggtactccgaagctcagaggcccccaggggatcctggctggcaaacttcaccagagcgataatgcgcaggagattcgtcggatctgcgatgttcaaaggatcgaacccgcggaacgtgatcgtctgattcgcgttgtgttcgaggcaaagtctccgaagggaagcgccaaggaacgcggcctcgtcggctacgacgaactgccgggacagggcaggcacgtgcgcgccgagaaggcgcatcccgcattccagctgttccgcatggtgagtgtgctggcgaacctgcgcattcgtgagggacgcgaggaacgtcccttgactcccgacgaactccagcgactcgttgacttcatcgatcaagtttagcctcaaacaggaggttacgtggcaggacctggcggattaccttgggattgagcgatcagacttgcgcggcaccgcgaaggcagctttcgatgggtcgcctgtcctacgtaatcctccaacggatgtcaccaccgagaagatcatggcctgcaaggtcaagtggctgaaggagtggtggaaagaagcggacgacgaacagcgcggctacttcgtggacgccttctcaaactccggtggttccgaggatggaactgacgtcaacgacgaggtcacggagctgcttgaacaggcgaccgaggaggatcaactcgagttcgagaagatctccctgccccaggggcgtgccgcgtattccttggattccctgcgtcgcctcaccgacaggatgcttcgcgacggtgttgatctgcatacggctcggcgcctggagttcaacgtcagtgatgactggaagcccgccgtggagccgatcggcgcgccgacgggtaacccggccgtcgaccgcgttctcaagcaggtgagccggtggctccacgcagcaacggagcggtggggagagccgacggttatcaacattgagcatgcacgcgacggcctcgggtcggagaaagtcgcccgtgagctcatgcgggacaacgagaaacggcgtaaagcgaatgctgccgccgttgctgatatggctcagcagttggggctttcgggcaaggttcatcgttctgatcagatcaggtactttgcgctgcagaggcagaactgccagtgcttgtattgtggcgctccgatcacgtatgcgaccgcggaaatggaccacattgttccgcgtgcggacggttcatcgacaaacgaccgctccaacctggctgcggtgtgccgtacctgcaaccacatgaagggcaagattccctttgccgtgtgggcatcgtcagacaaagcgaatcagggagtgtccctgacgggtgcgctcgagcgcgtcaatatgtggcagcgtgacaacggcgtgtcccctaagcagctcaagcagctgcagcgcgaagtctgtgcgcgcctcaagtcaaagaagccggaccaggagttcgacggccgttccatggaatccgtcgcctggatggctgtcgagctgcgcactcgcattgagggcttctatcgttctcgaaacgaagagttcgtgccttccgtgggggtctaccgaggacagttgacagcggaggccaggaaggcctcgggcttcgagaaccgagtcaacctgatcggtggccgaggcaagacccgattcgatcggcgtcaccatgcgatggatgcgctcgtcatcgcgcttatgaacccgtcggtgtcgcggacgctggcgctgcgactcaacatgcgcgatgcgcagcgcctgacgggcgttgaggagacctggaagaacttctatgggaaaccgggtgaagcctcgcagcgctttgagtcgtggcgcgagtcgatgctcagcggtgttgagcttttcaacatcgcgctgagcgataatgcgatccccttcgttgaaaatatccgcttgcgcgttggttcgagcgtcattcatgacgcgaccgtgcgctcgttctgcccgccgaagaccccggacgggaagcagatcatcacaaagggatacggtgagcagcactcgctcggttctgccatgcccgtcgaactgattgatcgtgctgagactccggccctgtggaccgcgctcacccggtgctccgacttcgatccgaagaaggggctgcccgagaacccgcagcgcacgatctcagtgaatggaacccgcgtggggcccacggagctggtgaacttcttcggttcctctgccgcttgtctgaaggtccgcggcggatacgtggagctcgggagttccattcaccacgcgaggatctaccggattgacggaaagaaaaccacatacgcgatggtgcgcgtcttccaagtagatctgctgcgcctcaaggatcgggatcttttcacgacgccgctcaagccgtcgaccatctcgatgcgaaccgcggaacctaagattcgcaaggcactggccgacgggacggcaacgcagatcggctggctggttgaaggcgacgagctgcggctcgagagtgacaagtacactggcggttttgttggtgctgtactcgctagttatccacaggtgacaagctggagagttgcggggttccccgatcctgcaaagctgcgcctccgtccatatctactggcgggagagggcctggatggggaagcctcaaaggcgatgaaagatcttctcgaagggcaagggtggagaccatccgtcaacgtagttttctctccggggtctgccgttcttgtccgaaggaactgccttggacaagaacgccgaaactctgggggcgctcttccgaattcatcagagttgaggtgaatcatggctgagcagtggcgcgttgtcgacctgtccgctttcgaagggaacttgcgagcggtgcgaggtggcgtggaagtatgcactgaggagggcacatcgacggttctgcccgtcgcagagctggctgttgtccttatcggcatgaaggtcaacctgagcgccgctgttcttcaccgtctgtctgaggcagatgtcgcggttctcttctgtgactggaggggcatcccagagggcggctgctactcgtggtcggatc

SEQ ID NO: 4373 - DNA, 4239 bp, synthetic construct
  misc_feature 1..4239: note = Synthetic
  source 1..4239: mol_type = other DNA
tccgacgaaggctcacccgctattcgcgggcctggttcgcgccgcacttgcgcgtcatgcagaaaactacgctgcacgcggtgggcgcaagtaaggggtgttgtgctttgagctcggtgaaataaccggctctatcgcacctttctcacggggtcttgagctgttgtggctcagggccccgtggctttttctggggtagtgcgaattgtttcaaaaagtgcttgcgtgaagtgttgatcagggcttatagtcgtatcaactgattctcaataaggcgtcgacaggttagcggcgctgattgctccaccggccttcgggccggtatttttttgcctcgatgcgcatggttgacacggttcacatagctttaaaattgctgaaaaatagctgctgaattcgtgtataaatgcatgggctctgtggcatgatggccctatgtctgagattaatggcgatctgaggtatcgcgtcggtattgatgttggtttgaagtcgattggtttttgcgccgttgaagttgatgaaaaggatcatccgatccgtttgctcaattcgatggtgttcatccatgacgcgggcgttgacccaaatgaaaataaggcagcgaagagccgaaagctgactgcgggtgttgcgcgacgcactcagcgcagggttcgtcagaataggcggcgacttgctgaactcgatcgcgctttgtcagaggaattaaattggcctttgccaaaccttgaggactttgaggacccctacgagccatggcatacgcgtgcggagcttgttgatcactacattgaggacgaatccgagcgcttggaggcgctctcgattgcggtcaggcatatggctcgccaccgtgggtggaggaatccctacatcaaggttgattcactcttgactccgatggagcccagcgagtttcttcgcggtttaaatgaacgagtcggtgaggctctggggcgggagttccctgttgatgcaacgccgggtcagttgatcagcgcatacatgagcgatccgaagtacagggaaagcaacggtattcgtggtgacgatggcattctccaaggtaagctccatcaatacgacaatgctgctgagatccggaagatctgtgaagtgcagcgtttaggtacggatgttgaaaaactcctagttcgaaaagttttcttcgcaaagtctcctaggggcagcgcagccggtttggttggtcatgatgagcttccggggcaggaaaaacacattcgtgcagaaaaagcgcatcctgatttccagctcttccgaattgtttcagtactgaccaatctacgtatccgcgaggcaggagcggaacgttgcctgactccagacgagttgagtggactgacggatttccttgttatcgcaggattgaagcagcgggtaacttgggcggatcttgcggataacttgggaatcgaacgcgctgatctgcgtggaacagcacgtccttcagttgatggagagcccgctttacgcttcccaccaacggatgtcaccaccgagaagatcatggcttcaaaggtcaaatggctcaaggaatggtggaagtctgccgatagtgagcgacgcggatacatggtcgatgcgctttcaaattcgggcgggtcaacggatgacaacgacctagatgatgagatcgcagaactccttgagcgggcaaccgaagatgaacagacggagctcgagaagatccagcttcctcaaggccgggcagcctattccttggatagcttgcgcaagctcaccgagcggatgctaagtgaaggtgtggacctgcacaccgctcgaaagcagcttttcaatgtagacgatgattggcgacccgagcctgaggcaatcgaagctccggttggaaaccccgcagttgatcgtgttcttaagcaggttgcacgttggttgagtatggccacggatcgttggggtgctcccgacgtcatcaacattgagcacacgcgtgatggtttgggttcagagaaggtcgcgcgagaactcttgcgtgagagccagaaacggcaagatctcaaccagaagaatatggatcagatgatccaagaactggggatctcgggtaaggctcgtcgttcttctttgcttaagcaccaggcgattcagcgtcagaattcgatgtgtttgtactgcggtacccagatcggttttgaaactgcagagatggaccatattgttcctcgtgcgaattcaggatcctcgaatgaacgttcgaatcttgctgctgtctgtcgtgcctgtaatcaccaaaagggtgctattccttttgcagcatgggcgacctcgggacaggcacgtgcgggggtgtctttggatggggcaattgagcgagtgcgtgcgtgggaacgcgatccgggaatgagcccgaagcaatacgctcacttccgaagcgaagtgatttcccgcttgaagtcgcgcaagccggatgaagagttcgatggtcgttcaatggaatccgttgcatggatggcgattgagctccgtacgcgtattgatggcttctaccggaagctcaaagcagagtcgactccgagcattggtatttaccgtggtcagctgactgcagaagcacgtaaagcctcgggatttgagaatcgcgtcaacctgattggcgggaagggtaagactcgttttgatcgcaggcaccatgcgatggatgcgctggcgatcgcgttaatgaatcaatctgtttcgcaaaccttggggttgcgtgtcaatatgcgtgaatctcagcggattactggtcaagaagaaacctggaagaacttctatgggaagccgggtcacgccagtgagcgttttgagcagtggcgagagtcgatgctgcgcgcagtcgagctcttcaatattgagctcgcgaagaatactgttcccttcgttgagaatgttcgcctgcgtgtcggttcaagcaaggtgcacgatgatacggttcgaaagttcactcacgcaaagttgggggctgcactctctgctgatgtgattgatcgggctgaaacgcctgccctgtggacggctctcacgcgacttcctgattttgatccgaagaatggtctgccggaagatccgaaacgtgaaattagggttcacggccacaagatcaccgcagatgaggatctcaatttctttgcatcaccgtcggcatgcctgaaggttcgcggcggatatgttgagattggtggttcaatccaccatgcgcggatctatcgggtcgaagggaagaagacaacgtacgccatggttcgagtcttctccaccgacttggtgcgcatgacccacgaagatgttttcaccgctgagctcaagccttcgacgatttctatgcggacagcctatccaaagatccgaaaggcactagctgatgggaccgcaactcagattgggtggctggtcgaaggtgatgagctgcagattgagactgataagtatttgagtggtcccgttgcggaagcgcttactaaatacccgcagttgaggcaatggagagttgcggggttcccggaccccacgcgtttgcgcttgcgtccattgcttctatcctctgaaggattacctgaggatgaatctcaaggattaagggaaattctagaggggaagggatggtggccggcaattaatatgttgctggctactggtgaggttttggttgtacgtcgaaactgtctcggtgagcaacgtttcagttcacagaattcgcttcccaccagtcaattgctgaggtagcgcatggcagaacagtggcgcgtgattgacctctgtgaattccaggggcgacttcattctgtccgtggaggaattgaggtgtgccctgaagatggacaaccggttgttcttcccgttgcggagttagctgttgttcttgtcggcatgaaggttgatctcagcgccgctgttctgcatcgcttggctgaagcagatgttgcagttctcttctgcgattggcgaggaatccctgagggagcctgctactcatggtcggatcacggtcgagttgctgctcgtcatcgtgcgcaggccgatatgaccgttccgcgaaaaaagaatgcctggttccggatcgttcgggcaaaaattgaagggcaggccaacgtccttcagaatcttaactgttcgggaagtagcgagctctttgctcttgcagatcaggtgcgttcaggcgatccggacaatattgaggcccgagccgcacgcttttactggtcccgtgttcttgat

SEQ ID NO: 4374 - DNA, 4117 bp, synthetic construct
  misc_feature 1..4117: note = Synthetic
  source 1..4117: mol_type = other DNA
tggcctatgaacgctcatatgtcaggaatcgacgagctaaaccaggagatggggcgggggcagagtggggaattgatgttgttcgaaaaggtgcttgcgcgcagtgctaagcaggggttacagtagtgccaactgattctcaataaggtgccgacaggttagcggtactgattgctccaccggccttcgggccggtatttttttaccctggtgcgcatggttgacacggttcacacagctttaaaatcgctgaaaaatagctgcggaaactgtacaaaaatgcttgttgtctgtggcatgatttccccatgacagagattaatgatgatcttcgctaccgtgtcggcattgacgtcggcttgaaatcaattggtttttgcgcggttgaggttgataacaaggatcagccattgcgcctgctgaactccatggtgttcattcacgacgccggcgttgacccgaatgagaataaggctgcgaagagccgtaagctcactgcgggcgtcgcacggcggactcagcgcagaaccgctcagaataggcgccgtcttgcggagctcgaccgtgtgctgtctgaagaactgcattggccgttgccgaatcttgaggattttgaggatccctacgagccgtggcatacccgcgcggagcttgtcgatcactacattgaggatgagagcggacgcgttgaggctctctcgcttgcaattaggcacattgcgaggcatcgaggttggcgaaatccgtattcaaaagttaaatccctcctagcagaagtccctccaagcaatcttttgtggagtgaagatccagagttgcaggaaacaaccttaaatggtcgtgtagctaaagctctaggacggagttttgcacctgaaacgacacccggacaacttattagtgcatatttgtcagatcctaggtatgcaccccagatgggacgatctttcagtttctctggtctccgccaacgtcggggtgccgatgaggcttatatgaagaaagcatatgctgatcgggtatttttagggaaactaatgcagcatgactatgctgccgagattcgacagatctgtaagacgcagcgaattgatgaggatacacaaaagctattaatttgtgcggtatttgacgcgaaatctccgaagggctcgtctaagccgttggttgggaaggatgaattacctggccaagaagaacattatcgagctgagaaagctcacccatcttttcaacgattcaggattatcacagttctaacgaatctacgtattcaagaagggatatcgaagcgtaccctaacaatcgaggaacttcagaagggggtgaagtttctatttgaagattcagtaggcgctgacgtgagctggacagaccttgccgaaaaattaggggttactcgtactgatttattaggaactgcttcaccttcgtatgacggttcaccggctctgcggtttccaccaacggatgttaccactgagaagatcatggcttcaaaagtcaaatggctcaaggaatggtggcagcgtgcagattttgaacagcgtggcttcatggtggatgcgttgtcgaattcaggcggatcgagcaatgatggcgcgattaaggatgaaatcgcagaagtcctccagcaggctacagctgaagattggactgaaattgataagattcagcttccgacaggtcgggccgcgtattcggtcgatagtttaaataaactcgctaatgtcatgctgagtgaaggtgtggatctgtacagtgcacggtgtcgtttattcaatgttgaaagcgattgggaaccaactcctgaagaaataggggcacccgtggggaatcctgctgtaaatcgtgttctaaagcaggttgcaaaatggctccgaatggcaacggagcggtggggcactccagtcgcaattaatatagagcacaccagagatggactgaaatcggcacgagtcgccgccgagatcgctacaaagggtcaaaagcatagggatgcgcatcaacaagcggttgacgaaatagtgactgaattagggattacaggcaaactccgacgttcggccatgcttcgttactttgctgtaaggcgacagaataaccagtgcttgtactgcgggtgtcctatttcctacgaaacagcggaaatggatcacattattccccgtgcaaatttagcgtcaacgaatagccgttctaaccttgccgcggtctgtcatcggtgcaatcttcaaaaagggcgcattccatttgcgcaatgggctgaatctgtaagctctcctgctgaggtttcattaaaagcaacacttgcacgtgtggcgcagtggaaagcaactccagaattcacggcagccgaattcaaaagtttcaagaaagatctagttaaacgactaaaatcaaagcaacctgaagaagaattcgatggacgatcgatggagtctgttgcatggatggctattgagctacgttcccgaattcagggttactaccgcgtgcgaggatcaggatttacaccacacatcgggatttatcgtggtcaattgacagctgaagctcgacgagcgtcaggctttgaaaatcgagtgaacctgatcgggggaagaggaaaaactcgatttgatcgtaggcatcatgcaatggatgcgttagtaattgcgcttatgaatgacagcgttgcgcgttcacttgcttggcgtgtgaaccgccgtgagagtcaactcgttacaggtgagcatgaaacgtggaaagacttgtttgatcccagccaaaatgggtcacgagagcgtttcgagcgatggtgtgagtcgatgttggtggcggtagagctgttcaatatcgcacttgcagaggatgcggtagttttccacgaaaacgtccgtttgcgtgtcaattcaagcaaggtacacaaagacaaggtcgtctcgttcaatcagcataaatcaaagatcgtaggtgttcgtaaagatggaacgccgaagatcaaagaaactggtgttcagctgcctcttggatctgttctttccgtcgatttaattgatcgtgcggagacacctgccctttggactgccttgactcgtctttctgattttgatccaataacaggtctcccagaagatgcaaaccgtgaaatttgggttcatggacgtcaaatccttggcgatgatttgattaatttcttcggttcatctgcggcttaccttaaagttcgcggaggttacgtaggcatcggtgattcaattcaccatgcgcggatctaccgaattaacgggaagaagacaacgtacgccatggtccgagtcttttcgactgacttggtgcgcatgactcatgaagatgtctttaccgctacgctcaagccgtcaacaatttccatgcgcactgctgatcctaatattcgcaaggctatcgcaaatggaactgccacgcagatagggtggttggttgaaggtgatgagttgcagattgaaacggataagtacgcgagcggatctatcggtgaggtgcttgcgcagtatccgcagctcagaagctggagggttgcgggtttctacggtgtgacgcagttacgactacgcccttacatactggctgcagaagggattccatctgaggcctcagaaagcttgagaagagttgttgaggggaaaggatggcgtccttcaattaacgtcctgcttagtagcggctgcgtaaaggttgttcgacgaaattgtcttggggaacctcgctttaacgtaaaatcttcacttccggttagtcaaatactgaggtagaaacgtggcagaacagtggcgcgtgatcgacctatgtgaattccaggggcaacttcgttctgttcgtggaggaatagaggtgtgtcctgaagacggacaaccggttgttcttcccgttgcagagttggccgttgttcttatcggcatgaaggttgatctcactgccgctgttctgcaccgtttggccgacgcagatgtttctgtcctcttctgtgattggcgaggaatccctgagggtgcctgctattcatggtcggatcatggtcgagttgctgcacggcatcgtgcgcaggccgatatgaccgtccctcgaaaaaagaatgcctggttccggattgttc

SEQ ID NO: 4375 - DNA, 23081 bp, synthetic construct
  misc_feature 1..23081: note = Synthetic
  source 1..23081: mol_type = other DNA
agtgatggttgggatgtgccgagcgattgtatcatgcgcttgcttcgcatatcgccgttcctgtcaggcggtgcggcgcgggcacctttcgactctggctctctcagcttcaccgaggtctgggaggtgtggttaatggggggcggtattcccgaggcgggcaccgcgatcgcgggaatcatgacgaagaagttgtcgcgagtcgtcgcgcgcctgaaagcgttttacgagcgatttagaaacctgggagcggactgataagcggtaggcgccacaagaaagccgtccctcaggtcggtcccggcgctcgtacaaagaacgatgaccgtgcctcgctactccatgatgggcgaccgattctgcggcgtagggaatttcctcgcatgttgctcgtatcggtcgagggcggcgagtcgaacggcatcatatttcgaatcgtttgccggaaccattgcccatatctcgtgttggtcgacgtgactacctggactgccgctcatgaaggcgctggcgtggcatctcccaggcgccccgcccttacggaagactcaagttgcagcggttgcaaagaatcggctcatggtcgtgcagcagttttaccggaggtttaattgggcctgcggggtaaaccagttctcgatatgagatcgacgcgtgtgccgacgcaaatggagtaggagagggctatctgacgatcgccaaggagcaacctgttttggagtaggagcagcgtctctggttcgcgcgtacggaggagctttgaaaccgagctgctcggtttgtcgaagaccctaacctcctgagtctggacgatgccagcgggtacgttgttcagtttgaacaagtttgggaacaaggcgcatgattgtgccgattgggcgttagctgtgagcgcaacgaggcagttatcaattgattcgagaaacaggtcaagctgggcgacgtccctatcgttgcttgccatgagatagtcttcgagccagtcgaggtcggagggtaaggatccgaccggcatcgcttcgtaacgcttgttcgcaaggttctcgtcggcaaagggaaagcaatactttgcaagggagcgaacggcttttgggtggcagaggtatgagccgcttccctgcttgctatatatgactccttggtcgatgagcgcctgcagtccgcttcttaatgacgagcgggtgatgccgagctcctccgcaagggatcgttcagttggaagtcggtctcctgctttgaggccgtgcgtttcaataaattgaagtacgtattcttcaacgtcgcttgagagaagattgaaaagcttcggcatgaggatccctagatgccctggtagttgatcgagtagacgccgtctgagatgatggcatcagtatagtagctgcagaatgcaggtagaacggcgacgtcggtgaactcaacgacgttgttccctccgtcgagcgcggtgatttggatgcgcatgacgggggtgccctccgccgtgccaagcgctcgggcgttgctttgtcgggcgcgggtactcgacagtttctggttgatgtgctggatctcgacgtggttcatccggaaggtgtcgtaaagggagtagaccttaaaatctatcgattcgataccctttatgagcgacgggatcgtgaacgtgttttcgacggagattgggactccgttgccggagcgcaagcggacaatctggaatagctcagagctttcggggacatcgaagatacgggagaggcagaatcctgccgagcggagctgggtcctcaatatgctcgaggacggttcgtagccggcgcgactaaggagctcgttcatacccttgaagtgtatggcggcatcgtcgatatcggtttgcatgacaaacgttcctttgccatggacccgcttgagtcggcccgtatcgacaaggatatcgattgccgacctgatcgttgcgcggctcacttcaaatgtatcggcgagtgtcctctcggaagggatgcgcgttccgcagggatatgcgcccgaggctattccgtcttgcagcgctttagcaatatcgtcgatcgaattcatcagtgataactcttctctaaccacatggtcaggtaaatataccaaataacggtggaaaactaccgttcatggcaaaaatggtagattgaaaagtcatagtggttgtcatttttgattaataggtatatctataataacaagtggttgcaacgcttagtaattagatcaccgcatcttggtatgacgaggaaggaattgacatggttggatatgacgaagcgatctatcgcgaggtacttgagaaggcaattgataacatcgacgaaatcaacgcggcggttgatgggatctgcgagaagggctacaagaacctctacctggttggatctggtggtacttattccatggcaagtcctgttacctaccttctcaagacgcattcttctatcccctggtactgggagatcgccgcggagctcgtgaaagcaaagccggtgtcgctcggcaaggattctgtcgtaatcacggcatctctttcgggaaccactgtcgagacaatcgaggcagcgaagtacgcccagtccctcggtgctaaggtcatttctttggttggagaggatggctgcccactgtccgaatgctcggattacgttttcgagaacaagaaggcatcgaacgacaacctcgtcgaggagatctatatccagtactttgccatcgccgcccgcttcatgaagaataacggggagttccccgagtacgacagcttcatgggcgccctcaagaagatgcccgatgttctccagggcgtgagggagcagcaggacgccgcggcgctcgagttcgcaacgaggcacaaggatactccgttccacatgtgcgttggctccggcaacgtttggggcgagacctactgcttcgcgatgtgcgtgctcgaggagatgcagtggatcgcgaccaagtccatccatgctgcggaattcttccacggcaccattgagatgaccgatcccgaaatgagcttcatgctctttaagagcgaggacgagacccgtcccctggttgaccgagtcgagcggttcgtgcgccagcataccgacaaagttcaggtatgggacactagggacttcaaacttgagggagtcgaagagagcgtccgcccgctcgtctcccctctggtcatgtccgcgatgctggagcgcgtgagcacccatctctcgatccttcgcgatcacgatcttgatatacgccgctactatcgggtggttgagtactaatgattaagctattgcgcgtcgacgagcgcctcgttcacggccaggtggcgcttgcgtggaccaactccctcaatgccgattgcatcttcgtggttaacgatgacgttagaaaagacaagctccgcctgacgacgcttaagatggcggtgcccgccggcgtcaaattcgtctccaaaagcgttgatgatgctgtcgaggttcttaactccggtaagacggataaatacaagatgcttatcgtcgtcgacagcgtggcggatgctctcaagcttgcgaagggcaccggactcgtcaccagcgtgaaccttggcaacatgaagcgtcttgaaggccgccggcagcttacgtcttcggtattcgctacggacgaggaaatcggggcgattcgagagctcctctccatgggagtctcggtagggtgccagccggtcccaacggaggcgagcgttcccgtcgaaacacttatctaggtggggaactaatttacgagatatagttttgagaggtgggataatgattattcaagcagccctagtcgccgttgttgcgttcctcgcttcggtcgatgaacaactatttggtgcaagcatgatggcacgccccctattcaccggcatgctggtcggtgcgattatgggcgatatccagacgggtgtaaccgtcggagcggctcttgaagcaatgtttatgggctccatcatggttggcagcgccgttccccccgaggtgtacgcttcgagtacgttgagcatcgccgtggcgataaatgccggtactggcgctggttctgccgtcgcgctggctctgcccctttctgtcttcttgcagatgtggagaaatttctgctatgccgtcccggggagctgggctggaacgaagatccaggaggcactggacgcacgcgatcttaaaagggcaaatattctgcatcttacggtcgtgcctctgtctcttggcattccctcggcgctgctggtgttcatttccttgtattttggcgcggacggaatcaatgcggcgctgaacgcgattccgcaggttgtactcgacggattcaacgttgcggctggcgttttgtcttgtgtcggcttggccatgcttatcaagatcatgtcgaacaacaagattcttccttacctgttcctgggattcattgcggtcgtttacctgggcatggatgttatcggcgtcgcggttgcgggtctttgcgttgccctcattgcagtattcaacatgaagtttgatgaagaggaggacttctaatgagcgagcaggcttttcaggtaaataagcagggcgtcgggacgatgacccccgcggagcagcgcagtatattctggcgttcgtttaccattcagggttcttggtcgttcgacaagatgatggcgtacggatgcatgtacgccctcgagaagccccttcgtagaatctattcgagcgatgatgacttctacgctgccctcgaaaggcataccgagaccttcaatatcacgccccatgtctctccgttcgtcctaagcctggccgtcgccatggaggaggaggcggcaaagaatccggattttgacgtgaaggcaatcaataacctcaaggttggcctgatgggtcccctttcgggaatcggtgactcattcttctggggaacgtttcgagtaatctgcgccggaatcggaatcggcctcgcctcgaccggcaacatgatgggcagcatcctctattttcttttgtacaccgcgattcattttgcaaccaaaatacttgcgggaaaactcggttatcagctgggaacccagtttttggagaagtcggaagaggcgcatcttatggaacgcctttcttatggcgcatcgatccttggtatgaccgttatcggcgcgatgatcgcgaccatggtctcgctttccaccagcttaacgtttacgcttggcggtacggaaaccgcgctgcagtctatcttcgatcagatcttcccgaatttgctgccccttgccgcgactttcatttgcgtctggctgcttaataaaaacgttaagaccatttacatcatccttggaatcttcgtactcagcgttttgggatgcatgcttggcatcttttgatttgaggactgaagccccttcgcggatcgcgagctgagaggctaaacgaaaatacatacagcttcaagatgcggttggaagcgttcgattcggtcatttgccggattgagcgcttctacttaatccatggcaaatttcaggctcttcgtggattcgcatgggtatacgcttcggaaaaagcgagtccgatacgaatggcggtctacacaatcgatgggcgcttgcagtcgcctgatagatttgtatagatggcgatatacggccggccttcaagcggtctacgcatttctgggtatgagccccatatgcgagtgggcaacaaggcggaggcctcccatgatctacgctatttctgatatccacggctgcctggacgagttcgaggaggcgctcgccggcgtcgacctctccgaagtggggtcgcgcctggtgctgctcggcgagtactgtgacagggggcaagggctcctacgacatcttcccttcagcctcttgttgaggaacccaagatgaataccgagagcatcggtggtttgagcttgaagtcgggtttttgggagattcgtccagcgtttaaggacgacccctatgatccgcgcggactgcatctatctcgaagcgtggtgggccttgcacgcgattcgcaaggcaggatttatgaccgcgttcgtatcatcttcgcctcgcgccttgtgtggggcgcgatgtttctggacttgtttacagaaagcgcgccatatatgttggcatgcaggtgacgtcaccgtcttgtcgaaggtcttttgtatacgccaggaagcgtcgcccaatcctggatgcatatttctcgccaaacgcatcaagtgaggcatgggttttgtatcccgaggacttgacctcaacgggagaaatctttttaccgtcgcttacaacaaagtcaatctcgtagttgcggtttgcgcccttttttggccaggtgtgataaaacagcctgtgtccttgtgcgaccagttcctgcgcaacgacgttttcgtaaaccgagccgagatttgccggcagcttgtcagaaagcaatgcttggtacacggtgttatcggtaaaatccttgtctttgaacataagggttacaaacagtcccgtatcagcaaggtatagtttaaatttctcgagatctatgcttgaagacattcccacattgggatcgtttgcgtgataggcaacaagcgttgtcttagactcctttagttctgatatctcctcaagtacgtcggatgcctggcgattggccagcactgctgaaacctggtaccgagatgcctttttggagagttgcgctggaatggcgtcaaagagaagggatagcgctccggacgggctgatcttatgaaagtcgtcttcgtaaagcgagatgatgccgcgtttaacggtatcgactgcctggaggttgttggtttctatatatgagctgacggcttgaggcatgccgccaactagcatgtaaagacggaagtccctcatgagcttgcgattgagctggtcgccaagcggacgcctctcttcaaaagttttctttagtagagggattgtgcccgtatcgccaagtgcccatttgaactcttcaaaatccatgggccgcatctgaagtttatattcttcgctgggaataacaattccttggacgttccttctaatcgatatgagcgagccggtctctatatagtcatagcgaccgtctgcgactagatgtttgattgcttgccgcgcctttgggcagagctgcacctcgtcaaagataattgctgattctcgtttatggagctgaactccgtaatgcagctgcaattgtaaaaaaagatagtccaaatccgagacatcctcgaacagctctccaacagattgggatgcggctgagaaatccacaaggatgtgggtgcgatactcgttttgtgcgaacgctttggcaacagtggacttgccaacgcgccggggcccttcgataagggctgccgttctgccgctatccctgcgcttccattccagcaggtattcatatatctttcgcgtgaacatagccctccaacccgatttccgcactttttattttagcgatttacccgatttccgcactttttattttagcgatttacccgatttccgcactttctgagtcttgagccaaggctcgcggcaggcgttgccatggcgcgcaagcgtgcggaacaagcctaaggaaaacccggtctggaggtcgatggcgtcctctgctagcgtggtgagggtacaaggctatgacctacaaggtgtgaccatgcgagatgcgagggcggccgtatgaataaccaggcgttggacacgcttaaaacctactttggctatggatctttccgtcccgggcaggaccgcatggtgcaggccatcctgtctggccgcgatgccttgggagtcatgcccaccggtgccggcaagtccatctgctaccaggtgcccgcgctcatgctgaagggactcacgctggtggtgagcccgctggtgtcgctcatgggcgaccaggtgcgttcgctgctggcggcgggcgcgcatccttcatacctcaactcatcccttaccgtgccgcagcagaacacggtactgcgtcgcgcggaagacggatggtaccagatcatgtacgtagcgcccgagcgcttggcagatccgcgctttatggagttcgcgcaacgtctggcgtcccccggcggttacggcattccgctggtggcggtggacgaggcccactgcgtttcccaatggggccaggattttcgcccatcctatctgcagatctccgcattcatagaggccctgccgcagcgtccggtggtagcggccttcacggctaccgctaccgagcgcgtgcgggaggacattgtccatatgctcgatttgcgctcgccgcagaccgtggtgaccggtttcgaccgacccaatctgttctttggagtggaagagctgggcgataaggcgaaggctgcctggatacgctcctatgtcgcgcagcatagccaggagagcggcatcatctactgctcgactcgcaaggcggtggacgagctttccgcggagctgtcgctggcgttgatgccccaaggtatccgggtggggcgctaccacgcgggcttgggtaacgatgagcgaacgcaaaaccaggcggactttatcgacgaccgcgtgccggtgatggtggccaccaatgcgtttggcatgggtatcgacaagcccaacgtgcgctacgtgattcacaacaacgtgccggaaagcatcgaggcgtattaccaagaggcgggccgcgccggccgcgacggcgatcccgccagctgctatctgctgtggaacggcaacgatttcagactgcgccggttcttgatagagaagagccgtgatgcggcggggctggacgaggacggcttgccgcgtcccgaccttgaccaggagcagcttgagcgcgcctgccagaaccgttaccgtcttctgcgccagatggagggctactgccagactaccgggtgcttgcgcgagtacatgctccgctattttggggacgagggcgcattgccggatgcgcggatgggcgcgcagctgggtgccagccagcccttgtccgcaaagagcgatgattgcggcgcatgctccaactgccttaccgagtttgaggtggaggacgtgacgcaggttgcccgcgcgatcgtggagtttgtggcgccgcgggcgggtcggtttggcaagacgcttatagccgatgccctgcacggcgccaacaacgagcgggtgcgcaactgccatctcgatgaggcggcgggatacggcgggctggctggttgctccctggcgcgtatcaaggatgtggtggaccagctcgcgggccgcggatacctttccgtatcgcaagggcagtatcccgtgatcgcgctggggccgcgtgcggtcgaggtgctgggagagagctctggcgacggggctgcgtctgcgacgccgtttgaattcactatcaagcgcaggtccagcaagcgctccggatctgcccgcgcccgccgtgcggtcgatttgctgcgcgaggaagccgccctggatgctcggcctcgcgtgggcgatgacgccgagctgttcgagagcctgcgcgagctgcgtacggattttgcgcgcgagcggggttgggcgccctatatggtgtgcagcgacgcggctcttcgcggcatgtgccgtcggcgcccccatagccttgaggagcttttggatgttccgggcatcggcgagaagaaggcggcggactttggtcgcgcgtttttggagcgcatcgaggagtttgaggaccgacatttgggtgaggtttagccgctgttgcaaaagtccagctaagcgctgtgctcacacatttttccttggaactttgtgcgagactcccacattttgcttgggaagttgcccgccggcgctaattgtccatttgaccaaagattagaaatggaaggctttgtttgctgctcggctctttccgtgttggcgtggaggaatctatgggagggccaaaaagctccccgaacggcaggatgaaagtcatgtccatgtgaggtggtacccttctggtatccaatctatagaagggggaatgctctcatggaatctttggtcaatcgggaagtgggagggctcggaaaacctcgctatttggtgatggggatggatccaggtattaagagttgcggttttgcgttgctagatctaaataatcaggagattttggaaatggggtcgagattgtttgacgcccctacgcatccaaagactaagcagagcatggcggtcatacgccgaggatacaggtcgacacgtcgcaacatcgatcgcacccaggatcgccttaagcattgcctgaagaccctaaagcgtttcgacgtcgttcccgaagatgctgacaaagaattctttcatacagtaaagggcgataaacagcccattctgcttcgcactgacggattgaacagattgcttaccagccgtgagtgggctctagttctttattcgctctgtaaacgtcgcggttatattccccacggtgaaggatccgactccggtacgagcgaagatggcaaggtattggcggcgctcaaagcgaatgagagggcatttgcggatgcgggctataggacggtcggggagtggctcgcttctcttcctcaaagtaggaatcgcggcgggaactacgataagtgcgtgacccacgcccaattgaccgatgaggtccgcacgctctttgaagctcagcgcggctttggttcccccgttgcttcccaagagcttgaggatgcctatattgaagtatttgattgggaaaggtcacgcgaagagttcgataagaggacgtacgggcttgtgggcacgtgctcgtattttcccaacgagaagagggcggcacgctgcacgctgacaagcgaaatggtggcggcatatggtgcgctggggaatatcacaatcgtaaagcgtgatggctccactcatccgctgtccgccgttgaaagggaccagtgcatcgacatcttatttgcggttgatcccatgaaaggaaataagacctgtgcggtgaaatatggcttcttgagaaagcggctcgatttggaatccggcgactacttcaagggcgtgccgctggatgatgagaagaaccgggaggtgttcaagccaaagggctggcgttccttgcgatctgttcttcatgagacaaatagagagcttcttgtaaaactgcatgatgacagggatcttgctgacgctgtcatggaggcggtcgcctactcttcctcggttgacgttctgaaatctcagctgagctcgctcgatctgtcgaatggggagattgagtctatttgcgccatgccgtactcctcgaaagttttgaacggttatggtaatcgatctaaaaaggcacttgatatcttgcttggttgcttcgaagaccctgacgttctgtctcttactgatgcagaggatgcgagcggacttggggcagtgcgcatgcagggagcggcgatcgataagggtgaaaggctgattccctatgagacttggattgccttaactggtcgcacaaataataatccggtggttatacgcgctctttctcaaatgcgaaaagtggttaacgccgtatgtcgcaaatggggcgttccggatgaaatacatgtagagcttgatcgagagttgcgacttcctaaaaaggcaaaagacgagatcgccaaagcaaagaagaggaacgagaaggatcgacaaagggttgctgctcagattgcggagctgcttgggtgctcagcagatgatgtaaagggtgactatatcgagaaatatcgtctttgggaggagcaggaatgcttcgatatttattcgggggaaaagatcgaagttgatcgactgattcgagaagaaacttacacccagatcgatcacgtcctccccttctctcggacgggagacaactctcgtcacaacaaggtgcttgttttggcgcgcagtaatcagttgaagcgcgaacagactccctacgaatggatgacgtctaataccgaaggcgctccttcttgggatgcatttaagaggcgggtggaagaaaacaagaagctttccagaaggaagaagaacttcctcctggagaaagatttggtttctaaggaaggggagttccagagtagaaatatgacggataccgcgtatatgtcgcgtgaggtctgcgcgtatctttccgattgcctgcaatttccagatgatggtttgaaaaatcatattgtaccgattgctggtcgtgccacggcatggttgcgtcgtcaatggggattgaactttggtgcaaccggcgagaaagatcgatctgacgataggcatcatgctaccgacgcctgcgttatcgctgcttgtagcagaagcctggtaatcaagaccgcgaaggtgatgaagcagactcactggcaggtcacgcgagatatgactcgtgagcagcgccgttctgcgcgaatgaaggctctggagggaactatgccttggagcactttcgcaaacgaggtgagggagcgctggaaagttaccgttcccactcgttttgttccaagaaagggcaggggagaactgtacgggcagacggtttattcgtatctgggtgtggatgaatctggaaaggaccttggaagaaaaaaggggtcaaataaaaagattgtcatgggcaacgcagtaatttccaaggatggtaaatcgatggtaaagataagcgaaatgctgtgtttgcgtctatggtttgatcctgacgctaagggtcggggtggaaagaaggggaggtggtactccgaccctgtttataaggcggatttgggtgtcattcaaagcaatgcttatataccgagggtggcaaaagctcatcgtggaaggaaggcctggtctccggttccccaggccgcgctaaggcgcagcccggttgtcatctatttgggtgatgtcgtaaaggtaggcgatgtggtcggcaggtttgctggtttcgatatcgatagcgcaaactggtcatttgtagactgtttagatggaaaggggattgcttttccgacagtcggatcgcttacatctgaacttcgccctgaagtaatacgggaaaaagttcttggaaatgcggaggtatataggtctactcaagatgatggcacctccagtggagcagattagcaatttcaaatggcattgctcctgaagcgccttctgagcaattgtcgtcctgagtacgcgcccttccccaaggtgatacgctcctttttatcttccttgaacagcttcctatgtcttgagtacgcgcccttccccaaggtgatacgcttattagcttgcggattagataggctttagagtcttgagtacgcgcccttccccaaggtgatacgctagagagcgccataaaggctcttatgtcacagtcttgagtacgcgcccttccccaaggtgatacgctctgagtaaggcggtcggcatcggggttgtcgtcttgagtacgcgcccttccccaaggtgatacgctaaaacaagggccgcaccagcaacgccggcagtcttgagtacgcgcccttccccaaggtgatacgctcacgaactgaacgttctgcgcggcgtgcgtgtcttgagtacgcgcccttccccaaggtgatacgctgcaacggacgaggtgatgacgcgtctctcagtcttgagtacgcgcccttccccaaggtgatacgctgagtgctgctcgtccgacctcacgcacgaggtcttgagtacgcgcccttccccaaggtgatacgctaaggcgggcgcagatatgctcccagtccatgtcttgagtacgcgcccttccccaaggtgatacgctgtcaaaggcacggagcgaccatcaaattacgtcttgagtacgcgcccttccccaaggtgatacgcttcatgggtgagcggtcaacaatcgccttgagtcttgagtacgcgcccttccccaaggtgatacgctaattgtgtgccgcacgaccgaggcgatacggtcttgagtacgcgcccttccccaaggtgatacgctgaaggagaaggtgtacgtgccgatcccgaggtcttgagtacgcgcccttccccaaggtgatacgctgatgccgtcgtagatgagcaccgacgccgggtcttgagtacgcgccctcccccaaggtgatacgctgcaggtcagaatcaatgggactgccagacagtcttgagtacgcgccctcccccaaggtgatacgctttactacgttacctcgaacatccccaacaagtcttgagtacgcgccctcccccaaggtgatacgctgttctcccactggttgttatggacaatctggtcttgagtacgcgccctcccccaaggtgatacgctatgtatcgacagaaaggtccctctagctggggacctttctggtttatagccaaataatcgactgtattttgtctctggattgctttcctggtggccttttttcaaaggatcagggttcgtagaagctatattgattcgagtaaaaaatgtgtgcaagatatggatactgcacaaaaaccggagagaaaaaaagtaagccgttcaattgaaaaactattgctttcgcccaaaaaaagttcgccccgcacaatcaattgactgtacgggggtaactttacgggtaagccacaatgtggctccccttgtctggagccgcgcccttccccaaggtgagctgctttcgacataaacctattgtagcgcttaatcgggggagtatgttgagaaaatggctcagcggacaatcttgatacagaataaggcgcatttgtgtgttaggcacggactgctgagcgtcgaagtcgaagatggtggcgttgcgaccatcccgcttgaggacatctgggtggttattatcgagtgccatatggttacagtgaccatagcctgtatgtcaaaactggtggacgccggcatagggataatgacttgtggacgcgatcatatgcctaacgggctgctgctgccgttgggagcgcattcgcgacacgcaagaattgttgaagatcagctggcaatgtcgcttccatttaaaaagcagctctggaagcgaatcgtagaggcaaaaataaacaatcaatctgccgtattagaagagatgggcctttctggaaaaacgttgcgcgcttacgccaagggtgttcagtccggagacaaagataatcgcgagggcgctgctgctgcggagtatttcaaaagcctcattctcgatggcacaagacgggatagcgctgagagcgcggctctcgattacggatacggtgtcctaagggcgggaattgggaggactgcagttggcggaggttggcttgtttctcagggcatccatcaccacagcgtttataacgccttcaatcttgtcgatgaccttatcgagccatttaggccacttgttgatttgattgtgatgagctacgggattgaagagccgttggagccaaaggacaaggtgctgcttgctcgggtttttgagcacgtgatgactatggatggaaaaagatgcggttgccagcaatgcattgagatgatgctgtcctcattgaggacggctgttttagaaaaggatccaaaaaagttgatgctgccaaagctggaaggcttggagttggtgaagttggagtaggtgataagggatgagggttatgaggttgctggttctttttgatcttccgaccggtagcaaggcggaaagaaaatcatacgcagcttttaggaagttcttgattgaggacggctaccatatggagcagttttcagtctattcgcgcttgctcttgacccgcgaatcggtgtcaacgcatgtggcaaggttaaaatgcaaccttccaagtgctggtgaggttacagtgctgcaaatgacggagaaacaatacgaagaccgactggttttgctgagcgaacataaagaaaggccggtggagcagggagctcaacttacgctggtgttctaagtgcacaaagctttttgatgagaagaataaggcggggagggccaaattggatttccccactaacgtatggcggtcataaagggcagctgcagccggctccttttatcgcgccatactattaccgcccagacgaggtggttaatgctgtcgtgaatgcggctacagctggcgcggaacgtcttgggctctgcccgagccgaccttatcgtacaaccagcttcgctgcggccgatggcgctggcggcggggtgaaaattccctgcttgttggcttggccagttatgagacgggctcatccattgcagcggcctcgtcgagcagagcggtattgaaatgtaggggcctcattcttaatggcgcaacctccaatgtcttcaacctccgcaagcgccattgctcttcgttcgcggactgctgcgcgtaagcccccgcttgtgcccgctcaaacgaacgcggccccgcttctctaaggctaaaaacaacataaagatacgttcgtcccctaaataactacagttcaagtgttcaaatctggcttcccaggggctgcctgctaataatgtaaacggttcaagttgaaacggttacacaaacacactaaaccagtgatgttatagaaccagcaggtaaaagccttgatgaggggaggttgaaatggaacaggttgaacatcgttttgaggaatgccgcgctgcggcaatcgatcttggagcttcgagcggtcgcgtgatcgtgggcgtcatcgaagacggtcagagcctttccttgcatgaggtccatcggttcgaaaacggccttgtccgccatggcgagacgctcgtatgggatatggacaagatcgtcgcgcaggtcgaggcgggcttggtggccgcggcggaagccggggcgacgacatgcgccatcgatacctggggcgtcgactacggtttggtcgataacgatggcagcctgctgggtccggtggtgggctaccgagatgcccgcacggaggggctcgccgccgccttgttcgaggacggtacgcttgcagacgcctatgagaggacgggaatccccgcgttggatatcaacacgtccgttcagattgcggcgcaggttcgcgacgagggccctcttccggcggatgcgcagatcttgatggtgcccgacctgatcacgtttctgcttaccggggatcgcggaacggaggcgagcatagcctccaccacgcagcttgtagacgttacgtccaagcggtgggatgcggagctgctggggcgacttggcgtggacgatgccatggtccccgttattcggcccctgggctcggatgcgggcgaggtgaggctcggcgaccatgccggcatgcgtatggtgcgcgcgtgcgagcacgacacggccagcgcagtggcgagtattggactggagtccggcgacgcgtttatctcttgcggaacctggtcccttgttggcgttgcccgcgatacgcccctcgcaacaccggaggctctcgcagcagggttatccaacgagagcgggccggacgcgtcgacccttctgcttgcgaactgcaccgggctttggatcgcccagcagctcaagatcgaaatggaggagagccttggtcgggggctcacgtggcaggggatagccgaggaggtccgtgcttctcacgcatcgaccttcctattcgataccgaggacccttccctcgcgcggcccggcaacatgctgggaaagctggagaggcttgcccgtaaggagggcatcgagggcgacctgggcgtcgcgacgctgttcggttcggtgtatgaaagcctcgccaggcagtatgcgcaggttatcgagcgtttgcagcgggtgaccgaggagcccgttgggcggattcgcgtgataggcggcgggtcgcgcaacgccgtgctttgccagatggtggcggacgaatgcgggctgccggtaatcgcgggtcccgcggaagcatccgccgtgggaaacctgctggtccagttctgcgctcagggtgcgttttgctccctggaggacgcgcgacgcgttgtcggcccgtcgctggaatgcggaacgtatctgccgcgcgcagcaagcgatttgtaacgaaaggggcacgccttatgttgaacggcgttcccgcaaatatagggcccgatcttttgaaggtgctatccgagatgggccatggcgacgagctcgtaatcgcggacggtaactttccctctgcggcgcttgcccagcgcttggtccgagcggatggtatgggcgtgccggagatgctcgagagtgttttgaagctggtgccgctcgatacgtacgttgagagcccgctcgtgcttatggcgaccgtcgagggcgaccccgagcctcccatttggagcgtgtaccaagccatcgcggaccgctcgcaggagaagccgccggcgttaagccatatcgaccgccaagaattctacgagcgtgtcaagcgcgcctacgccgtgttggcgacaggggagcgcgaggtctacgcaaacatcattgtcaaaaagggcgttgtgcgctctgtttaagcaaaggggttgaaggtcagatgaactatccaaagattggcatacgacccgccatcgatggccgccaaggaggagtgcgcgagtcccttgaggggcagaccatggcgatggcgcaggccgccaaggagcttatcgagagctctctgcgctatgcggacggcgcgccggtcgagtgcgtggtcgcgtcccgtaccatcggcggtcgcgcggatgccgaggccgctcgttgcgagtttctcgataagaacgtcgtcgccacgctcacggttaccccgtgctggtgctacggaaccgagacgctggaccttgatccggcgaccatcaaggcggtctggggcttcaacggcacggagcgcccgggcgccgtataccttgccgcggcgatggcggcgcacgcccagtgcggtctgcccgccttcaagatttacggccatgatgtacaggacgctgacgacgcgaccattcccgcggacgtcgcaaagaagataatctcctttgcgcgcgctgccgtcgccgccgggcagatgcggggcaaggcgtacgtgaacctcggcgccagcgcgatgggcatcgcgggctcgcaggtaaacgtcgagttcttccagaagtacctgggcatgtcggttgagtttgtcgacatgaccgagatcttgcgccgcatggcgctgcatatctatgacgaggacgaggtcagccgcgcgcgtgcctggatccagcagaagtgccccgagggcgtggatatcaacctgggccgcgagctgccccgaatcatcactgactccaaggtggtcccggcagacgaggactgggatttcatcgtgcgccaggtggtcatcatccgcgacatccttttcggcaatccaaagctggccgagatgggttggctcgaggagtcgcgcggccgcaatgccatcgcgggcggcttccagggacagcgccagtggactgattggctgcccaacggagatttcgccgaggccgtcataacctccaccttcgattggaacggggcgcgccagcccatcgcgttcgccacggagaacgataccctgaacggcgcctcgatgctgttgggaaccctgttgaccaacacggcccccatcttctccgacgttcgcacgtactggagccccgaggcagtcgagcgcgtttgcggcaagcggcttgagggacgagccgccaacggcgtgctgcatctcatcaactcgggagcaaccgccttggatgcatcgggcgccgtgcgcgatgagcgcggcgagtcgatcatgaagccgttttgggagatggaccaggccgatatcgatgcctgccttgccgcgaccgattggtgccgagccaactacgagtatttccgcggcggcggcttctcgtcccacttcaagacggcgggcgagatgcctatgaccatgatccgcttgaacatggtcgcgggcatggggccgaccctgcagatcgcggagggttacacctgcgtgctgccggacgatgtccacaagaccctggatgagcgcacggacaagacgtggcccactacatggttcgcccccaggctgggagctccgggcttcgagaccgtctgggacgtcatgaaccactggggagccaaccacggcgcatcggtatacgggcacgtgggcggcgacctcatcacgctggcgagcatgctgcgcatcccggtcacgctgcacaacgttaaggacgagcgtatcttcaggccctcgctggtcgatggatttggaaccaaggacctcgaagccgcggatatggcctattgccaggcgttcggtccgctgtatcggggttagagaggagagggtatggctgatttcgatcgcgcggcacttgtcgagtacggcaagaagctggtgaacgcgggccttaccaagggtacgggcggcaatctgagcctgttcgatcgcgagcgcggactcatggcgatcacgccctcgggcatcgattttcacgacatccgtgagagcgacatcgtggtgatggattcggagggcgaggttgtcgagggctcgcgcacgccgtcgagcgagtggcagatgcaccttgagacctatctggcgcgcccggacatcgatgcggtgatccatgcccatacgatgtacgcgacggtgatggcgtgcctgcgcgagcccctacccgcgacccactatatggtcgccgtcgccggcgtggacgttccggtggcagagtacgccacctacggcacgccggagctcgcccacaacgccgtgaaggcgatgaaggggcgccgcgcggtgctgcttgcgaaccatggcatcctggcgggcgcgaacgatttgctcaacgccttcaacatcgtggaagaggttgagtactgcgcccaggtgcactgcatcgcaaagagcgttggaacccccgtcgagctgccgctttccgagatggagggcatgctcgagcgattcaagacctatggacagaaaaccgagtacaaggaggaagcatgtcagtaaagttcgttcgcatcgatgaccgcctgctgcacggccaggtagtcaccacgtggctcaagcgctacgacatcgagcaggccgtcatcgtcagcgaagaggtcgcgcaggacaagacccgccagatgattctgaagctggcggccccctcgggcctgcgcgtcgtgttcttcagccccgagaagctcatcaaggttctgcagaagtccgaggtcactcgatccacgctgctgctcttcaccaatcctcgagaggtgtacgagtgcatcgagggcggcgtcgagattcccttcctgaacgttggcaacatgagcaagaccgagtccaacgagaagatcaccgccggggtcgcggtgacccaggaggaccgctcctacttcaagaagatcatcgatgcaggggtcaacgtggagatccagatggtccccaccgacaaggtttcccagatgaaggactttattggaggtaacgactaatgtttgttcaagctttgctagtcgctctcgtgggaatcatcgccacgatcgactataacggccccctgttcatgatccaccgcccgctggtgaccggtacgttgacgggtctggtgctgggtgacatgacccagggcgtgatcatcggttcctcgctcgagctgatgtggctcggcgtcaccggcatcggcggctacactccgcccgacaccatctccggcgccatcgtgggcaccgcgctcggcatcctttccggtcagggcgccacggcgggcatcgccatcgccgttccagtcgccgtggtgacccagcagctcgacgttctcgccaagactgccgacatcgcgttcgttaagaaggccgacgccgccgcggagcgcggtgacatcagcaagatcggcctgtaccagtacgcatccctgggaatcatcgttctgttcaaggttgttccgatcttcctggcggtccttgttggcggcgagtacgtgcagtccctgttcgacatgatccccgatgtggtcatgaagggcctgaacgtcgccggcggcctgcttcccgccatcggtttcggcatgctcctcaacatgatgctgaagaagaagatgtgggtcttcctgcttgtgggctttatcgcctcagccttcctgggcatgtccacgatcggcatcacctttgtgggcgtcgccgtggcctacctgaccgtcatgatgggcaacggcttcggttccgagacccccgcccccgttgccgcccagaccgaatccgcttccaatgatgatgacgaggtgtatgacctgtgagcaccgataacaccaagatgagcgagaacgccatcaccccttccgtccttaacaagatgttcggccgcgcgctcatgtacggcgcgtcctggaactacgagcgcatgcagaacctgggcttcctctacatgatggttcccgccctcaagaggacgtacaagaacaacacccccgccatggcgcaggccatgaagcgccacctggagttcttcaatacccatcagaccgcggcccccttcatcggcggcgtcgccgcggcgatggaggagaacgagggcaacgatggtggccgcgccatcagcggcatcaaggtcggccttatgggtccgcttgccggcatcggcgactccctgatctggctcaccctggtccccatctgcttctccatcggcgcctcctattctgccgagggcggccttctgggtgttgccatcgctttgcttctgatcaacgtcatcaacgtgccccttaagtacttcggtctcaagttcggctattccagcggctccaagtttattcaggagagcgccgcccgcggcaccctggataccatcaccaacatggctatcgcccttggcctggtgctggtcggtggactgattccccagatggtgggcatcacctttggcctggagttcacccagggcgagttggtggtcagcattcaggagctcatcaacggcctcatccccggcgtgatccccatgctgctcacgctgctcatgtgctacctggtgcgtaagggcaagagccccgtcttcctgatcgtggccacgctggttgcagtcatcgtgctcactgcgctgggcgtgctcaccacggcctaagtattcgcgtcaaatgcggcgcaagcaagatttgaatagcgcggggcggttccggttcaaggg

SEQ ID NO: 4376 - DNA, 23072 bp, synthetic construct
  source 1..23072: mol_type = other DNA
  misc_feature 1..23072: note = Synthetic
acggctccgacctgcgcggaaccgccgagtggcgccgcgccgtggcgccggcgctcatccgccgcgccgtcaggcgagccgccgacaagccccgcgccgacaaggaggcctaagcatgctcgtcaccctcaccctgaacggcgcgcgcctcgagcgggacgtgcggccggacatgaccctcttcgacttctgccgagcgcacgggctcaagtccgtgaagtgcgcctgcgagacctccaactgcggcctgtgcacggtgctgctggacggcgagccggtgctctcgtgctcggtccccatggcgcgcgtcgacggccgcgaggtcaccacgctcgagggcatgcgcgacggacgccgggagctgctcgcccgctgcctcgccgaggagggcgcggagcagtgcggcttctgcgcgccgggcacggagatggccgtgctcgcgctcgacgccgcgaacccgggcgccaccgacgaggaggtccgccgctacctctcgggcaacctctgccgctgctcgggatacgcgagccagatgcgcgcggtgcgccgcttcctcgcccgccacgacaacggcggcgagctgccgccgcgcgcggtgcccgacgactccgtgaccgagtccggcgagcgccacgcccagatcgcgcgcccggtggcgaagaaggactccgacgccctgctggccgggcgccccgtctacacggccgacctcgcccccgagggcgcgctcgtggtgaagctcgtccgcagccgccacgcgcacgccctggtcacggacatcgacctcgaggcagcccgcgcgctccccggcgtcgtggccgtcttcgggccggacgacgtcccgcacaggcgcttcacgctcgcgggccagtccttcctcgagccgagcccctacgacaccgttcttctcgaccgccacgttcgatacgtgggcgacgaggtggcgatggtcgtggccgaggacgaggcctccgcatccgccgcggtgcgcgccgtcaaggtgacctacgagcagctccccgccatcgtgagcgtcgaggacgcgctcgacaaccccaccgtcatccacgacgaggacgactgggccgccggctccgacacgtccggggacccttcgcgcaacctcgtggcgcacggccagcgcgtccacggcgacctcgacgccgccctcgcctcctccgacgtggtgatcgagcgcacctatcgcacccaggccacccagcaggccatgatggagacgttccgctccttcgcctacaccgacgccttcggacggctcaccgtggtgagctccacgcaggtgcccttccacatccgtcggcaggtcgccacggcgctggggatccccaagagccaggtgcgcgtgatcaagccgcgcgtgggcggcggcttcggcgccaagcagagcgggtgcaacgaggccttcgccgcgtgggccgcgctcgccaccgggcgcccctgcgtgtgcacctacacgcgcgaggagaccatgtgctgctcgaacacccgccacgagatggtgatgcgggtgcgcgtgggcgccacgcgcgacggcgagatccgcgccatcgacctccacgcgctctcgaacgccggcgcgtacggctaccacggcaccaccacggtgacgctcgtgggcggcaaggcgctgcccatctacaaccacgccgcggcgagccgcttcacctacgacgtggtctacaccaacaccaccccgggcggtgcgtaccgcggctacggggcgacgcagggctgcttcgccgtggagtcggccgtcaacgagctcgccgacgagctcggcatagacccgtgcgagctgcgcctcaagaacctggtcaagccaggggagaccctctggcagctcaacgacgagaagctccacagctgccggctcgacgagtgcctcgggcgcgccatggagatggtgggctggggcgaccggcccctctcggaggacctcggcgaccgcgtgcgcggcatcggcgtcgccctcacgatgcagggctccggcatcgccaacgtcgacatcgccaacgtcgacatccgcctcgaggacgacggcttctacgtgctgtccatcggcgccaccgacgtggggaccggcgccgacacgatcctggcccagatggcggccgaggccctgggctgcgacgtcgaccgcgtcgtcaccaagggcgtcgacaccgacacctcccccttcgacacgggcgcctacgcgtcctcgggcacctacaccaccggcggcgccgtcgtgcgcgcggccgaggacctcgtgcgacagattcgcgagcaggcggcgagctggtggggcgtcgacgcggctgacgtggagttcgacggcgagcgcgtgtgggcgctcggctcgggcgccccgggcgaccccgagcaccagatgagcgtcgcagccatggcgaacaagatgatcggcttcgggatgcagcccggcatgctcgagggccacggctccaacgcccagccgacctccccgccgccctacatggccggcatcgccgaggtcgaggtcgacaaggcgacgggcagggtcacggtcaccgactacgccgccgtcgtggactgcggcaccgtgatcaacccggcgctcgcgcgcgtccaggcggagggcggcatcgcccagggcatcgggatggcgctcaccgaggacgtgctccgcgacgagcggggcaacctacgcacggggtccttcatgacctacaagatccccacccgcatggacgtgcccgagccgcgggtcgagttcatgccgagcttcgagcccacggggcccttcggcgcgaagtccatcggcgaggtcgtgatcaacaccccgtcgcccgccatcatgagcgccgtggcgcacgcgaccggccgatacgtccgcgacctgcccatcacgccgagcaaggtgctcctcggggagtagcccgcacggcctggccccattccgtccgcggcccgcacgttgttgacgtacgtgcgggccgcggacgcttcggggcccgattccgaccgcaacccgcacgttcccacaacacgtgctggctgcggacgttccggggcccgattccgaccgcaacccgcacgaaccccagacacgtgcgggttccggacgtttcggggtcccaaagtgaccgcagcccgcacgttcttctcggctggcctccgcgcccgaccggcgcgggacggccccctcccgcgctagaattggggggcatcgaacgttctcgcggaggtcgcatgttcaagctcaggaggtacctcgcgggccactacgcggagtgcgtggtcgcgccgctgttcaaggggctcgaggcgctgctgcagctcctcgtcccgctcgtgatggcgcaggtcatcgacgtcggcatcgcaagccgcgacgcctcctacgtgctcgcccacggcgcgctgctcgcaggcgtcggcgtcttcgcctgggtcatctcggtcacggcgcagttcttctgctcgcgcctcgcctccgccttcgggaccgccatgcgcgacgacctcttcgcccacgtcctgaccctctcgcgcgccgacgtcgagcgcatcggccgcgcgagcctcgtgacgcgcatcaccaacgactcccagcaggtgcaggacggcctcaacatgttcttccgcctcatcctgcgctcccccttcgtcaccttcgggacggtggtcgcggcgtttctcgtcgacggcgtcgagggggcggcgcttctcgccgccgtcatcgtctcgggcgccatagtcatgggcttcatgcgcgtgaccacgggccgctaccgccagatacagcggggccttgacgacgtccagctgcgcgtcgccgagaatcttgagggcgtgcgcgtcctgcgcgccttccgccgcgaggagagcgagcgctccgacttcgccggcgtcgccggggcggtccgcgaccggcaggtgacgaccggcgacatctccgcgctcgtgaacccgctcacctacgtcgccatcaactgcgggctcatcgccctgctgtggctcggcgggccccgcgtgagcgccgggacgctcacccagggccagctcgtggcgctcgtgagctacgtgagccaggcgctcgtcgagctcctcaagctcaccaacctcatcatgctgctctccaaggcgtccgcctgcgcgcggcgcgtcaacgaggtcttcgagaccgagccctccatggccgacggcccgctcgaggcggtcctcgcgcccgaccgccccgccgtcgccttcgacgacgtgagcttcacctacccggggggcgccgggagcgccctcagccacgtgagcttcgagctcatggcggggcggacgctcggcgtcatcgggggcacgggctcggggaagtccaccctcgcgagcctcgtcatgcgattctacgacgccacgtccggctcggtccgcgtggggggcgtcgccgtgcgcgacctcacgcgtcagagcctgcggcgcgtggtgtccctcgtcgagcagggcgccacgctcttctcggggaccatcgagtccaaccttcgctggggcgggcccgacgcgggcgagaaggacctcgaggcggcgctctcgaccgcgcaggccgcgggcatcgcgggaggaagggaggacggcctcgccgcggaggtcgagcagttcgggcggaacttctcgggcggccagcgccagcgcctcgccgtcgcccggaccctcgcgcgcaggccgggcgtgctcgtgctcgacgacgcgtcctccgcgctcgacttcgcgaccgacgcggccctgcgccgggcgctgaggcgcgactgctcgggcgccgcggtcatcctcatctcccagcgcgtgaccaccgtgcgccacgccgaccagatactcgtcctcgacgggggcaggcaggtggggctcgggtcgcacgaggagctgctcgagcgctgccccgtctaccgggagatctgcgagtcccagctcagctccgaggaggtggcgcgatgagtcgcgaggcgaagctcgccgcggacggcaccgtccgtcgcatcgcgaggctcttctcggcagagcgcggaaaggtggccgctgccgccggcctcacggcctgcgtggtcgtggggaccctcgcgctgcccgtgctctcgggccgggcggtcgactgcgtggcggggcccggcagggtcgactttgccgggctgcacgagaccctcgcgctcatcgccgtcgcgctcgccgccacggcgtgctgccagtgggcgctcagcgccgtcaccaaccgcctcgccttcggggccgcgctcgagctgcgccggcgcgccttcgaccacctgcaggagctgcccctctcctacctcgacgcgcacgggcacggcgacctggcgagccgcatcgtgaccgacgccgacatgctcaccaacggcctgctcatggccttccagcagcttccgaccggcgtcctcaccatcgtggtgacgctcgccttcatgttcgcgctcaacccggcgatcgccgccgtggtggcacttctcacgcccgtctcgatcttcaccgcccgcttcatcgccacgcacagcgcgcggcacttctcggggcagacgcgcctgcgcggagagctcaccgcctacgtggaggagatggtcgggggcatctcggccgtcgagaccttcgaggtccaggaccgtgtccacgctcgcttcgccgcgacggacgccgcgctcggacaggagagcttcaaggccgtgttcttctcgtcgctcgtgaacccgaccacgcgcttcgccaacgccctcgtctacgccgccatcggcatcttcggggcgttcgtcgccatgtcgggcggcatcaccgtgggtggcctctcggccttcctcggctacgcggaccagtacgccaagcccttcaacgacatatccggcgtcgccaccgagctgcagaactgcgtcgcctgcgcgcgccgcctcttcgacctgctcgacgagcccgcagaggacgccgacgccctgggcgccgtcgcgctcgcggagccgcacggcgaggtgcggctcgaccacgtcgcctttggctacgacccgggccgcccggtgctgcgcgacgtggacctcgcggtgcggcccggcacgagggtcgccctcgtgggcgagacgggctgcggcaagaccaccctcatcaacctgctcatgcggttctacgacgtaagcggcggcgcggtggtcgtggacgggcacgacgtgcgcgagctcgagcgcgagagcctgcgcgccgggtggggcatggtcctgcaggacacctggctgcgcagggcgacggtgcgcgagaacgtggcgatgggaaggcccgacgccacgctcgaggaggtgcgcgccgcctgccgcgaggcgtacgcggacgacttcgtcatgcggctgccgcagggctacgacacggtgctcgacggctccgcatcgctctccgcggggcagcggcagctgctgtgcatcgcgcgcgtcgtcctcgcgcggcccgccatgctcatcctcgacgaggcgacgagcaacatcgacacccgaaccgagctcctggtccagcgcgcgctggcgcggctcatggagggtcgcacgagcttcgtggtggcgcaccggctctccaccgtgcgcgacgcagacctcatctgcgtggtcgcagacgggcgcatcgcggagcgcggcacgcacgaggagctgcttgccgcgggcggtcgctaccgagcgatctacgaggcacagttcgcgccgacggaatagcgggcgcggcgtcatatgatggatggggccgcagtgacgcggccgccacgtggctggagacaagtgaggtcgacatgcggcaatcaagggcgttctgggcggcgttcgcgctgctgacgggggcgacctcgctgagcgcggccaacccgtgcgtgggggtgttcgccgtcttctacctggcgctggcgctcgtctcgcttgtcgcctacctcgtcatgcgctccggcgcgcgtcgcctcgcgtccgccgccgggcgcacggcgaccgacggcgcgggggcaatcgaccgcgatgcgacgcgcaggggcgtcagccacatgagccgcgcgctctttggcatggtcgcgctcctgtcggtggtggtcgccgttgcgaccctgctgctcacgatgctcgggctggacccgcgctccggcgggagggcgatgctcccggtgcagttggcgccgttcgacacggcgttcgacctctgggcggtctccgccgtcatgggcgtggtgggcggcgtcctgctcgtcacggcgggcaaggacgtgcgcgcctggctcggctccgtcgcgtaggcggggcggcgcccgcacgcgacgaagccgcgccgactacacgcaggtccagcctccgtcgatgtagatggcctgcccggtggcgtggctcgacacaaccctacagcccgtgggcggagaggcgcgagtctatctccctgagcgtgacgcgagccgcgaagagctgacggtacgttgccgtcttcaccttgcccgcggcggcgagctcggacatcttctccctggtgctcgccagctcggcacgcacgtcgcgggcaaaggactcgtaggccgccaggcgctcgacgtcctccgcgcccagaccctcccccatcagaagttcgccccgttccacccaaagttgggcgtggagccgtagctgaggtagatgcgctccgggtcgaccccgagcgcgcgggacaccacgggggtgacctcctccgtgaagcgctcccacgcggccgccgggacctcggagcgcgcaaagacgctcacctcgacgagggcggagggcctggagtcgtcccctccaaagtacatgggggccgactcgtcgaagacgcacatgagccacgcctccgacttgcccggaacggcctcgatggccttgccgtacgcggccttgaggacctcgcgggcctcgacggggatgggctcggagcagtgggtgtgaacgacgggcatgacgtcctcctatccaagggcatcggcttttgggtgcgggcgcgcgacggcaatcccgctcgcccgccctaccattggcatcataatatcacaatactagaacatgtgtacgtgtcttttctcatgaccggagacacttatgtccggagcggcacctaccatgtccgcagggacgccagggaaggaggagctcatgtacgagccgtcacgtcacatcgccacgttcaacatcgccggcttccagcactgggacggcgccacggtcatcgatcagctcaaggtggggtccccgctccagctcgtcacggagccggacaacccccacgactcggaggccgtcgcgattcgctggcaggggacaaagctcggctacgtcccctcgggcgagaaccacctcccgtcgctgctcctccactatggtcacgccggggtgctcgagtgtcgcgtgctcaaggtcgacccttcggaaagcccctggaagcaggtcatggtcggcctctacctcactgatgcccgcgacacctgacggagcgcgagcgagggtcgagagcggggcgcgcagcccctttcgctgacgcattccgaccgtccgtagaaaagcggccagataaaaagttcgccccgcatcgtccgaggacggtgcgggggtaactttacgggtaagtcagatagctgacttcccttgtctggagccgcacccttccccaaggtgagccgctctagggatagtctagcacctcttctcccctaatgaggcaacattctatggccggcagaaccgttctcattcagagcaaggcgcacctcagcatccaagacggcatgctcagcgtgaggaccgacaggggagcgacgacgcttccccttgaggaaatctgggtcgtcatcgttgagtcccatcaaaccacgctcaccaccgcctgcctgtcaaagctcaacgacgccggcataggcgtgatgatctgcggggacgaccacatgcccaatgggctgctgctccccatcggcgcccactctcgacacgcggcaatcgtcgaggaccagctgaccatgacaaagccgcttaccaagcagctctggaaacgggtcgtgcgggcaaagatcctcaaccaggcagccgttctcgatgagctcggcctcccctccggcacggtccgtgcgtttgcgagcgacgtcctctctggcgacacgagcaatcgcgagggagccgccgcctcggcatacttccaagtcctcatcgagcacggaacgcgacggagcagcgcgtacagctccgcgcttgactacggctacggcgtgctcagggcgggaatcggacgcgcggcggtcggaggaggctggctcgtctctcggggtatccatcaccatagcgtctacaacgccttcaatctcgtcgacgacctcatcgagcccttcaggccgctcgtcgacctcctcgtcatgacgtatcacgtcaccgatcccctgactccgcagagcaaggcgctcctcgcgcgcgtgtttgagcacgtcatggtcatggatggcaagcggtgcagctgcgtgcagtgcatcgaggtcatgttctcgtcactgcggtccgccgtcctggaaaggaacgccgggaggctcctgctccccaggctcgacgggctcgagaccgtgccgatcgaataggagcggagatgagggtcatgaggctgctcgtgatgtttgacctccccacggggagcaaggcggagaggcgctcctacgcggagttccgaaagttcctcgtgaaggacggctaccacatggagcaattctccatctactctcgcctcctcctgacgcgcgagtcgtcggcggcccatgtcgagcggctgagatgcaacctgccccccgccggcgtcgtgaccgttctcgaactcaccgagaagcagtactcaagcaggctcaggcttctcaacaccaatcccccgacctcgtcccacgacgagcaaggagcccagctcaccctggtcctctaagcgggggacccaaatggcacggcgaccctttccagctcgccactgaggggtctcttgtgtccggtccatgtcctatggtggtaccgtagctcgagtcagcactctttcagattggattgccatgcagcctgagtccgttcgcctctttggaaagcttggggttcgccgctacctcgtccttggactcgatcccggggtcgccagctgcggcttttctctcatcgacctccacaaccacgagattctcgagatggggtcccgtctcttcgactcgcccgtcgtccccaagacgcagcagagcaaggcggcggtgcgacggggcttccgctcaacccgtcgcaacctcgacaggacgcagaatcgtctgaagcactgccttcgcctcctcaaggagcagggcctcgtccccgccggcgccacccccgagttcttccacaccgcaaaaggcgaccaaccgcccatcaggctgagggtcgccggactcgaccggcttctcaccgaccgcgagtgggcgatcgtcctgtactcgctctgcaagcgccgcggctacataccccacggtgagggcggggagggtgacgtcgacagcgcaagcgaggacggaaaggtcctcaaggccataagccagaacaagaagcttctcgcggagagcggtgccagaaccgtcggtgagtggcttgctacgcagccgcgcagcaggaaccgctccggggagtacgacaagtgcgtcacccacgcacagctcaccgatgaggtgcgcgcgctgttcagcgcgcagaggtccttcggaagcacgtctgccacggaggatctcgaggacgcctatcttgaggtcttcgactgggagaagccccgcgacgcgttcgacaggcgaagctacgagctcgtcggcaactgcgtgtacttccccggcgagaagcgcgcggcgcgctgcacgctcacgagcgagctcgtctccgcatacggcgccctcggcaacgtcacaattcagttccccgacggcacgacgcgcccgctcaccgcaaaggagcgcgacaccttcatcgacacgctcttctccccctccgcgctcaagggcaacaaggagtgcaaggtcaagttctccgacatcagaaggcgcctcgacctcgacgcccggacctcgttcaagggcatctcgtctgatgacgagaagaaccgcgaggtataccggccgcaaggctggagaacgctgcgaaagacgctcggctccgaggggacggccctgctcacgaggtttctcgccgaccgcgacctcgcggacgcgacgatggaggccgtcgcgtactcctcgtccctccccgtcttgagctcgcgtctcgaggagcttgagctcaccgatgacgaggtcgccctcgtcgagcgcctcccctactcgagccgtgccctcaacggatacgggtcccgctccaagaaggcgcttgacctgctgctgggcgccttcgaggaacccgaggtactcactctcacggacgccgagacggccactggccttgatgagcttcgcaagcacggctcagccggcatcgagcggtcgacaaagctgatgccgtacgccgcatggatcgccctcaccggccgcaccaacaacaaccccgtcgtcctcagggcgatggctcagatgcgcaaggtcgtcaacgccgtctgtggtgaatggggcgtccccaacgagattcacgtcgagctcgcccgcgagctcgcgctacccaagaaggccaaggactccatcgcccgtgccaaccgtcagaacgagaaggataacgagcgcatcaggaagcagatctccgaactcacggggcgagaccacgaccggatcaagaactcacttgtggcaaagtggcgcctctgggaggagcaggggaactgcgacatctacacgggcgagagaatcgacgccctgcggctcgtcaatgacgacacgtacacccaggtcgaccatatcctccccttctctcgcacgggagacaactcgcgccacaacaaggtgctcgtccttgcccacagcaaccagctcaagcgcgagcggtctcccttcgagtggatgacctccgaggaggcgggcgcgcccgactggaactcctttgtcgcatccgtccaagagaaccgcaggatcagcccgcggaagcgtggcttcctcctcgagcgcgacctcatgtctaaggagggcgacttccaaagcaggaacctgacggacacggcctacatggcccgcgaggtctgcgcctatctctcggactgcctcgccttcccgaacgacggcaggaaggttcacgtcgtgccgaccaagggcaccgcctcggcgtggctcagaaggtcctgggggctcaacttcggcatggcgggggagaaggaccgctcggacgaccgtcaccacgcaacggatgcgtgcgtgattgccgcgtgctctcgctcgctcgtcattcagacggcaaagctctccgagcaccactacacgctcaacgagcagggtcgcgacgaggcgcttcttgggtctatgccctggccatcctttgccgatgacgtccgacagatgcgcgagaaggtcatcccgaccaggtttgtcccccgcgtcgggtcgggcgagctctttgagcagacgatctactcctatgtcggaaccgacgacaagggcaaggaccttctctcggcaaagggcggcaagccgaagcccgctggcaacgcagttgtctccgatgacgagaagtccgccatcaaggtcggaggaatgatctgcctgcgcctctggcacgatgtcgatgccagaaaggggcgtggccagtggtacgccgacccgatctactatgccgacctaccggctctgcgaaacgggacgtatgtgccgcggattgcccaagcgcataaggggagaaagacttggaagcccattcctgagcgggtcctttccggcaaaccgatttgtctctatctcggagatgcggtgcgggttgaccatgagatcggcagattttctggctttgacatcgatgcagccaattggtcactaaagagtatttactctggggagaagatttgttttccttctattggaaagattgataatataacttttccaattaaaatcacagaggatatccttggtagatgttggggaaatttgtaggcatactttgtgaccgtctctctcttgcgagagacggtcacatttcatcagtcattgccacgcacccttccccaaggtgatacgctcctcgcctacggcttcaccgccgaggacgtgtcttgagcacgcacccttccccaaggtgatacgctgcgccgcgccgtcgagatgaccgagtacctgtcttgagcacgcacccttccccaaggtgatacgctgatgccctcggccatgccctccattgtgtagtcttgagcacgcacccttccccaaggtgatacgctacgggtcttgtacttgcccgtgcgcgggtcgtcttgagcacgcacccttccccaaggtgatacgcttctacgctcgtgggcatgcgtcaagctatcggtcttgagcacgcacccttccccaaggtgatacgctgatggcgccgcacttgtggcacacccggcagtcttgagcacgcacccttccccaaggtgatacgcttgggcaaggataggggtgcaagcacccctagtcttgagcacgcacccttccccaaggtgatacgctggcgctcatggcagcgtctgccgagccggagtcttgagcacgcacccttccccaaggtgatacgctggagtcggagacgcaggagatcaagcacgtgtcttgagcacgcacccttccccaaggtgatacgctaaatgaacggggtaccgacatggcgaaatgtgtcttgagcacgcacccttccccaaggtgatacgctggcggtgctcccgccgtactggaagacgttgtcttgagcacgcacccttccccaaggtgatacgctctcgcaggcacggagcaccttgttctcggagtcttgagcacgcacccttccccaaggtgatacgctatcaccatgagcggcagcttcgtcacggtcgtcttgagcacgcacccttccccaaggtgatacgctcccgctgtccgactcggtgcaggtctacctgtcttgagcacgcacccttccccaaggtgatacgctcttgctgccgtccatatccacaagctctatgtcttgagcacgcacccttccccaaggtgatacgctcttgctgccgtccatatccacaagctctatgtcttgagcacgcacccttccccaaggtgatacgctattgtcctgatgctcctgccagtcctgatagtcttgagcacgcacccttccccaaggtgatacgctctctcgtcgaactcggccccgcactcggaggtcttgagcacgcacccttccccaaggtgatacgctcgctgcgccttgcatcaccgttgccatagtgtcttgagcacgcacccttccccaaggtgatacgctaaatgtcgaacgtgagcgagatcggggactggtcttgagcacgcacccttccccaaggtgatacgctcacgcggtcgacggaccggacgagcttactgtcttgagcacgcacccctccccaaggtgatacgcttcgggcggggttgcccccgcccttggtttcgtcttgagcacgcacccttccccaaggtgatacgctcccgggtgtggcgccctagctcgtcggatggtcttgagcacgcacccttccccaaggtgatacgctaggacggccctgactgtctcgcgctcgtgcgtcttgagcacgcacccttccccaaggtgatacgctgagtacggcgacagggtcatcgacaggtcagtcttgagcacgcacccttccccaaggtgatacgctgggttcgtctatgtataccaatcgcccgttgtcttgagcacgcacccttccccaaggtgatacgctcacggcgtcgactacggcatatggcttgaggtcttgagcacgcacccttccccaaggtgatacgctttccgctccgggctgatagactcgccattcgtcttgagcacgcacccttccccaaggtgatacgcttcgtggggccgtctccgttgtgcggaatgagtcttgagcacgcacccttccccaaggtgatacgctcatcgacatggcgttgtcctcgccgagtgagtcttgagcacgcacccttccccaaggtgatacgctggcaccaacgccatccagctctgtagccgagtcttgagcacgcacccttccccaaggtgatacgctgacaccatgccaaaaacaacggcgctcaaagtcttgagcacgcacccttccccaaggtgatacgcttggaggagcgcgagccggacggccttctcagtcttgagcacgcacccttccccaaggtgatacgctcgccgacggcgtgctcaccgtccacgacaagtcttgagcacgcacccttccccaaggtgatacgctatgtggactagggagaactggaacaccatcgtcttgagcacgcacccttccccaaggtgatacgctcatcaaagtattcacgcaacagctccttgagtcttgagcacgcacccttccccaaggtgatacgctggcggagagctgcgtgctcgcggacgcggagtcttgagcacgcacccttccccaaggtgatacgctgcaacgttgtgtttcagctaatcacacctagtcttgagcacgcacccttccccaaggtgatacgctgcaacgttgtgtttcagctaatcacacctagtcttgagcacgcacccttccccaaggtgatacgctcttggtagggcattcatgaaacctctgatagtcttgagcacgcacccttccccaaggtgatacgctcttcgcgttcacgtcaacgatgatcgagcagtcttgagcacgcacccttccccaaggtgatacgctctgacgcgtagtgatcgaccctcatgattcgtcttgagcacgcacccttccccaaggtgatacgcttaacgtgcgcgctcgctgtcttgtatacaagtcttgagcacgcacccttccccaaggtgatacgctagtagcgaggatatgggaagcctctttcgcgtcttgagcacgcacccttccccaaggtgatacgctggcggtcgtgcgtgggtacagtactggccggtcttgagcacgcacccttccccaaggtgatacgcttttcactcctttcacccgacgcgcagcgcagtcttgagcacgcacccttccccaaggtgatacgctgagcatcggcgttatggcggacacgacctggtcttgagcacgcacccttccccaaggtgatacgctcagctcgtccgcgccccaccaccaccaccagtcttgagcacgcacccttccccaaggtgatacgctcaagtatctcggaggcggctctcgcggcgggtcttgagcacgcacccttccccaaggtgatacgctcaagcgtcaacggccctgtctccacgtcgggtcttgagcacgcacccttccccaaggtgatacgctggaatcgtcctggtactcgaccttctggatgtcttgagcacgcacccttccccaaggtgatacgctgaggaagaggaacaggacatgacagacgcagtcttgagcacgcacccttccccaaggtgatacgctgcggggtcaatgaatcagggtctgtcggtcgtcttgagcacgcacccttccccaaggtgatacgcttgcacgaccttctgccgcatgtcctcgccggtcttgagcacgcacccttccccaaggtgatacgcttggttggaactgggcgagcgtgaactacaagtcttgagcacgcacccttccccaaggtgatacgctcgagagcgcgcacagcacggtggcgatgaagtcttgagcacgcacccttccccaaggtgatacgctgaaggcgccccagttcatgcgcggctcggtgtcttgagcacgcacccttccccaaggtgatacgctggtaatcacgaccacggctggctccccgcggtcttgagcacgcacccttccccaaggtgatacgctgagtacgcgaccgaggccacgctgaacgatgtcttgagcacgcacccttccccaaggtgatacgctacctctcgaacgccaccgttacgaacgagagtcttgagcacgcacccttccccaaggtgatacgctgtgcggcactacgacgcgagcaggaaggcggtcttgagcacgcacccttccccaaggtgatacgctgctaccgtcggacgtgacaccagcgccgttgtcttgagcacgcacccttccccaaggtgatacgctgagcagatttgctcagagctcggcgacagcgtcttgagcacgcacccttccccaaggtgatacgcttgcgggccgagcgcgcaagagccgggctcagtcttgagcacgcacccttccccaaggtgatacgctgatgtcgcactggatggtgccggtcacggagtcttgagcacgcacccttccccaaggtgatacgctcgaccgcgctcgggcctttcatctgctcgggtcttgagcacgcacccttccccaaggtgatacgctcttccggtcgtgtcggctggccctcacggtagtcttgagcacgcacccttccccaaggtgatacgctgtggtagctaacgtgacagccgagcagattgtcttgagcacgcacccttccccaaggtgatacgctggcggtgtacgtgtcctgatatgagtcgacgtcttgagcacgcacccttccccaaggtgatacgctggcgagagcgcggagcgcgacctcggcaaggtcttgagcacgcacccttccccaaggtgatacgctgcaggtggtcgcgacggcgtcgcagacgcctgtcttgagcacgcacccttccccaaggtgatacgcttgttcgcgaacggacggcgcgacccgcgcagtcttgagcacgcacccttccccaaggtgatacgctgtcggcgaggttccgctaccacaaggaggagtcttgagcacgcacccttccccaaggtgatacgctgatggcgtcggtgattgaggtgacggacttgtcttgagcacgcacccttccccaaggtgatacgctggacgagaagaccatggccaccatcaggctgtcttgagcacgcacccttccccaaggtgatacgctgctgacggcaagctcaccgcccacgacaaggtcttgagcacgcacccttccccaaggtgatacgctggcatcgagtgcgccgtcatcggcgacccggtcttgagcacgcacccttccccaaggtgatacgctcatcgagtcggcgcatatccacgtcggagagtcttgagcacgcacccttccccaaggtgatacgctttgcctatacgtggattgtacccgcagctagtcttgagcacgcacccttccccaaggtgatacgctgtcaggatcgccgagcaggagggcttcacggtcttgagcacgcacccttccccaaggtgatacgctatacagccaagcggtggagtcgaccgagtcgtcttgagcacgcacccttccccaaggtgatacgcttgagacgggtgacgccgccacctaccagctgtcttgagcacgcacccttccccaaggtgatacgctacctcgacgcagaaaacccctttcaacaggggttttctgcgttgtggagacgagcaaaatcgcgtggaaggcaccgattcatcatgctcgtcaacggtttttatccgtcttgcaagcctgtcgcggtgccaatcatcagctgaatccgtgtgtggattatgtgagcggcgcatccgccccgaggcacaagctatgagtcctccaaggagacctcgacgtctaggaataccttgacgatgccgatctccgttggccagttgtcgacgtactgtgtctcgaccgcggtaacggtaccctggacccttcccctcgactcgagggagcgaagcgttccgatgtcgagcccgccatcctcgagatgtgagtcgaactcgtggcccctcgcgtccctgagcgtgcagacggggtagacggagcccgggtagctcgacggggagcaggactcgacgagctcgactcgctccccgaccgcaagggactcgagcgccctcatggttcgagagtcctccgcgctggggatgccaagggactcccacgtgaagcagctcgtgaagacagcgcggcccacgtccaccgtgatcgtcccgccatcacccccgcccaggcggatggcagcaggaaacatgcccagcgcggacagaaacgcccgcctgctgacgccccctcccccggcgtccacgcctactcaccctccacgcggcggcgaagctgcttgaccttgcctcgggcgcgctttgactcgaggcgccgcctgcgctgggacgccggcacgtgcgtcttcttgcggggccgaggcgggcgggcccgccggcggcacagctcgatgatcttctcgacgcagcgctcacgattctggagctggcttctcgactcgcgagacaccacggtgatgcccgtcggcacatggcgcatcctcaccgccgagtcggtggtgttcacgccctgcccacccgggccggtcgcacgaaagacctgcacctcgcagtcacgcgcgatctcctggggcgtctgccgcgcgaaggcggcgtagtcacgatatgtgagcccgttcttctccatgtgaaccatcctactcgagatgggccgagaagaacctaaggtcgaggggaagccctacagcacgaccccggccctgacgcgctcgacggcgtcgtcgccgagatagtggcgcacgatctcgagcgcgaagagcatcgcggtgccggccccctggctggtgatgacgttgccgtcgaccacgaccggctcgtcgggcagcagctctgcgccatgctcggcgagcacgtgctggaagcccgggttggacgtggcgcgacggcccgtgagcaggccaagctcggcgaggatcgacggcgcggcgcagatggcggcaacgggacgccccgcggcgacgcgcgccgatacctcggagcagagcggctcgcaggcacgcaggttgggggtcccgggaatcccgccgggcagcaccagcatgtcgtagtccgcgaaggagaagccctcgtcggcgatggagcgcttgcagacgatggtcacctcgtgggaggaggtgacctcccgatccggcgtgatggccacggtgtcgcaggggatgccggcacggaacagcaggtccacgaccgtgagcccctcgatctcctcgaggcccggagcaatgagtaccgcgacgcgactgtcggtctcctgcctgaacatgcgatccctcctcgctcgtggcccccggcgagccgggggcgcggtcgtccctagtcctcgatgccggcgttgatggcgtcggcgattgcctgcgggtcgtcggagccgcgcaggaggttcttgaagtcgtccttcatgagcaggaccgcggtcttggacaggagcttgatgtgggtagtgcccgcctcgccgctcggaacgagcagcgcgatggcgatgtccaccggcttgtcgtcaaagctcggccaggagacggggtggtcgttcttgacgacgatcaccgaggcctcggtgacggcggacgacttggcatgcggcacggcgaagccgtcggtcatgccggtctcgcccaactcctcgcgcgcgacgaagtcgtcatagagcatctcggcgttggttgcgacgccaagctcgacggccttctccgcgatgaggctgagcaggtcctcacgggagttcttgctctggttgacgaagacgttggtggccttggcgaactcgctcacgagtgacctccctgtggtcgggcgcgcccgtcgggcgccagatggacacgtcaatgatagccgtcttgccgccgtcgcggggcgagaggcaccgcgacgagcgcggccctagcgcgacgggggctcgatccccaggtggtcgaaggcggcgagcgtcgcctggcggccctggggcgtgcgcacgatgaggccgcgctgcagcaggtacggctcatagacgtcctcgagcgtcgacgggtcctcggagaccgcgctcgccaccgtggtgagccccacggggcggccgcagaacgtgctgcacagcgccgtcaggatgcgcacgtccatggtgtcgaggcccatggcgtcgatctcgaagaactcgagcgcctctgccgccacctcccaggtgatcttgccctcgcgcttgacctgggcgtagtcgcgcacgcgcttgagcaggcggttggcgaggcgcggcgtcccgcgcgagcgcgaggcgatctcctcggccccctgctggtcgatctgcacgcccaggatcttggcggagcgggtcacgatgaccgcgagctccgaggtggtgtagtagtcgagacggtacgagatgccgaagcggtcgcgaagcggcccggtgagcagccccgtgcgcgtggtcgcgcccacgagggtgaagcgcggcacgtcgatcctgatggagcgagccgcgggccccttcccgatcacgatgtcgaggaagaagtcctccatcgcggggtagaggatctcctcgatctggtggttgaggcgatgtatctcgtcgacgaacaagacgtccccggcctcgaggttggtgaggatggcggcgaggtcgcccgcgcgctcgatcgcggggcccgaggtggtgtgcatcttggcgcccatctcgtttgccacgatcccggcgagcgtggtcttgccgagtcccggggggcccgagaagatcacgtggtcgagcgcctccccgcgatcgcgcgccgcctggatgagcacgcgcaggttctcgcggacgcgctcctgcccgatgtactcgtcaagcgcccggggccgcagggtccggtcctggtcgaggtcgtcggcggtgagctcgcccgagacctcgcgcggcccggagggccgcggggcggtggctccggcgaacagatccttctcgctcgcctcccacatcatctaccactccccagcctccgcagggcgtacgcgagcacctgctcgaccgtgacggcgcccgcctcggcgtggccctcgagcgccagctcggcctcctgggaggtgaagcccatggagagcagtgcctcggtggcgtccgcctccacgcccgccccgacggccgagggcgacagcggcagcgaggcggcgcctggctccgagagccccacgaggcccctcagctcggcgctcttggagaacacgtcggagagctccacgatgaggcggctcgccttcttgcggcccacgccgggcacctgcgccatgcgcgcggcgtcctgtgtggtcaccacctgggcgagcgtggcgggagagaaggtcgagagcaccgcgagcgcgagcttggagcccacgcccgagatggcgcggagctggtcgaacagcgcacgctcctcgcgcgaagcgaagccgtagagctccatggagccgtcgcgcacgaccatgcgggcgagcacggtgacgcccgactcccccacgtggggcagcgacgccgcggtggtggacgagacgccgagctcgaagccgacgcctccgacgtcgaggacgatgtgggtgggcagcacctcgaggagcgtgccggtaagctggactatcacgtgaggaccctccttgcctccccgaggctcgtggttctggtgacgttggcgtggcagaccgcggcggcgagcgcgtctgcggcgtggtctggccggggctcgtggtcaagccccaggatggtgcgaaccatgtacatgacctgccgcttgtcggccgcaccggtgccaacgaccgcctgcttgatctgcatgggggtgtactcccccaccgagagccccgccgtcgagcaggcgacgatggccgccccccgggcctgcgcggtggcgatggcggacttggtgttctccccgaagtagatgctctctatggcgagctccgtggggccgtagcgatcgatgacctccctgagctcccgatagatgcggccgaggcgcaggtcgatgggctccgccgcggtggtggtgacgcagccgtacgcgcgggcgcggcacatgggcccccgcgtctccaccacaccccagcccgtgtgggcgagcccggggtctatgccgaggat

SEQ ID NO: 4377 - DNA, 23057 bp, synthetic construct
  source 1..23057: mol_type = other DNA
  misc_feature 1..23057: note = Synthetic
gccatatcgctcttgttggcgaaggcctgcgtgggcacgtcggcgtcgtcgcaaatagcctggaacaccgcgcggctaaaggcatcggtgcagtagtgctggttggcggcttccttgatgacgatgccgccgttaagcaccacctggttgcgggcatcgcacttctcggcgtggttggggtgcacggcatgcgcgttgtcgcagctcacgagcatcgatgcggcaagggcgcgatgatacgactcgtcatcaaagcccagcgatccgttgatgcggcgcagcgcgtcggccaagaacgtcgacatggcgccctgcttggtctcggagccaacctcctcgttatcgaagcagcagaagaccgagacgtcgtgcgcgttctcggcgcccaaaaaagcctgtagcgaggtataggcgcaggccaggtcgtcaagcttgggcgtcgagataaactcgtcggcccagccccaaatgcgcgcatcctgacgattgaccaggaacagatcgcggcccaggatctgctcgggctcaacgtccagttcatcagcgatcagggcatcaaaatctccctgcttaaggtcaccggcgctgatgagcgggcacagatcgacggctcggttgggagcaaagccctcgttgacgccacggttcatatggatggcaaggctcgggataatagcgacctcgcgctcggtggcgagcaggcggctctcaatgcggtcaccctcgcgcaccagcacgcggcccgcgagcgccagcgggcgatcgaaccaggtgtagtcgatcatgccgccgtaggcctcggtgttcaggcgcaatgtctcgcctgcgccatcgagctcgggcacagccttgaccttaaacgtcggcgaatcgctgtgcgacgccgtcagctgaaaatggtagtcgccggcaacgccgtcctcgccccacgtcgcggccaggtcctcgcccaccttaaaggcgataacgctcgaggtgttgcgctgcgtgtaataacgcccgcccggctcgatatcccacgccgcgttctcgggcaggtaggtaaagcccgcctcgtcgagctcggccataatggtcgccgccgtatggaacatgctggggcatgtctcgataaagtcgataaggtcgttggcggcctcgatatcgtcggccgtcacatgcgcgcgctcgggcgtttcctgatccgtcatgctctcccctttcgctgggttgctggtcccctccagcataccccgccgcgccagcgccgcactcttcattccgtgcttaattccgcgccgctcaccaagttgagtcatcatgcccgcgctccttttgcgacaattgcactaacaggacgagaggagtcgtcatgaagccacgtaacattgccatcgcctgcggtgtcgcgggagccgccgtcggccttgccgctgccaccggtatcgtttatcacaagcaaatcaagtccgtcgcgtcgctcaaacgcttgaccgactatgcggatggctatgacctgtacgcaatcgacatcgcttacgactacgatcttgatcgcatcatcgccgctggtgtgcgcgacgaccaggcctacatcaatgccgtggtggcgcaggtgctgcccggtgtgccggcacatgtccaggcgccccagtttgcctgcagcgcttttgtcgccgtagatgccgaaggccgcgtgcgtaccggtcgcaattacgactttaaggacgacacctcggcgctgctggtgcgcaatcacccacgcggcggctatgcctccatcgggtttgccgcccttaacaacctgggcgataacactccgcttgactccgtcgccggacgcgccgccgcactcatgggcccgtttgcccagctcgacggcgtcaacgaatgtggcgtgtccattgccgtgctcaccctggattccaaaccctgtgaccaggacacgcagcgccccgtcatcaatacctcgctcgccatccgtctggtgctcgaccgtgccgccaccacgcaagaagctgtcgacctgctttccgcctacgacatgcacgccatggcaggacgcgattaccacttctttatcaacgacgccgccggtgacgcgcgcgtagtagagtgggatccgcgcgatccggaccgcgctttcaaagcgactcctgtacgccaggttacgaacttctacgcctgctatggcgacgaagtgctgcccaaccaaaagaatggcgagctgggccatggtaaagagcgcgccgtcgcaatcgccgatgtcctcgacacccatgccggcgcccaagacgaggcagtcgcttggaaggccctacgcgctgcagcgcaagagcccaatccggaagacatcaccagcaacacgcagtggtcggtcgtctttgacaacaccgagcccgctgccgccatcacgctgcgccgccattggggcgacgtcgacgccttcgcgttgtaaggagccaggcccgtcgtccttacgctcgcctgacgctgcttacatttctatacatttgagctaacacgttttacccctgtatcaacagtgtgcgggggtaaacttatgcgcatgttataacttgcccggaaggattcatcatgctcaggatcggtcttcttaccagtggcggcgactgccaggcgctcaacgccaccatgcgtggcatcgtcaaaacactcatgaccaatagcgaagagcctatcgagatctatggttttgaggacggctaccagggccttatctacagcaggttccgcgtcatgtcgcccgccgattttagcggcatcctcacccgcggcggcaccatcttgggcacgagccgcacgccgttcaagcgtctggatattcccgaggccgatggcgtcgagaaggtgccggcgatggtccacacctatcacaagctgcagctcgactgcctgtttatgctgggcggcaacggctccaccaagactgccaaccgcctgcgcgaagagggcctcaacgttatcgccctgcccaagaccatcgacaacgacacctggggcaccgagatgacctttggctttacgagcgccatcgacgtcgccaccaagtgcatcgacgacatccacaccactgcctcgagtcacggccgcgtgtttgtcatcgagatcatgggccacaaggtcggttggattccgctgtatgccggcgtcgcgggcggcgcggacgtcatcttgattcccgagatcccctacgacatggacaacgtcatcaagaccatcgagcatcgcatggagaccggcagccgctttaccatcgtagccgtcgccgagggcgctatctccaaggaggacgcggcgctgcccaagaaggagtacaagaaaaagctcgccgagcgcacgagtccgtcgatcgtctacgacatcgccaaggagatcgaggccaagactggtcgcgaggcccgcgtcgccatccccggccacacgcagcgcggcggccaacccgacgcccaggaccgcatctttgcgacccagtgcggcgtcgaggcggcactggggtgcctacgcggcgagtttggctacatgattgccctgcgtgacggcaagatgtgccacatgccgctcgaggaggtcgccggcaagctcaagtttgtcgacccccagagcgacctggtgcgcgaggccaaggcgctgggcatcagcttcggcgacgaatagcctcggccgaaactgctctcatcggagaccccagggcttacatcccaaatcgtcctcggacatgtcaggaccccgccgtgcgcttcgcgcggcggggtccttccgtcctgcggaaagatttgggatgtaagccctgaggcctcctgcggtaactagggaggccgaggctattcgtcttcttgctgcgggtgcgtgggctgagattttgggatgttgcaggctcttagctgagagtagcactgacatttgtcctgaaatggctggtcgttaggggttgctaccggtagttgcggtagggttggggcagattctaactagaaatggtggtcgctaccggttgttctcggcatactcggctcattcgattcgaccatcaaacgaaaggaaccaccatggatcttgcgatggcacagcgcctcgtcgatcgccgcaaggctgccgggctttctcaggaggcgcttgccgcccagctgggtgtgagtcgtcaggctgtcagtaaatgggagcgcagcgaatcctcgcccgataccgataaccttattgcgctcgccgcgctgtatggcgtgtcgctggacgagctgttatatggggaggcggccaacgatgccgacgacctggaggacggtagcgccgacaccgagacggcggatgtggctgacgaggccgaggattctgccgagcacgccgattgcggcgacaaaccacttgtcgatatttccctcgcgcgcggtatccacgtcattgatcccaataaaggcgaggaagtccatgttggttggagcggcatccatgtgaccaacgagcgcaagggcgaagaggtgcatgtggggccggacggcgtgcatatcgatacgcttgaggacgatggacatagcgtacgcaccaatgacgacggcaccgtcaccatcgacggcgagacgttttccagctggaaggaagcacacgacaagctcgaccaccatggcaagcatttccgcaccaaggtcggacgtgcatggaacaaattccccttccccgcacttgtcactctcgcctatctggtgctcggcattgtctacggcacatggggcatggggcttttcctcgtctttctggttcccgtctactacgcgattggtgacttcatcgatcggcgccacctgtctaagctgatcgaggccatctacccggcagccgccatcgcttggttcctctacatgtggctctgtttgggacagccccatcctgcatggatcatcctcatcacgattcccgtcataaaggcgctcatgcgctggtgccgcaaacaatggaagcaccgcaaacaggcctaacacgctccgacccaccagcacccaaccacccccgcccttctcctaagttgcggtgagatagggactgttttgaagctccaaagcgccaaacagtccgtatatcaccgcaacttacaaacaactgggtcagttccggcacggagatttgcattgagctgaccgcgcgccacgaaaaggggccatctactacgtttaactcgatggggccaaccatgaccgcctttttcgaaaatcgacaggccttctacctgcggttttatttttcgtttcccggcatggttgagggtatccaattaaacgtagtagataggcccgttttgtggcatacgacccattcaagcccaatctcgaaggctaaagaaagcctctcatccacgcctgcgggcaaaagatagcaaagcaacaaacgccgggtcgctcgtaggtgcccggcgtttgcccagataaaacctgccaaaataaacctgtccctttttggcaggttactcggcactcttgagggcaccgaccatgtcaatcttgttgagggtacggttggtggcgaggttgacgataaacgtaaagccaaatgccagcagaacggacagcacatagctcagcggctcgacctcgacgtcaaagtacagcgacggcatctgcaaaatgtaggtaaagctctcggccagcaagccgcccagcggcacgcccagcgcagcaccgatcgctgtgaggatcaacgtctccttgttgacgtagtgatgcacctcgccacggcggaagcccagcaccttgatggtcgccagctcgcgttcgcgctctgaaatattcgtattagacagcgtaaacaccaccacaaacgacaggcacgccgccataaaggtcacgagcaccacgaccgaattgataatcgtaaagttcgcctcatagttttcccaatgctcggccgtactcgaaattgtgagccaaccgtcactcttaagcttcttgctaaacgcaatctgatcggccgacgagcccttgagcagcgcaaggatgccgttgagacgcgcgcttcgaccgaacgcgcgctcataggtaccctgcgtcatgtaaagcgtgttgcccagatagttgagcgaaatgtcgctgactttgaccttggcaacattgagcgacgaatcctggacgtgagccgtgtcacccggcttgatccccagcaccagctgagagctcttgctcaaatacacatccccgtcacgcagggcgagcggttctttggactcatcctccaggcgcacgtaatcgcccaagtcacccgtgcggtcatcgggcaccacgatcagctgcacagtctcgctcttaccgccaaacgtaaaggtgacgttgtcggtcataatcggcagcgtcgaagtcaccgtcacgttggaatcattggctgcactgcgctcatccagtgccgcgcacgtctgcgaaaaatcatcgggattggcaaccgccagcaggtcatagcgcgtgatatgcccgtactgcttgggcgacaacgcgaccgacgtatcacggatgcccataccgcaaatcacaagcgccgtgcagcccgcaatgccaaagatggtcataaaggcgcgctttttgtagcggaataagttgcgtgcagcgaccttgttcaaaaagctcatgcggtgccagataaagccgatgcgctcgagcagaatgcgcgagccggcgcgcggggccttggggcgcatgagcgaggctggggtctcggccatctcgtggcggcaggcgataatcgtggcgcccaccacgcccacggcaaacagcgctaccgacacgagtgatgacacgatgtcgtacgaaagcaacatctggggcagcgagtacatgtcgtcgaacaccgtaaacaggaacagcggcagacccacaaatccgatgatattgccgagcacgccaccgatcagacacgcccacagcgagtagtccacatatttggacaggatacgcccgcgcgaatagccgagcgccttgtacaggccaatgagcgtgcgctcctcctcgaccatgcgcgtggcggtggtgaggctgatgagcacggcgacgataaagaagatgaacgggaacaccgtggcgatggcctcgatcgaggaactatcgctctcgacgctcgagtagcttgcgatattgccgcggtcctggatgtaccaggtgcattcgcccaggtcagagagctcggcgcgggcatcggcaaactgctggtcggcggcggcgcggcgctggtccaggtcggcttgcgcctgcgcacgctcgtcgctgccctcggccatgcgattgatgttgtcctgctcgatcccaaagaccatattcgcctgacgctcagccgcgtccaagctcgccggtgtgtcgaccgtcagctcctgggcgcgcgccttctcacgctcctcgcggatcttctcgatattgcccttgacctcattgatctttgccgagtaggcatccgaataggagttgaggctcttggctccctcgacgaccacgtggacagcggagtaggaagaagatgtcgcggcatcctcgctcacgtagaacttgtagtccgcagtcgaagcagcgcgaaaggcgttgactgtcgagtcggagctcacgtcggtaggatcgagaacctcggccgtgatggtgtagtccccatcggcaaactggtccttggcgctttggttcgacgagctcgcatcgttggcggcaaagctcaccgtatcgccgattttcttgcccgaagccttcaaaaaacgtgaggtcactgccacttcgcccgaagtctcgggcagctcgccgcgtactagcaccggttggtcaatgttctctttggaaaggctctgcacgaccacgcgctcgcgcgttgtacccacggcggtgtaggcggtctcggtgtagatgccctcggccgtctcgacgccatcgacctcttgaatggcagcaagatcgtcatcggtcagaccataggtcgactgcacgttgatgtcataaacattctgctggtcaaagtaagcgtcaaccgaatcgcacaggtcctcgcaccccgctttgaggccgcacatcacgctcacaccgagcgcggtgatgaccacgatggacaagaagcgcttaagactgcctcggattgtacggtagatgccacggcgaaaaaccgtcggcaccatatcgtttgagctttgggcggtgcggtaggtcgtaaaatcctgctcgcgctccgtgttctgcgcgtcgcggcgctggctgttttggcggtcctggtccatgggcgctaccactcgatcgtctcgataggcacgggattttgctggaccgtctcgctctccacgcgaccattcttaaagcgaatcaggcgatcggccatgggcgccagcgcagagttgtgggtgatgatgatgaccgtaatgccttgcttgcggcaagtgtcctgtagcaactgcaagatctgcttgccggttttgtagtcaagcgcgcccgtgggctcgtcgcacaaaagcagcttggggttcttagccagcgcgcgggcgatggatacgcgctgctgctcgccgcccgaaagctgcgccggaaagttagcgaggcggtcgcccaggccaacctggcgaagcgtttgctcggcatcgagcgaatcggggcagatctgcgccgcgagttcgacgttctcaagcgccgtcaggttagggaccagattgtagaactgaaagacaaagccgacgtcggcgcggcggtattccacaagctgagcctcgttggcagagctcacgtcacgcccgtccaccgtcacggtgccagaagttgccgtgtccatgccgcccaagatgttgagcgccgtcgttttaccggcgcccgaagcgcccagaatgatggcgagctcgccgcgctcgaccgtaaagctcgcgccgtcgagcgcgtggatgcgggcatcgccctcgccgtatgccttgatgacgtctttgaattcgatataggccatcgattaattcccatctggtcggataactctttagtattacccatttcccacctaccaaaaagggacaggtttattttggcaggttttatatggggaaacggcagctatagatagggcgccggggaggccgagaaatcatcaacggggtcaggccgaccgccaaacacaacgcacgcatctcaatctgtcagccaaatcattcgaacagctgttcgtttctatgatatgattcaactatctaagcaggccaatacgcagaaaggcggccaacatggcgttcgactttaagaaggaatgcaaggagctctacaaacctgcaagcaagccgagcatcgtaacagtcccgcctatgagctacgttgccgttcgcggaaagggcgacccaaataccgaaggtggcgagtatcaaaacgccctgccgctactttacggcatcgcctataccgtcaagatgtcgaagaaaggctcaaggagtatcgagggctatttcgactttgtggtaccgccgctcgagggtttctggtggcaagagtccccgagcggcggcatcgattatgtacgcaaggacaatttcaactttatctcgtgcatccgcctgcccgatttcgtcacccgagatgactttgactgggcagtcgcggaagccacgaccaaaaagaaactggacttttccgccgtcgaactgcttaaagttgacgagggtctctgcgttcaatgcatgcacaccgggccctacgacaacgaaccggcgaccgtagacgctatgcatgaatacacgaccgagctgggctatgttcccgacttctcagacacccgtttacatcacgaaatctatctctccgatccacgcaaatgcgcaccggagaaacttaagaccgtggttcgtcatcctatcaagcgcgctgaatagcgtggagcgccgccccgccattcaatctcagggcgggattcagccgggtttcaatttcaacaaacagcatcatccggaaaccgatatgtagggctgtaaaaatcatttccgtttgcctaacaaaatgaccgctcgactaacaagctcggcccatgtcctcacgcgatggtactgttctctagagttcttattagagaggggtgctccatggagatcaccatcaatcgcgaaattgggaagctcggacttcccaggcatcttgtgcttggcatggatccaggaattgcaagctgcggattcgcacttatcgacacagctaatcatgaaatcctggatttgggcgtcagattatttgactctccaactcatcctaaaacgggccaaagtcttgcggttattcgcaggggcttccgctctacccgtcgaaacattgaccgtacccaggcgcgcttgaagcactgtctccaagtcctcaaggcttatggcctcatcccccaagacgccaccaaagaatacttccacaccacaaaaggcgacaagcagccgctcaagcttcgtgttgatggccttggccgcctgctcaacgatcgcgagtgggcactagtcctatactccctctgcaagcgccgtggatacatcccccacggagaaggcaatcaggataaatcaagcgaaggcggcaaggttctatccgcccttgcggccaacaaggaaacaattgcggagacctcgtgccgcaccgttggcgaatggctcgctcagcagcctcaaagtcgcaatcgtggcggcaattacgacaagtgtgtaacgcacgcccagcttatcgaagaaactcatatcctatttgatgctcaacgctcctttggctccaaatacgcttcgccggaatttgaggccgcatatatcgaggtttgcgattgggagcgttcgcgcaaagacttcgaccgccgcacgtacgacctcgttggccactgttcatacttcccaacagaaaaacgagccgcacgctgcacgcttacgagcgaactcgtttcagcctatggcgcactcggcaacatcaccatcatccacgaaaacgggacctctcgcgccctgagcgcaacggagcgcgatgaatgcattgcaatcctgttctcgtgcgagccaattcgaggcaacaaagattgtgctgttaaattcggcgccctcagaaaagcactcgaccttagttccggcgattactttaagggagttccagctgccgacgaaaaaacgcgcgaggtgtacaagcccaagggatggcgcgcgctccgcaataccctcaatgcagccaaccccattctcctgcagcgtttgcgcgatgaccatgatctcgccgatgccgttatggaagcggtagcatattcttcggcccttcccgtactccaagagcagcttcaggggctaccgctctcggaagcggagatagaggcgctttgtaggcttccctattcatccaaagctcttaacggctatggcaaccgttccaaaaaagcactcgacatgctgctcgattgcctcgaggagcccgaggtcctcaaccttacgcaggccgaaaatgactgcggcctgctgggactgcgcatcgctggctcccagctcgagcgctccgatcgcctgatgccctatgagacctggatcgaacataccggtcggacaaataacaatcccgtcgtcattcgctccatgtcgcaaatgcgaaaagtggtcaacgccatctgccgcaagtggggcgtgccaaacgaaatccacgttgagcttgatcgagagctcaggttgcctcagcgcgcaaaagacgagattgccaaggccaataagaagaatgagaaaaatcgtgagcgcattgccgggcaaatcgctgaactgcgtggctgcacggcagatgaggtcacgggcaaacagatagagaagtaccgcctgtgggaagagcaggaatgcttcgacctttacacgggcgctaaaatcgaagtcgatcgtctaattagcgatgacacctacacgcagatcgaccatatcctgccgttctctcgcacgggagaaaactcgcgcaacaacaaagtcctggtcctcgccaaaagcaatcaggacaaacgcgaacagacgccttacgaatggatgtcccacgacggcgcgccttcatggggtgcttttgagcgtcgcgttcaggaaaaccagaaactcagccgtcgcaaaaagaacttcctgctggaaaaagaccttgataccaaggaaggcgaattcttagcgcgcagcttcaccgacaccgcctatatgtcgcgagaagtatgcgcttacctcgctgactgtctgctgttccccgatgatggcgcaaaggcacatgttgttcccaccactggcagagcgaccgcatggctgcgtcgcaggtgggggcttaactttggttcgaatggcgaaaaagaccgctcggacgatcgtcaccatgccaccgatgcttgtgtgattgcagcatgtagtcgaagcctcgtgattaaaaccgctcgaatcaaccaagagacacactggagcataaccagaggtatgaacgagacccaacgccgcgatgccatcatgaaggctctcgaaagtgttatgccctgggaaacctttgcgaacgaagtacgcgcggcgcacgatttcgtcgtacccacccgctttgttccgcgtaagggaaagggcgagctatttgagcagacggtctatcgctatgccggcgttaatgcacagggcaaagacattgctcgcaaggcgagctccgataaggacatcgtcatgggcaacgccgttgtgtcggcagacgagaagtcggtcatcaaggttagcgaaatgctgtgtctgaggctctggcatgacccggaggccaagaaaggacagggtgcttggtacgcagaccccgtctacaaggcagacattccagcgcttaaggacggaacgtatgtgcctaggattgcaaagcaaaattatggacgtaaagtatggaaagccatccccgatagccttctaatccaaaaaccactcgagatatatctgggcgacttgatcagagtcggagataaacttggccgctacaatggctacaacattgcaaaagctaattggtcctttgttgacgctctgacgaaaaaggagattgcattcccctcggttggaatgctctcaaatgaattgcggccgattgttattcgcaaaagcattctcgataattaaagccaatgagggagcgatttcgcttttaacagccgcccccttatctacaaccgctcctctatccctaaattcgctttgcagcaacggccttaagggagctttcaaactgaatcaggccgccttgagcatgcatccttccggagacaatacgaccgactaggcgcaacgccttctgctcactggaccttttacacgtgcacttccccaaaatgatgagctagaacgagcccgtgggaactggtgctcccgtcttgagcgcgcccttccccaaggtgatacgctcgtggagccgtccagttccatcacgtggtggtcttgaccacgcgcccttccccaaggtgatacgctggcggcaatgtacgaatacgatgcttcgtagtcttgagcacgcgcccttccccaaggtgatacgctacgcgacgacgtcaccaacgaacccatctagtcttgagcacgcgcccttccccaaggtgatacgcttgccgagccagctgagacttcgacgtaatagtcttgagcacgcgcccttccccaaggtgatacgctaagtcgagccttatattgtttcaactctgtgtcttgagcacgcgcccttccccaaggtgatacgctcaactagttttaatacagttagtcctatcagtcttgggcacgcgcccttccccaaggtgatacgctacgccacggcaacaaggaggggagggcgtagtcttgagcacgcgcccttccccaaggtgatacgctttatctgccaaaatatgcaatgccctatcagtcttgagcacgcgcccttccccaaggtgatacgctccccaacggcaacactcgcaagacgctcgtgtcttgagcacgcgcccttccccaaggtgatacgctggtgctcgcgtagtcggagttaccggataggtcttgagcacgcgcccttccccaaggtgatacgctcgctcttgatggagttccacacgctgctcagtcttgagcacgcgcccttccccaaggtgatacgctaagcccttttatcaggtgttttgcttaattgtcttgagcacgcgcccttccccaaggtgatacgctacgacatctttacggccatccacacgtttagtcttgagcacgcgcccttccccaaggtgatacgctggtctcataggttttcaggatctccttgcagtcttgagcacgcgcccttccccaaggtgatacgctggatatggaggtgtccgcccagagcgcgacgtcttgagcacgcgcccttccccaaggtgatacgctcgtgctcgccggtaccgtcaccatgaccctgtcttgagcacgcgcccttccccaaggtgatacgcttgggacggcgaacacgcgcacatcacgtgcgtcttaagcacgcgcccttccccaaggtgatacgcttgcggcgctcttgccccgcaacatctagtagtcttgagcacgcgcccttccccaaggtgatacgctaagaacgtcagcaactttggcaattgtgttgtcttgagcacgcgcccttccccaaggtgatatgcttaattctcctttactgtcgtgcctttactagtcttgagcacgcgcccttccccaaggtgatacgctgtgcatgttgtcaggtcgttcatgtactgagtcttgagcacgcgcccttccccaaggtgatacgctcggtgtgccaacggccttcccgctgcgtcagtcttgagcacgcgcccttccccaaggtgatacgcttacgacgaaagcgaatgcggcgcatgtgctgtcttgagcacgcgcccttccccaaggtgatacgcttaaagctccagcttcgccctgtcgttaaaagtcttgagcacgcgcccttccccaaggtgatacgctaagtcctcttctaacttctcccaactgtctgtcttgagcacgcgcccttccccaaggtgatacgctctcggcagcgcatacctcaatgggcttatcgtcttgagcacgcgcccttccccaaggtgatacgctccaagcggtcggcatacttgcattcgtcgtgtcttgagcacgcgcccttccccaaggtgatacgcttagccgaagaccgtggccctccccgactcggtcttgagcacgcgcccttccccaaggtgatacgctaagactcgcgccggaaacctgtccagatcagtcttgagcacgcgcccttccccaaggtgatacgcttgggcattaccggcacgacggcagaagagggtcttgagcacgcgcccttccccaaggtgatacgctcaccgcaccgatggatacgtgcttatttcagtcttgagcacgcgcccttccccaaggtgatacgctttccgaacatagctacctcgggcgggataagtcttgagcacgcgcccttccccaaggtgatacgcttcgcttttagctcgtaaagcatgcgattttgtcttgagcacgcgcccttccccaaggtgatacgcttaacgtcataagcatacgatacgcacaacagtcttgagcacgcgcccttccccaaggtgatacgctttgctctgggtttgcattgcgcatcatattgtcttgagcacgcgcccttccccaaggtgatacgctatcaagacgcgccatcacgtccttaaattggtcttgagcacgcgcccttccccaaggtgatacgctgactcgtataccatgtcacgcggcctatacgtcttgagcacgcgcccttccccaaggtgatacgctcgatgcgatcgacggcatgacctcccgcatgtcttgagcacgcgcccttccccaaggtgatacgctcccgacctggttagccaggtcgttgaaattgtcttgagcacgcgcccttccccaaggtgatacgctttatgagcgcacgttcgttattcgccacgagtcttgagcacgcgcccttccccaaggtgatacgctgagcgacgactacgaacgtctcgcggaaaagtcttgagcacgcgcccttccccaaggtgatacgctcccgacaggctgatcaaactgcgcggcaaggtcttgagcacgcgcccttccccaaggtgatacgctgagcatcaacatcaacagcgacccgatttagtcttgagcacgcgcccttccccaaggtgatacgcttgtgacaggtgtttgacactgtttgacagggtcttgagcacgcgcccttccccaaggtgatacgctatgtgcgcacagaaaagtccctttaacaggggcttttctgtttcaagcctcaaaaaagaagactaattcgacctcagatctacatctgcgattcattttttcgagacaaaatacgtcggcacgtcgcgcttcacgcaagaaaagagccgcatttggcacagcgatgtatgtacttttcttcacaatcgaatcaaatccttggacgaaaaatcgctcaaaaggaccgacctaaacgctatccatagctaccgtttacggaatactggctaacactcgcccaaaaaagttcgccccgcccaatcagaagattgaacgggggtaactttacgggtaagccacttaagtggctccccttgtctggagccgcgcccttccccaaggtgagctgctttcgacgtagctgtattgtagcgctaatgcggggaaggtcgtcgacaaaatggcccaacggacaatacttatccagagcaaggcccatctctgcatcaaaaacggtctattgatgattaacgtggacgatcgaagctctaccattcccctcgaagacatttgggtcgttatcgtcgaatcacatcaaacaacaatgacagttgcttgtatgtcacaactcaacgatgcgggaataggcgttatgatttgcggacgcaaccacatgcccaacggtctcatgctccccatgggagcccattcgcgccatgcacgcatcgtcgaggaccagcttgcaatgagtcttccatttaaaaagcagctttggaaacgaatcgttcaagcaaagatactcaaccaagcggcggttctcacagaaatggggctgcctacagaccctctaccctcttatgccaaaaccgttctatcgggcgacgcggacaatcgagaaggtgcagctgcctccgcgtactttaaagccctcattaccgaaggaacaagacgtaacagcatgcaaagctccgctctcgactacggatacagcgtcttgcgcgcaggcatcggaagagcagccgttggtggtggatggctcgtatcccagggacttcaccatcacagcgtttacaacgcattcaatcttgtcgacgatctcattgaaccgttccgccccctcgtcgacctaattgtcatgagctacggcgttgcagaacctttaggacagcgcgacaaagcattgttggctcgcgtgtttgaacacgttatgaccatcgacgggaaacgttgcggctgccagcagtgcatagagacaacgctctcttcactcagaacagccgttctcgaaaaggatcccaagaggctgctattgcccgagctaaaagggctcgagatgataaccgttgaatagggaggagccatgagggttatgaggttgttggttctattcgatcttccaacgggaagcaaagcagagcgccggcagtatagcgacttccgaaaatttctgattaacgacggatatcatatggagcaattttcggtgtattcacgcctgttggtaactcgcgaatccgcagcggcgcatatcgctcgccttaagctcaatcttccaagcgctggagaggtcaccgttatcgaaatgaccgaaaagcagtacgaagaccggatggttcttttaagtgagcgagaggagcaacctgtcgaacagggcgcacagttgacgctcgtgttttaacgttaccgtcctaagcgtcgcaaatgtcctcgcccgcctcaaaagacaatttgacccaagcctcgcccgccgctatgatgccgctgcggaatgaatgtctccgttgggtgcgccagccaagctattgcgtcgccctaaaccgccttgttgctgatgacttctgctgttacgtgatgtcctttgggcatcacgccgcggcaggagtcttttttgttttggaggagaagtgtcggaaaacagtgcatcgagcagaatcaaacgcctggtcaacacctatagcggcctcgtgctcatgggtgctgtcggaatccctattggcatcatcgtcggcgccatttgtgccctctttggtcgcgtgctcctggcaatcggcgccttccgcgacgagcacatcaccctgctccttcccctcctcgccctcataggcttggccatcgtatttgcctaccgcacctggggcaaaggcaccgatcggggcatgagcttagtattcgacgtgggtcacggacgcaaggacgccatctccccgcgtttggtgccgctcattatgctgagcacgtgggggacgcatctctttggcggtagtgcgggacgcgagggcgtagcggtgcagatcggcgccaccgtctcacattggatcggccgacgcctacctttccgcgaccccggcaacacgtttttgctcattggtatggccgctggctttgccggactctttcgaacgccgctcgccgctacggtctttgctatcgaggtgcttgtcgccggacgcatggaataccgcgcgttgtttcccgcgcttacggcttcacttgccgcaagcatgacctccggcgccctggggctcgagaagttcgaggtcgccgttgccgcctcgtatgtgctcgacctccccggtcttggacggcttgcggtgctgggcgtcgcgtttggcatggcgggcggcgcctttgcctggtgccttgcccatgccaagacccttgcagcgcggctgctccccaacccttacatacgcgttgccgttatgggccttgcgctgtcggcgattctgttcgtgctatggcagggacgttactgcggccttggaacaaacctgatatcggcggcgctcaacggtgacggcaaggtcgccatcatgccttgggactgggcgctcaaattcacactcaccatcgccacgcttgccgcgggttatcagggtggcgaggtcacgccgctgttctccatcggagccagcctaggtgtcgtgcttgctggaattctcggaatgcccgtcgagctctgcgccgcgctgggatacgccgccgtctttggcagcgccaccaatacgctgctcgcacccatccttattggctgcgaggtctttggctttggcaatctgccgatgttctttattgtctgcgtcgtggcttacctgttcaacatggacaaatcgatctacgccctgcaggagcgggcgtagaaaggtgtccaagcaggtggcctcaaccggaaacggcgtcccactctgaggctgtattccgggacacggtttccacttgggaagccattcggaaagcgcatcccgctttaaaacgatattccgggacgtggtttccgtctgatcctccattcggaaagcgtgtcccattctatcgcggcgtcttggctatgcaaagtgctcgaacgttattcctcgtacgcgccctcaagccgaagcagccactccttgcgatcaaggccgccagcatatccgttgagcgatccgtcgaccgcgaccacgcgatggcacggcacgataatcgaaatgggattacgcgcaaccgcagcccccaccgcacgaggagacacgacgggtgcctcatttcccggcacacgatgtcgagccgcaacacgctgagcgatctcgccatacgtagcgacttcgccacgcggaattgaaagcagctcaaaccaaacctcgcgctggaacgccgtgccgatcatatgcaacggcggcgtaaaccgaggctcctgccccgcaaaataagcattcagccaagcccaagaacgctcaagcaccgaagaagccgcgccatttgccggactcaccggcaacatgccaccggtaccggaaaccgcgtcggcgccttcaacatgttcggagtcttcccggagaagcgtggagccaaagtgctcctgtccctcaaaccaaagccccgtcagaccgcggccatcagcggcaagcaagatttcgcccaaaggcgaagcaaacgtcgtcgtgaccaccagcggctcctttcaaaactccgcaacataataccgcgaattgtgcagacaaccccaatcgaccccaaagtcacccaaggcagcaggcgcgcaacgccgcagctgccgcacgaccccaaagtccccgcaggcagcaggcgcaacgcgccgcagctgccggccgcgctccgcagtcccccaaggcggcaggcgcaaagcgccgaggccgccgccgggactagggcccgcaacaaccacgtgcccccacatcagcccagcggccccaaccaacaacgaccccatcgcaggccgctcgcagcagcgtcaccgcaggcgggggccgggcttggttttcagaacactccgcagaccagtgtggcgccttgtccgcggctccgaaggagcaggacaaggcgccacacatggtcgaggacgttctgaaaaccaagcccggcccccgccggataggtcacactactcgcagagcagcttagcgatctggacggcgttggttgccgcgcccttacggatttggtcgccgcagcaccagaaggtgataccgcgcgctgcctcggggttcgagatgtcgcgacgcacgcggccgacccaaatcaggtcctggtcggacgtatccatcggcatggggaagcggtcgtgtgcatcctcggcgctcatgtcgtcaaccagcttcacgcccggagcggcagccagcgcggcgcgagcctcctcgaccgtgatgtcgcgctcaaactcgagcgtaatgctctcggagtgcgagcgcagtacaggcacgcgcacgcaggtgcagttcacgcgcagctcgggcagatgcatgatcttgcggccctcgttctgcagtttcatctcctcggaggtaaagccctcctccttgacgccgccaatctgcggaatcaggttgctcgccagctgggcggcaaaggcgcgcggctcgggaatctcctcgccgcggcccagggcggccagctgagcctcaagctcagccataccgggagcgccagcgcccgaagccgcctggtacgtcgagacgatcatgcgcttcacgccggcgagctgatgcagcggccacgtaggaaccagaccgatgatggtcgcgcagttggggttggcgataaggccgtgatgccacttgatgtcgtcggcattgatctcgggcacaaccagcggcacctcgggatccatgcggaaggcgtggctgttgtcgaccacgacggcgccgcgcttgacggcctcgggcaacagctccttcgcgatgtcgtcgccggcagcgccgagtacgatgtcgcagccctcaaaagcctcggggcaagcttcctcaatcacgatctgctcgccgcggaactcgacggttttacccgcggagcgtgcacttgccagcagcttgagcttgccaaccgggaactcctgctcgttgaggcactcgagcatctgggtgcctacagctcccgtcgcgcccaaaatagcaaccgtgtactgtttcatgctttcccctttaaaggttgtggcttttgcccgcacgccgagcaggccgattattgttgccagtgtatacaagaacggggcgggcacgaaacccgccccgtcgaaacgaaaccgaaacgaaacgccccaccgtggatttttgagacatgacccaaaaatctaccgagcggtcgctactttttgagcgcagccagagcgggatcgaccggcgcaggagcctccaggtcagagaccttcacaatgccgttctcgtcggagaaggcacggtaaatggtccgaatcgctaggtcgaagtccttctcctcgacaccgataatgatgttgatctcatcgcagctctgcgaaatcatgcgcacgctcacgccggcctgaccgagcatgccaaacagatggccggaaataccagcacgaccgcgcaggttgcgaccgacggttgcgatgagcgccaggccctcgacaacctcgatctcgagcggctcgacctcctgctgaatgtcgcccacgagtgagtacagcgagtcgtgcacatcctgctcctgcaccacggcgccaaagcggtcgacgccggtgggcatgtgctcgacggaaacgtcatagcgctcgaacaccgaaagcgcgcggcgcataaagccgacacggggcttggtgcggtcgcgggcgacgttgatggcgacaaaaccgcgcttgccggtcacgccggtaatgatgggctctgcctcgccctcgtcagccgtctcgctaatgatggtgccggggtcctgcggcgcattggtgttcttgatgaccagcggaatacccgcctcacgcacggggaacacggcctcctcgtgcagaacgcttgcgcccatgtacgaaagctcgcgcagctcctcgtaggtaacgcgcgcaatgggctgagcctcgggcacaatgcgaggatcggcagaatagaagcccgagacgtcggtccagttctcgtacagatcggcgcccaggcacttggccagaatcgagccggaaatatcgccgccgccacggtcgagcagcttgatctggccctcacgcgtcgcgccgtagaaaccgggcataacaaagccgccctgctggccgtactcctgcaccagctcggaggtgcgattcatgctgagcgtaccgtcatgatggaacgcaacaaccgtcgcggcatccaggaacggcagacccaggtactcggccatcagacgggcggtaaagtactcgccgcggctcacgagttcctcggtagagtagccgcccgagcgggcgcgctcggcaaaggccgcgaactcctcgcggatgggataggtgagctccaactcgtcagcgatatcaaaatagcgctggccgatgtcctcgagtagttcctcgcacgacacgtgatacttaacgtgcgcgttaaccaggtagagcaggtcggtcaccttggtgtcgccc

SEQ ID NO: 4378 - DNA, 17705 bp, synthetic construct
  misc_feature 1..17705: note = Synthetic
  source 1..17705: mol_type = other DNA
aagttctatcgcgaagacggcgcccgttcgaccgaagggggcggcgcgggccttggcctggccatcgcgcgcgaaatcgcccgtgcgcacggaggcgacttaactgcgacgagcgtggcgggccgcacggtcttcacgctgcgcattcccgtgtaaggtcgctcgccccggctgtttttcgtgcggaacgggttcggtgcctcgctgctgatcgacggggcgccgccgatcgccttattgcgcgggcgtccattcttcggccacccatttgcgcacgcattcgatgaacgccttggtggccatggacgccctgctgtacgagcgcacggctatggccagttcgcgataggtgggcacctcgggcttcacgcgcgccagctcgaacggcgcgctttccaaaacgagctgggggaacaggctgaatccgaaccccttgttcaccatgcccatcacggcgtagtcgttgtccatcacgtagcgcacgtgcggctcgacgtcgtgctgggcgaacaccgagtcgaactcggtcaagtcgtcgctgcttcgtacctttatataaggttcggaagccagcgactctttcgggaagaacggggcgtcggccagggggtgttcgggcggcagcaccacatagagcgggtcgcgcgccaggggaatggtgaagaagtcgagcgtggcgggcaaaatcacgaagcagcagtcgaattcgccgcgccaggtggcggcttccatttcgtcctggctttcatagatcaccagctcgtattcgatgttggggcgatcgtgcaggaacacgtccatgatgcccggcagccactgcacggcgatgctggcgaacgccgccacgcgcaggctgccgccgccgacgtgccgaagctcgtccaggcgcatctgaagcgcgtgctcgcttgcgcagacgtcttggatccagggcagcaggttgcgcccgtcggcggtcaggcgcgctcccgaatggccacgcgtgaacagggccgttcccatttcctgctcgagcgagctcatcatgtagctgacgcccgcctgggtgtagccgaggatttcggcggtctttttgaagctgcccgtcttggcgacggtgacgaatgcttcgtatttctggttcgccacggcgcctccttccgcacggtattcagcgcatcgctgcgtgctgttgattttcgacacacacaaaacacacgagggtataagaaaattttaattaaatataagatacactcattttactttcatatctgcagaaactactatgcatgtatcggaggttatgcgggcaaggcgaccgcccgtaaggagatgcctccggttccgacacccaaagtgcacgtcgcggcggccgtttcatacggcgccgcggctgtgtgcgactgtcggcaccttgccatattcgagggcgcttcgtcttttcgacgcgcccgccccataaggcggggcaggccttcctctctcggcttgcttcccttaagccttctctgcttgtcccgctcgttttctcgaggccccttccgcctttcggcgcaaggggcttttcatgcctgacgttcgtccggagcggtcttcgcggcttcgcgcccatgcgccgcggcttcgcgtgcgtttgcggctccatgccgtttcgctcgccgccgaaatgcttccgtacggcgcgccctcacggtgtctccatataatgaaagttactttcttttagaaacctacttgccgttttgcctgttcagcagcgtgatgctttttcttaaaagcacaaaacatccatacttcgtgaaaaaaagtcttgacttaatttttcaacgtgattaaattattcgtttgcgtatttacgctcatatcgtctatttccctaacggaaggaagacctgtggccaaagcagaaaacagcgctcccaccagcctttatagggaacgtcgcagctttgcgaagattcccgacgtcatggatgtgcccaacctgatcgccatccagacggatagcttcaagtggttcatggatgaaggaatcaccgaagcattcaacgacgtgtgccccatcgagaacgcaacgaaggacatgtgcgtcgagctcggcgcgcataaattcggcgacccgaaatacaccgtcgacgagtgcaaagagaaggacgtttcctaccaggctcccttgttcgccaacattcgcttcatcaaccgcgagaccggcgaaatcaaggagcaggaagtcttcatgggcgatttcccgctcatgaccccgcgcggcacgttcatcatcaacggcaccgagcgcgtcgtcgtctcccagctggtccgctccccgggcgtgtacttcagctccgagcgcgacaagacctccgataaaaccatcttcggcgcgaaggtcattccttcccgcggcgcctggctcgagttcgagaccgacaagcgcgacatcctttccgtgcgaatcgaccgcaagcgtaagcagccggccacgctgcttctgcgcgcgctcggcatcgccgagacccgcgaggaaatcgtcgacgtgctcggcagctccgaaatggtcctgcgcaccctcgaccgcgaccccgccaccaccaaggacgaggccctgatcgagctctacaagcgcttccgccccggcgagccgcccacgatcgactctgcgcgcacgctgctcgacggcctgttcttcaacccgcagcgctacgacctggcgaaggtgggtcgctacaaggccaacaagaagctgggcttcccttccgatttcgattcctccacgctgaccgaggaagacatcatcgcgaccatgcgctacatcgtcgcgctgcacgagggcgaagagggcttcgccgtcgatgatatcgaccacttcggcaaccgtcgcatccgcacggtcggcgagctgattcagaatcagttccgcatcggcctgtcccgcatggagcgcgtcgtccgcgagcgcatgagcatgcaggagcccgacgaaatcacgccgcagtcgctcgtcaacatccgcccgatcgtggcggccatcaaggagttcttcggctcctcgcagctgtcccagttcatggaccaggccaaccccgccgcaggcatcacgcacaagcgtcgtctgtcggccctcggcccgggcggtctgtcgcgcgagcgcgcaggcttcgaagtccgagacgtccataactcccactacggccgcatgtgcccgatcgagacccctgaaggcccgaacatcggcctgatcggctcgctggcaacctacgcccgcatcaacagctacggcttcatcgagacgccgtaccgtcgcgtcgtcgacggcaaggtgaccgacgaggtcgactacctgaccgccgatgaggaagagaacttcgcgatcgctcaggcgaacgagtccttcgaccccgagacgcgcgtgttcggcagcttcgtcgacggcgagttcgttcccgccgaaagggttctgtgccgtacgcgcgacgccgcaggcgtcttcggcgagcccgacgtggtggcccccgaaaaagtgaattacatggacgtttccccgcgtcagatgacctctgtcgcaacgtcgctcattccgttcctcgagcacgacgacgctaaccgcgcgctcatgggctccaacatgcagcgtcaggcagtgcccctgctgcagccccatgccccgctggtcggcaccggcatcgagcaccgcatcgcggtcgactccggcgaagtcctcgtggctcagaacccgggcgtcgtcgactacgtggacggctccaccgtcatcatccgcaacgacgagggcgaattcgacgagtacctggttcccaagttccagcgctccaaccagtccggctgcatcaaccacaagccgatcgttcgcaagggcgacgaggtggccgcaggcgacgtcctggccgacggccccagctgcgaccatgccgagctggctctgggccagaacctcatggttgcctacatgacctgggaaggcttcaactacgaggacgctatcatcgtgtccgagcgcgttgtggccgaggacctgctcacgtctatccacatctccgaatacgaaatcgacgcgcgcgacaccaagctcggtcctgaggaaatcacccgcgagatccccaatatctccgaggacatgatctccgacctcgacgccgacggcatcatccgcgtgggcgccgaagtgttccccggcgacgttctcgtcggcaaggtcacgccgaagggcgagaccgagctgaccgccgaggagcgcctgctgcgcgccatcttcggcgagaaggcccgcgaggtccgcgacacctccctgaaggttccccatggtgcgggcggccgcgtcgtgggcatctatcgtttcagccgcgaggccggcgacgaactggctccgggcgtcaacgagctcgttcgcgtctacatcgctcagaagcgtaaggtccagcagggcgacaagctgtccggtcgtcacggcaacaagggcgttatctcccgcgttctgcctgtcgaggacatgccgtacctggctgacggcacgccgatcgacgtcatgctgaaccccctgggcgttccttcccgtatgaacgtcggccagctgctcgagtgccatctcggctgggctgccaagtggggcttctccgatgtcgaaggcacgaccgaggccgtcgaaggcccgacctacgtcgcgacccccgtcttcgacggcgcgaccgagcctgagatcgtcgacgtcatccagaaggccaacgccaaccttatcaacctcaatcatgcgaagtacggcgacatggcgcgcgacgagttcgtcccgcagctgtccgtcaccggcaagaccacgctctacgacggccgcaccggcgagcccttccgcgagcagatcacggtcggtttcccgtacatcctgaagctgggccacatggtcgacgacaagatccatgcccgttcgaccggtccttacagcctgatcacccagcagcctctcggcggcaaggcccagttcggcggccagcgtttcggcgagatggaagtttgggcgctgtacgcgtacggcgcttccaacgtgctgcaggagattctgaccgtcaagtccgacgacaccgccggccgcgtcaaggcgtacgaggcgatcgtcaagggcgacaacatcgacgacgccgaggtccccgagtccttcaaggttctcatgaaggaaatgaagtccctcggcctgaacgtggaaatggtggcgcaggaccagcacaccatcgacttcgacgccgccgacgccgagaccaggaacagcgccaaccgtgcgcgcaccctgctcgacggcgatgccgagaagtccgagcccgccgaaggcgatgccctcaaagacatcgccgcagaccttcgttccctcatggacgacgacctgctgggcggctcgaatgccgatgttgaaagcctgatcggcgccgatagcgctaccgttaccgaaaccggcgaaggagaagagcgataaatgagcgaattcgacgttaacaatttcgacgccctgcgtatttccctcgccagcgccgaggatatccgcggttggtctcatggcgaggtgaaaaaggccgagaccatcaactaccgcacgctcaagcccgaaaaggacggcttgttctgcgagaagatcttcggccccaccaaagactgggagtgcgcctgcggcaagtacaagcgcgtgcgcttcaagggcatcgtctgcgagcgctgcggcgtcgaagtgacccgcagcaaggttcgccgcgagcgcatgggccacatcgagctcgccgctcccgtcagccacatctggtacttcaaaggctctccgtcgcgtctgggctatctgctcgacatcgcgccgaaggagctcgagaaggtgctgtacttcgcatcttccatcgtgacctgggtcgatgaagaggcccgcgaggaagacgtggaagagctgcgcgacgagctggccgccgacctcgaagagctggacgccgagcgcgaccgcctcgtcgaggccacgcgtcgcctttccaccgaatacgtgcccgaggacgacgagttcatcgacgaaatcgacgaagacgagcgcatgagccccgaggaggtcgacgaggaaatcgccgacatctacgaggagttcagcgagcgcaaggccctgcgcaccgaggcattcgacacgttcctgaagatcgtgccgaagcagctcgtgcccgacgaggccctgtatcgcgagatgcgtctgaactacagcgactacttccagggcggcatgggcgccgaggctatccgcgacctgctcgaggccatggacctggagaaggtggccgaagagctgaaggagaccatcgagaccggcaagggccagaagcgtgccaaggccatcaagcgcctgaaggtcgtcgacgcgttcctgaagtccgacaacagcccgtgcgacatgatcttggacgtcattccggtcattccgccggacctgcgtcctatggtccagctcgacggcggccgtttcgccacgtccgacctcaacgacctgtaccgtcgcgtcatcaaccgtaataaccgcctgaagcgcctgctcgacctcggtgctcccgagatcatcgtgaacaacgagaagcgcatgctgcaggaggccgtggactccctgttcgacaacggccgtcgcggccgtcccgtcacgggccccggcaaccgtccgctgaagtcgctctccgacatgctcaagggcaagcagggccgcttccgccagaacctgctcggcaagcgcgtcgactactccggccgttcggttatcgtcgtcggcccgaacctgaagctgcatcagtgcggcctgcctcagcagatggctctggagctgttcaagcccttcgtcatgaagcgcctggtcgagctcgagtacgccgccaacatcaaggcagccaagcgcgccgtcgaccgcggtgccagctacgtgtgggatgtcctcgaagaggtcatcgtcgaccaccccgtgctgctcaaccgcgcacctaccctgcatcgtctgggcatccaggcgttcgagccggtgctggtcgagggcaaggccatcaagctgcatccgctggtctgcaccgcgttcaacgccgacttcgacggcgaccagatggcagtccatgtgccgctgggcaacgaggctcaggccgaggcccgcgtgctcatgctgtcctccaataacatcaagagccctgctcacggtcgtccgctgaccattcctacccaggatatgatcatcggtctgtactacctgaccgccgtgcgcgacggcttcccgggcgaaggccgcgtcttcgtcgacttcgacgacgccctgaacgcctacgacgcccgcgccgatcttgacctgcaggccaggatcagcgtccgcctgaaccgcgacatgcaggtggccacggcctacggcgtgttcgaggaccacaaggcaggcgagcgtatcgagaccagcgtcggccgcatcacgttcaatgccgtgctgcccgaggaccatccgttcatcaactacgagatgaacaagaaggaaatcggccgcctgatcgaggattgctgcaaccgctacagcctgtccgagatgcccggcatcctggacggtctgaaggacgccggcttccactatgccacgcgcgcaggcatcaccgtgtccgtcttcgacgcgacggttccgccgaacaaggccgagctgctcgccgccgccgacgacaaggtcgccgcgatcgacgaagactacgagatgggcctcatgagccccgaggagcgtcataagcaggttatcgacatctggaacgagacggccgacaaggtcggcgacgccatggccgataacttcgacaagttcaaccccatctacatgatggcgttctccggcgcacgaggtaacatcaagcagattcgtcagctcgccggcatgcgaggcctcatgggcaatacgaagggcggcacgatcgaccgccccgttaagtcgaacttccgcgagggcctgtcggttctggagtacttcatctccacgcacggcacccgtaagggcatgaccgacaccgcgcttcgtaccgccgactcgggttacctgacccgtcgtctggtcgacgtcgcgcaggacgtcatcgtccgcgaaatcgactgcggcaccaccgagggcgtgtcctatccgctgcacaacgagaagggcgagctcgacgagaacctgatcggccgctgcctggttgccgacacgggcgacttcaaagagggcgactacctgtcctcgatggacgacctcaaggctctcgaggccgcgggcatcgacgaggtggtcatccgcacggtcatgacctgccacgccgagcacggcgtctgccagaagtgctacggttgggacctcgccaccggccgcccggtcaacatcggcacggctgtcggcgtcatcgccgcccagtcgatcggcgagcccggcacgcagctgacgatgcgtacgttccacgctggcggcgttgcgggcgacgacatcacgcacggtctgccccgtgtcaccgagttgttcgaggcgcgcaagcctaagggcctcgccgtcctcgccgaaatcggcggcacgctgcaggtgtcttccgacaagaccacgaagaccctcacggtccatgaccaggaaggcaacttccgcgagtacgtggtttccgcgcgcgcccagcttctgcccggcatcttcgacggttgccaggtcaagcccggccagcagctcaccaagggttccgtgaacccgcacgacctgctgcgcctgaccgaccccaacaccacgctgcgctacatcgtggccgaggtccaggacgtgtacgtgtcccagggcgtcgacatcaacgacaagcacatcgaggtcatcgcgcgtcagatgctgcgcaaggaagtggtcatggacgccggcgattccgagcttctgcccggccgccaggtcaaccgccacgagttcgagcgcatcgccgacgagctcatcgccgaaggcaagcagccgccggtgggccagcctctgctgctgggcatcaccaaggcgtctctcgccaccgactcgttcctgtcggccgcttcgttccaggagaccaccaaggttctcacggacgcagccatcgagggcaagaccgacgttttgtccggcctgaaggagaacgtcatcatcggcaagccgattcctgccggtacgggcctcgctcgctaccaccaggtgggtctgacttacaagggtcagtccgtcggcggcgaaatcgaggaccagctgcccgattacgctccgtccgagctgcgcgaaatcgaggacctgctgcctcagccgcaggattggtcgctcgatgagaactacatgaacggctactccagctacttcggcggcagcagcttccgcggcggccgcgcccagcagctctccgacgaggatgcacgtctgtacctctacgacgacctgggcgtgtctcagcgctgggccaacaagttcagcgaggcgggcatcgagacggtttccgacctggtcggttacaccgaagacgagctgctgcgcatcgagggcatcggcgccaaggcgctcgaggagctcaaggccggcctcaacgagcacgagctcggctacctgctcgaggacgatctggccgcttcgagcgacgacatgagccagctgctcgacatggtgttcagccccgatgacaccatcctcatcggcggcgacgctccggccaccttcaacaccgaaggtgaggagatgctcggcgaggccctgcctccccgcagctatcaccgcgatctgagcgagctcgacgctctgctcggcggcctgggcgacctcggcttcggcgagacttcggaagagtccgagtccgaaggcgaagacgaggaataaagcgcatacatcgctttcatgaagaaggcggccttcgggccgccttcttttcgttgcgcaggcggtttcccggcgccgcttctcccgttttccctgtcccataacagggaaacccccaacgccgccacgtctttccgtctgaggtgatactctgtatgaaatgggaaggagcgtactatggtcgaggttaaaacagaggcggtcggtcggctcggtcgtcctcgatatctggttttgggaatggacccaggcattgcgagttgcggcttcgcgttgctcgatatcaacaatcatgagatcttggaaatgggcgttcgcttgttcgatgccccgttgcatcctaaaacgaagcagagcttggccgctattcgtcgcggcttccgttcgacgcggcgcaatatcgaccgaacgcaggatcgactcaagcattgcttcgagtgctttaagaaatacggcgtcgttccagatgatgccgataaagaatatcttcatacggtcaaaggggataaacagcccctcaagcttcgtgtcgatggcctgaatcgcatgctcacgaacagggagtgggccatggccctctattctctgtgcaagcgtcgtggctacattccgcacggcgaaggcgctcaggataaatcgagcgatgacggcaaggtgcttgctgcgatcagcgcgaatgaaaaagaaatcgcagcaggaaaattcagaaccgcaggcgaatggctcgcgtcgcgtcccacgagcaggaatcgcgggggcaattacgagatgtgcgtcaagcacgagcagcttatcgaagaaacccgtattctgttcgaagcacagcgctcgttcggttccaaggttgcctctgaagatttcgagcgcgaatacatcgacatatgcaattgggaacggccgcgcgacgatttcgataggcgtacgtacggcctggtggggtcatgcgtttactttccgcaagagaagcgcgcggcacgttgcacgcttacgagcgagcttgtttccgcgtatggcgctttgggaaatataaccatcgtgctcggcgacggcggcgtgcgccgtcttacggcggccgaacgagacgaatgcattcgcatattgtttacggccgatccgaatgcgaagacccgcgttgtgaagttcggtgccttgcgcaaaaagctcgacttgagttcgcgcgattatttcaagggcgttcctgccgatgacgaaaagacccgtgaggtgttcaaacccagcggttggcgcgccttgtattcgacgttgcgggaatccaatccgcagcttctcgcaaggttgagggacgatatcgatttggcggatgccgttatggaggccgccgcgtatgcatcatctgcgtcgagcttggagaactgcctcagccagcttcctcttagcgatgatgaaaagcaggcgctttgcgcgctgccgtattcgtctaaagtgctgaatggatatggaagccgctcgaaaaaggcgctcgacttgctgcttgcttgtctcaaagaacccgaagtgctcaatctgaccgatgccgaggcggcatgtgggttggatgcgttgcgtcttggcggcccacagctcgagcgttccgagaagctgattccctatgaggcctgggtaagcgcggcgggtcgtacgaataacaatcctgtcgtcattcgtgctatgtcgcaaatgcgcaaggtcgtaaatgccatatgcggcaaatggggcgttccgaacgaaatccacgtcgaacttgaccgcgagcttcggttgcctaagcgtgcgaaagaagaaattgccaaggccaataagaaaaacgagaaagagcgcgagcgcatagccgttcaggccgcggacattctttcctgcagccccgatgaggtgagcggaaagcagatagagaagtaccgcttgtgggaggagcaggaaaactccgatttgtatacgggcgagcgtatccacgtccaacgccttttgagcgatgacacctatacgcagatcgaccatattcttccgttttcgcgaacgggagagaattcgcgtaataacaaggtgctcgtgctttcggaaagcaatcagcagaaacgcgagcagactccgtatgaatggatgaattcgggccagcctggtgctccgtcgtgggacgagttcaaacttcgagttcaggcgaaccagcatcttaagcaccgcaagaaagaattcttgctcgagcaggatttggaatcgaaggaagtcgaattcctccagcgaaacgtgaccgacacggcttatatgtcgcgcgaagtctgcgcctatctgtccgattgcctgttgttccccgatgacggcatgaaggttcacgttgttcccacgacgggtcgcgctacggcatggttgcgtcgccgatgggggctgaacttcggagcaacgggggagaaggaccgttcggacgaccgtcatcatgctacggacgcctgcgttattgccgcgtgcagcaggggccttgtcatcaagacggcaaaggttatgaagggaacgcactggagcatcacgcgtaatatgacgtcggaggagcgcagagatgcccgtatggaggcgttgcgtgagagcatgccctgggaaagcttcgccgacgatgtccgcgcacgtcgcgatttcgtggtacccacgcgctatgtgcctcgtaaaggcagcggtgagcttttcgagcagacagtgtattcgtatgtcggtcggaacgaaaaagggcaggaccttggccgaaagaagggcgtcgacaaagataaggtcatgggcaatgccgtagtgtccgatgatggaaaatcggtcattaaggtgagcgagatgctgtgcctgcgtttgtggcacgatccagagattaaaaagaaggggaaggtcgttggcggctggtatgccgacccggtgtacaagtctgatattcccgctcttaaggatggcacgtatgtgccgcgaatcgcaaaggcccactgcggccgttcggcgtgggcgcctgttcccgaacggcttttgctccagcgtccggttgagttgtatcttggtgatgttgtcagggtgaaagagatggttgggtgcctttctggttttgacatgggtggtgttgcatggaagttcgttgacccaatgacgcgtgagtcgatatctgcgccgaccattggaagtcttacgggcaaggatgctcccaaggtggttcgtgggggcattgtcggttagcctaatcgattcgggcctcgtcttggttttacgaggtccgaattgctttgattccaataagcttccgtgtggttcttgatactggttgccatcgagtacgtcttgagctcgcacttttccccaagctgatacaatgccgttgcgcgacgccgaaggctatttcgtgtcttgagctcgcacttttccccaagctgatacaatcaggacgcgcccgtctacgaatccccacaggtcttgagctcgcacttttccccaagctgatacaatgctaggcgccgcgtaatccccatcacgtttgtcttgagctcgcacttttccccaagctgatacaatgcatgcgacgccgacgacagactcgtcttcgtcttgagctcgcacttttccccaagctgatacaatgctgcgctgatgaagcagcacgcatcggaagtcttgagctcgcacttttccccaagctgatacaatcgccgcgcacctgctggcagtcggcttcgagtcttgggctcgcacttttccccaagctgatacaattgcaaacgctgaaagagttcaggctgcgcagtcttgagctcgcacttttccccaagctgatacaatgagagacacatatagcccgcgtactggatagtcttgagctcgcacttttccccaagctgatacaatgttgcccacggcgtagtcgtaataggccgtgtcttgagctcgtacttttccccaagctgatacaatcctatcggcaacactcgcggcttcgtgtaggtcttgagctcgcacttttccccaagctgatacaattgcacctcgcgcggcatcaatgcgtctttggtcttgagctcgcacttttccccaagctgatacaatcggtgcatatctttctgcccaaaccgcctagtcttgagctcgcacttttccccaagctgatacaattgatctcggccatctttgacgattcgggcaagtcttgagctcgcacttttccccaagctgatacaatccgctcgacgtatacaagtaaagtcatagtgtcttgagctcgcacttttccccaagctgatacaatcacggcaccgagatagacgcgatccgtactagtcttgagctcgcacttttccccaagctgatacaatacgaagccatcgaaaccacgcagaacgccggtcttgagctcgcacttttccccaagctgatacaataaccacgacgccttctcgacgacgatagtagtcttgagctcgcacttttccccaagctgatacaatgaaacgcgcgagtttgacgacaaatcttgggtcttgagctcgcacttttccccaagctgatacaatcatatcagcatcactcaacattgccacagcgtcttgagctcgcacttttccccaagctgatacaatatgtatcgaaaaaatcccctgtcatcaggggatttgcattttctctcaaataaaatccaaccgaaaacgactgcatgtgagagtgttttattcgattttattttgctattccagctgtcattgggccaaaaaacacccagatgaggggtgaaaaataccctcataatgtgttagctttatggagtcatggaagaatggcgtaagaatttacggctgctattttgcccagaaaagagttcgccccgcgccttccgaagatgacgcgggggtaaccctacgggtgaacctaccgttgtaggttccccttgtctggagtctcgcacttttccccaaggtgagacgtttgacattgccttattgtagcgcattcacagggaaggtgcgtgaaaaatggctcagaggactatccttattcagagtaaggcgcatttatgcgtccggaacggattgctccagatcgaaacggacgataaaagcctggctattcctcttgaagacatctgggtcgtcatcgtggagtcgcatctcagcaccctcacggtatcgtgcatgtcgagcctgaacgaggcgggaatcggcgtgatgatttgcgggcgcaatcacatgccgaacggccttcttcttccgcttggcgctcattcgcgccatgcaaaaatcgtggaagaccagctcatgatgagcgtgccgatgaaaaagcagctttggaaaagaatcgttcaatcgaaaatagagaatcaggccgctgttttgagagagatgggcatcgattcgagccctcttgatgaatacgccgcttcggttcagtcgggcgataagaacaacagggaaggcgctgctgccgcggtgtatttcaagcgcctgatcaaggatggaaccagaagggccagcgcacagagcgccgccctcgattacgggtatggcgttttgcgcgcgggaataggccgcgctgtcgtgggcggcgggtggcttgcttcccagggcattcatcaccacagcgtctataacgcattcaacttagtggacgatctgatagagccgtttcgcccgcttgtcgatcttatcgttatgagctacggcctcgaagatcccttggaatcatccgataaggcgttgctcgcccgtgttttcgagcatgtgatgctgatagacggaaagcattgcggatgccagcaatgcatcgaggttgttttgtcttccctgaggacggctgtcttggagaaggatccgagcaagcttctcctgccgcgactcgaggggcttgaaatggtaacggtcgaataggacaggaggaggaatgagggtcatgcgtttgatggtgttgttcgatctgcctacggggaacaagaaagagcggaagtcttatgcggagttcaggaagtttcttatccatgacggctaccacatggagcagttctcggtgtactcgaggctcctgataacgcgcgaatcttccgcgatgcacattgcgcgtctcagggagcacttgcccgaagcgggcgaagtgacggttatccagatgaccgagaagcaatacgaagatcggcttgttttgctcagcgagcataaggaaaagcccgttgaagaaagcgcccagctcacgcttgttctctagctttgaaatggagcgaggcgagtctgcgcccgaagggcctagccgcgggcgccttcgggtgccttgcgacgggcggccatgcgtcaaggcgccccatttatgcgaagtatggtgcatttccgctgcttatatgcgctattcgcccgtgattcgcgccgaatcgattttccgtcgagacgtatgtgatagggtggaggcgaaaaactacgagcgaaggcgcggattgcttgtttcgaaacgattcgtgctgctaaggagcgggcatcatggcaatcgaagagcaggtcaccgagcgcatcaaggagatagcggccgcgacggaggacacgatcgtcgccgaccgacgttatttccacgcgcatcctgagctgtcaggcaaagaggtcagcacggcgggcaccatctgtgcccgtcttgcacgtatgggcattccgtacgagcgcgtggcgaagacgggcgttatcgctacgatcaagggaacggccgacgacgcgtacgacgccgagggcaaccccaaacgccgcatcgccctgcgcgccgatatcgacgcgctgcccgtgctcgagcgaaccggcttgccgtatgaatccgagaacagcggcgtcatgcacgcgtgcggtcacgattgccacattgcgatgatgctcggatcggcgcgcattctcatgcagatgcgcgaccagatccacggcgaggtgcgtatcatcttccagcccgccgaagaaatttccatcggctcgcgcatgatgatccgcgccggcgccctcgacggcgtcgacggcgtgttcggcatgcatatctggagcgaaatcgaggcgggcaagatttcggccgagccgggccagcgcatggcccataccgactggttccgcgtcgatatcgacggccagagcgcccacggttccatgcctcacaagggcgtcgatgccgtcgtggttgccgcagagctggtcgtcgcccttcaggttttggtcagccgcgatatttctccgttcgagccgctggtcgtcacggtgggcgaggtccacggcggcgaagcgcgcaacatcatggccggttcggcctatctgaccggcacggtcaggacgtggagcgagaagacgcgcgccgccatgcccgatcgcctgaagcacttgatcgaccgctccgccggcgcgttcggcgccacggccaagctgacttatgaggccggcaacgcgggccttgccaacgacgaggaaagcgcgtacagggcgcaggccagcgtgaagaagctgttcggcgatgatgccttgtgcgattacgaaggcaccctggcgggcgaggatttctccgaatacctggcgcgcgttcccggcgcgttcgtgttcctgggatgccgcaacccgcatatcgatgcggtgcatgcgcagcatagctgctactaccgcgtcgacgaaagcacgttggtgaagggcgccatgctgtacacgcagtacgcgatcgacttcttgaacgagtaggctttcgggcgctttcgccctgggccgaaccacggcgtttcgagccgccgtcgaccgaagggtcggcggcggcttttcgtttaatggcttcagcctggcgcgcgcgtagccgcgccgagacaaccacccgctttgcgggtggtacccaatctgctttacaaaaccacctttccgtcggatattgacgatgttcaggccgt

SEQ ID NO: 4379 - DNA, 12914 bp, synthetic construct
  misc_feature 1..12914: note = Synthetic
  source 1..12914: mol_type = other DNA
aaacgtcggcgaatcgctgtgcgacgccgtgagctgaaaatgatagtcaccggcaacaccgtcctcgccccacgtcgcggccaggtcctcgcccaccttaaaggcaacaacgctcgaggtgttgcgctgcgtgtaataacgcccgcccggttcgatgtcccacgccgcattctcgggcaggtaggtaaagcccgcctcgtcgagctcggccataatggtcgccgccgtatggaacatgctggggcatgcctcgataaagtcgataaggtcgttggcggcctcgatatcatcggccgtcacatgcgcgcgctcgggcgttcctgatccgtcatgctctcccctttcgctgggttgatgatcccctccagcataccccgccacgccagcgccgcactcttcattccgtgcttaattccgcgccactcaccaagttgagccatcatgcccgcgctccttttgcgacaattgcgctaacaggacgagaggagtcgtcatgaagccacgtaacattgccatcacctgcggtgtcgcgggagtcgccgtcggccttgccgctgccaccggtatcgtttatcacaagcaaatcaaatccgccgcgtcgctcaaacgcttgaccggctacgcggatggctatgacctgtacgcaatcgacatcacctacgactacgatctcgatcgcatcatcgccgctggcgtgcgcgacgaccaggcctacatcgatgccgtggtggcgcaggtgctgcccggtgtgccggcacatgtccagcgccccagtttgcctgcagtgcttttgtcgccgtagatgccgagcgcgtgcgcaccggtcgcaattacgactttaaggacgacacctcggcgctgctggtgcgcaatcacccacgcggcggctatgcttccatcgggcttgccgcccttaacaacctgggcgataacactccgcttgactccgtcgccggacgcgccgcggcactcatgggcccgtttgcccagctcgacggtgttaacgaatgcggcgtgtccattgccgtactcaccctggattccaagccctgtgaccaggacacgcaacggcccgtcatcaacacctcgctcgtcatccgtctggtgctcgaccgtgccgccaccacgcaagaagctgtcgacctgcttttcgcctacgacatgcacgccatggcaggacgcgattaccacttctttatcaacgacgccgccagtgacgcgcgcgtagtagagtgggacccgcgcgatccgaaccgcgctttcaaagcgactcctgtgcgccaggttacgaacttctacgcctgctatggcgacgaagcgctgcccaaccaaaagaatggcgagctgggccatggcaaagagcgcgccgtcgcaatcgccgatgtccttgacgcccatgtcggtgcccaggacgaggcagtcgcttggaaggccctgcgcgccgcagcgcaagaacccaatccggaagacatcaccagcaatacgcaatggtcggtcgtctttgacaataccgaacccgccgccgctattacgctgcgccgccactggggcgacgtcgacgccttcgcactgtaaggagccaggcccgtcggccttacgctcgcctgacgttgcttacatttccatacgcttgagctaacacgttacccccgtatcaacagtgtgcgggggtaaacttatgcgcatgttataacttgcccggaaggattcaccatgcttaggatcggtcttcttaccagtggcggcgactgccaggcgctcaacgccactatgcgcggcatcgtcaaaacgcttatgacaaatagcgaagaacctatcgagatctatggttttgaggacggctaccagggccttatctacagcagattccgcgtcatgacgcccgccgattttagcggcatcctcacccgcggcggcaccatcctgggcacgagccgtacgccgttcaagcgcttggatactcccgaggccgatggcgtcgagaaggtgccggcgatggtccacacctatcataagctgcagctcgactgcctgtttatgctgggtggcaacggatccaccaagaccgccaaccgcctgcgcgaagagggcctcaacgttatcgcgctgcccaagaccatcgataacgacacctggggcaccgagttgacgtttggctttacgagcgccatcgacgtcgctaccaagtgcatcgacgacatccacaccaccgcgtcgagtcacgggcgcgtgttcgttatcgagatcatgggccacaaggttggctggatcccgctgtatgccggcgtcgcgggcggcgcagatgtcatcttgattcccgagattccctacgacatggataacgtcatcaagaccatcgagcatcgcatggagaccggcagccgctttactatcgtggccgtcgccgagggcgctatctccaaggaggacgcggcgctgtccaagaaggagtacaagaagaagctcgccgagcgcacgagcccgtcaatcgtgtacgacatcgccaaggagatcgaggccaagaccggtcgcgagacccgcgtcgccatccccggccacacgcagcgcggcggtcagcccgacgcccaggaccgcatctttgcgactcagtgcggcgtcgaggcagcgctcggctgcctgcgcggcgagtttggctacatgattgccctgcgcgacggcaagatgtgccacatgccgctcgaggatgtcgccggcaagctcaagtttgtcgacccccagagtgatctggtgcgcgaggccaaggcgttgggcatcagcttcggcgacgaatagcctcagccgaaactgctctcatcggaggtcccaggtacctccaaatcgtctcggacatgtcaggacccgccgtgcgcttcgcgcggcggggtccttccgtcctgcggaaagatttgggaggtaagccctggggactcctgcggtaactagggaggccgaggctattcgtcttcttgctgcggatgcctagggtggggtgcagcgtgcatttttgggagttttcagcagccgtgggtgcctgcatactggattttgggcgaaaagcaggcgccatgagccgcatactgtaaaaatgagcgatccttgaggtgccgaggctcataatcaaggctttcaacgcggttttgtgcacccattcccgcgcccgcggactccgggatgctgaatactccgggatttgcacgccgccccctggggtacccgtgggcaaaaagcaaccacccagccgaaatatgcatccggcggggcggtttatgcagtacagcggctgtggatgcgcatgtcgctcagcgttcttgccgaccgatgcaacgtcgtgcgtagcccttaatgtcttcggtgaaaccgtcaaggtcgtcgagcgtgataacgttatcggaaagcaagttgctatctcataacgcatggtgctgcggcgaatatcgttcacaagcactcctgaggacagcttgtccctattgatacgctcttctaacgcccaaaatctactggacgcttcactgccaccgttcagtatctcgatgtactggccgatgagcatttccatatagctttcttgccattttgggagcagctctttaaacagcttccagtcgctttcagttacctcgcccatattgcctccgttcaccaaacagacttagccattcgatttttattctatttggtattttcgctcacagccgtggatgaggggaccatcggtcttcgagttcgagcttgaatgaatcgtttgctacaaaatgcgcctaattactacgatgattcgaatgccttcgaccatgccgaaaagggtgaaagtaaaaccgcaggtagaaagcttgccgattttttaaaaagatgggtgtggtcgacctcatcgagttcatcgtagtaaatcggcctttttcttggcatgcggtgagttaaatgccagctcccgtgctggaattgcccgccccattcgtgagttgcggtgaaatcgggactgttagacgctccaaggtcctcaacggtccgtatttcaccgcaacttggaaggggcgagcggcgttggccaagcattgctgacgggttggaacggcttaggcttgtttgcggcgcttccattgctttcggcaccagcacatgagtgcctctatgaagggaatcgtgatgaggatgacccatgcgggatggggctgtgcaaacaaagccacatatagaggaaccaggcaatggcggctgttgcatagacgacgccgatcagcttggagagatgatgtcggtcgataaagtcgcccatcgcctcgtagacgggaatcagaaagaccagaaagagccccataccccacgtgccgcagatgatgccgagcgcgagataggcgaggacgacaagtgcaggaaagggaaactcgttccatgcgcgaccgatcttggtgtggaaatgcttgccatgatggtcgagcttgtcgtgtgcctctttccagctggaaaacgtctcgccgtcgatggtgacggtgccgtcgtcattggtatgtacgctgtgtccatcgtcctctagcgtatcgatatgcaatccgcccggccccacatggacctcttcacccttgcgctcgttagccacgtggatgccgctccaaccaacatgaacctcttcacctttgttggggtcgacgacgtgaatgccgcgtgcaagggaaatgtcgacaagtggcttgccatcaggatccacgtgctcggtagaagactcggtgccttcagtctcgtcgtaattatttgcgtcaacgtcatcgtcggccgaggtgtcgacatcgctagccgcttccccatatagcaactcatccagtgacacgtcatacagcgcggcgagcgcaataaggttatcggtatcgggcgaggattcgctgcgttcccatttgctgacagcttggcggcttacgcccaactgggcagcaagagcctcctgggaaagaccggcagctttgcggcgatcgacgagacgctgtgccgtcgcaagatccatagtggttcctttcatgtggcgaccgtaatcgaatgagcgagtatgccagaataaccggtagcgaccaccatttctagttagaatctgccccaaccctaccgcaactacgagtagcaacccctaatgacctgccatttcatgacaaatgtcagtacacataacagccaagagccctctcaatatgttgcggtggaatagttcctgtttcatggctctgctatgccaaacaggaactattccaccgcaacttactatcaggccacgcacccgcagagtagctacgggtgcctagggtaggatgcggcgtgcatttttgggagtattcagcagccgagggtgcctgcatactggattttgggcgaaaggcaggcaccatgggccgcatcctgtaaaaaacgagcggctctagaggcgttgggctcagaatcggggctttcagcgcagttttgcactcccgcccccgcgcccgcggactccgggatgctgaatactccggaatttgcacgccgccccctggggtaccagtgggcaaaaagcaaccgccccgtcaaagtatgcatttggcggggcggtttatacaaaaaggcggttgtggacgcgtcaacggctcgctagaacttgaatcccagaacaggctactcggcactcttgagggcgccgaccatgtcgatcttgttgagggtacgattggtagcgaggttgacgataaacgtaaagccaaaggaaagcaccacgcaagcacgtagctcagcggctcgacttcgacgtcaaagtacagcgacggcatctgcaaaatgtacgtaaaactctcggccagcaagccgcccagcggcacgcccagcgcagcgccgatcgccgtgaggatcaacgtctccttgttgacgtaatggtgcacctcaccgcgacggaagcccaacaccttaatagtcgccagctcgcgttcgcgctcggagatgttggtgttggacagcgtaaacaccaccacaaacgacaggcacgccgccataaaggtcacgagcactacgaccgaattgataatcgtaaagttcgcctcgtagttctcccaatgctcggccgtactcgaaatcgtaagccaaccgtcactcttaagattcttgctaaacgcaatctggtcggccgacgaacccttaagcagcacaaagacgccgttaagacgtgcgcttcgaccgaacgcacgctcataggtgccctgcgtcatgtaaagcgtgttgcccagatagttaagcgaaatgtcgctgactttgaccttggcaacattgagcgacgaatcctggacgtgagccgtatcgcccggctgaatccccagcaccagctgtgaactcttgctcagatacacgtctccgtcacgcaaaggcagcggttcattggactcatcctccagacgcacgtaatcgcccaagtcacccgtgcggtcatcgggcaccacgatcagctgcacggtctcgctcttgccgccaaacgtaaaggtgacgttgtcggtcataatcggcagggtcgaggtcacggtcacgttgaaatcattggccgcgctgcgctcatccaatgccgcgcacgtctgcgaaaaatcgtcgggattggcgaccgccagcaggtcgtagcgcgtgatatgccgtactgtttgggcgaaagcgccaccgacgtgtcgcgaatgcccataccgcagatcacgagcgccgtgcagccggcgataccgaagatggtcataaaagcgcgctttttgtagcggaacaggttacgtgctgccaccttgttcaaaaagcccatgcggcgccagataaagccgatgcgctcaagcaagatgcgagagccggcgcgtggggccttgggacgcatgagcgaggccggggtctcggccatctcgtggcggcaggcgataatcgtagcgcccaccacgcccacggcaaacagcgccaccgagacgattgaggacacgatgtcgtacgagagcagcatctggggcagcgagtacatgtcatcgaacaccgtaaacaggaacagcggcaggcccacaaatccgatgatgttgccgagcacgccgccgatcagacatgcccacagcgcatagtccacgtatttggacaggatgcgctcgcgtgaatagccaagcgccttgtacaggccaataagcgtgcgctcctcctcgaccatgcgcgtggcggtggtaagactgatgagcacagcgacgacaaagaagataaatgggaacaccgtggcgatggctcgatcgaagaactgtcgctctcgacgctcgagtagcttgcgatgttaccgcggtcctgaatgtaccaggtgcattcgcccagatcggaaagctcggcgcgggcatcggcaaaatgctggtcggcggcggcgcggcgctggtccaactcggcctgagcctggacgcgctcctcgctgccctcggccatacggttgatgttatcctgctcgatcccaaagagcatggcggcctgacgctcggccgtatccagcttgtcggcgtgtcaaccgtcaactcctggacgcgcgccttctcacgctcctcgcggatcttctcgatattgcctttgacctcgttgatctttgtcgtgtaggcatctgaataggagttaagactcttggctccctcgacgatcacgtggactgcggagtaggaagaagatgtcgcggcatcctcgctcacatagaacttatagtccgcagccgaagcagcgcgaaaggcgttgactgtcgagtcggagctcacgtcggtaggatcgaggacctcggccgtaatggtgtaatcgcccgcggcaaactgatccttggcactttggttggacgagctcgcgtcattggcggcaaaactcaccgtatcgccgagcttttgcccgaagccttcaggaacttcgaagtcaccgcgacctcatcggcgctctcgggcaaatcgccgttcacgagcactggctgatcgatgttctccttggagagactttgcacgaccacgcgctcgcgcgttgtgcccacggcggtgtaggcggtctcggtgtagatgccctcgaccgtctcgacgccgtcgacctcttggatagccgcgagatcgtcgcgcgtaaggccataggtcgactgcacgttaatgtcatagacattctgctggtcaaaataggcgtcgaccgaatcgcacaaatcctcgcagcccgccttaaggccgcacatcacgctcacgccaagcgcagtgatgaccacgatagataggaagcgcttaagactgccccgaatcgtgcggtagatgccacggcgaaaaaccgtcggcaccatatcgtttgagctttgagcggtacggtaggtcgcgaactcccggtcgcggcccgcgtgctccgtatcgtggttttggctgtcttggcaatcttggtccatgggcgctaccactcgatcgtctcgataggcacgggattttgctggaccgtctcgctctccacgcggccgctcttaaagcggatcaggcgatcggccatgggcgccagcgcggagttgtgggtgatgataatgaccgtgatgtcctgcttgcggcaagtgtcctgcagcaactgcaagatctgcttgccggttttgtagtcaagtgcacccgtgggctcgtcgcataaaagcagcttggggttcttggccagtgcgcgggcgatggacacgcgctgctgctcgccgcccgaaagctgcgcggggaagttggcgaggcgctcgcccagtccaacctggcaaagcgtttgctcggcatcgagcgaatcaggcagatctgtgccgcgagttcgacgttctcaagcgccgtcaggttgggaaccagattgtagaactgaaagacaaagccgacgtcgcgcgacggtattccacgagctgcgcctcgttggcggcgctcacgtcgcgcccgtccaccgtcacggtgccggaggtcgccgtatccatgccgcccagaatgttgagcgccgtggtcttgccggcacccgaagcacccagaatgatggcgagctcgccgcgctcgaccgtaaagctcgcgccgtcgagcgcgtgaatgcgggcatcgccctcgccgtatgctttgatgacgtctttgaattcgatataggccatcgattaattcccatctggtcggataactctttagtattacccatttcgcgccgaccaaaaagggacaggtttattttggcaggttttatatggggaaacggcagctatagatgaagcgccggggaggcagagaaatcatcgacggggtcaggccgaccgccaaacacaacgcacgtatctctatctgtcaaccaaatcattcgaacagctgttcgtttctatgatatgattccgctatttaagcaggccaatacgcagaaaggcggccaacatggcgttcgactttaagaaggaatgcaaggagctctacaaacctgcaagcaagccgagcatcgcaactgtcccgccattcaatctcagggcgggattcagtcgggattcaatttcaacaaacggcatcatccggtaaccgatatgtaaggctgtataaatcatttccatttgcctaacaaaatgaccgctcggctaacaagctcggcccatgtccccacgcgatggtactgttctctagagttcttattagagaggggtgctccatggagatcaccatcaatcgcgaaattgggaagctcggacttcccaggcatcttgtgcttggcatggatccaggaattgcaagctgcggattcgcacttatcgacacagccaatcatgaaatcctggatttgggcgtcagattatttgactctccaactcatcctaaaacgggccaaagtcttgcggttattcgcagggcttccgctctacccgtcgaaacattgaccgtacccaggcgcgcttgaagcactgtctccaagtcctcaaggcttatggctcatcccccaagacgccaccaaagagtacttccacaccacaaaaggcgacaagcagccgctcaagcttcgcgttgatggtcttgaccgcctgctcaacgatcgcgagtgggcgctagtcctatactccctctgcaagcgccgtggatacatcccccacggagaaggcagtcaggataaatcaagcgaaggcggcaaggttctatccgcccttgcggccaacaaggaagcaattgcggagacctcgtgccgtaccgttggcgaatggctcgctcagcagcctcaaagtcgcaatcgtggcggcaattacgacaagtgtgtaacgcacgcccagcttatcgaagaaactcatatcctatttgatgctcaacgctcctttggctccaaatacgcttcgccggaatttgaggccgcatatatcgaggtttgcgattgggagcgttcgcgcaaagacttcgaccgccgcatgtacgacctcgttggccactgctcatacttcccaacagaaaaacgagccgcacgctgcacgcttacgagcgaactcgtttcagcctatggcgcactcggcaacatcaccatcatccacgaaaacgggacctctcgcgccctgagcgctacggaacgcgatgagtgcattgcgatcctgttctcgtgcgagccaattcgaggcaacaaagattgtgctgttaaattcggcgccctccgaaaagcgctcgaccttagttccggcgattactttaagggagctccagctgccgacgaaaaaacgcgcgaggtgtacaagcccaagggatggcgcgtgctccgcaataccctcaatgcggccaaccccattctcctgcagcgtttgcgcgatgaccgcaatctcgccgatgccgttatggaggcggtggcatactcttcagctctccccgtactccaagagcagcttcaggggctaccgctttcggaagcggagatcgaggcgctctgtaggcttccctattcatccaaagctcttaacggctatggcaaccgttccaaaaaagcactcgacatgctgctcgattgcctcgaggagcccgaggtcctcaaccttacgcaggccgaaaatgactgcggcctgctgggacttcgcatcgctggcgcccagctcgagcgctccgatcgcctgatgccctatgagacctggatcgaacgtaccggtcggacaaataacaatcccgtcgtcattcgcgccatgtcgcaaatgcgaaaagtggtcaacgccgtctgccgcaagtggggcgtgccaaacgaaatccacgttgagcttgatcgagagctcaggttgcctcagcgcgcaaaagacgagattgccaaggccaataagaagaatgagaaaaatcgcgagcgcattgccgggcaaatcgctgaactgcgtggctgcacggcagatgaggtcacgggcaaacagatagagaagtaccgcctgtgggaagagcaggaatgcttcgatctttacacgggcgctaaaatcgaagtcgatcgcctaattagcgatgacacctacacgcagatcgaccacatcctgccgttctctcgcacgggagaaaactctcgcaacaacaaagtcctagtcctcgccaaaagcaatcaggacaaacgcgaacagacgccttacgaatggatgtcccacgacgcgcgccttcatgggatgcttttgagcgtcgcgttcaggaaaaccagaaactcagccgtcgcaaaaagaacttccttctggaaaaagaccttgataccaaggaaggcgaattcttagcacgcagcttcaccgacaccgctatatgtcgcgagaagtatgcgcttacctcgccgactgcctgctgttccccgatgatggcgcaaaggcacatgttgttcctaccactggcagagcgaccgcatggctgcgtcgcaggtgggggcttaactttggttcgaatggcgaaaaagaccgctcggacgatcgtcaccatgccaccgatgcttgtgtgattgcagcatgtagtcgaagcctcgtgattaaaaccgctcgaatcaatcaagagacacactggagcataaccagaggtatgaacgagacccaacgccgcgatgccatcatgaaggctctcgaaagtgttatgccctgggaaacctttgcgaacgaagtacgcgcggcgcacgatttcgtcgtacccacccgctttgttccgcgtaagggaaagggcgagttgttcgagcagacggtctatcgctatgccggcgttaatgcacagggcaaagacatcgctcgcaaggcgagctccgataaggacatcgtcatgggcaacgccgttgtgtcggcagacgagaagtcggtcatcaaggtgagcgaaatgctgtgcctgaggctctggcatgacccggaggccaagaaggggcagggcgcttggtacgcagaccccgtctataaggcggatattcctgcacttaaggatgggacgtatgttcccagaattgcgaaacaaaaatatgggcggaaggtctggaaagccgttcccaatagcgctttaactcaaaaaccactcgaaatatatctgggtgacctcattaaagtcggggataagctcggtcgctacaatggctacaacattgcaacggccaattggtcctttgttgacgctctcacgaaaaaggagattgcattcccctcggttggaatgctctcaaacgaattgcaaccgataattattcgcgagagcattctcgataattaaggccaataggggcgatttaacttccgataatcgccccttccctatatgcgtttacctatttccaatttccacattacagcaatgcttatgacagggtcttctaactgtagcgaatcgccttgcacatacatccttccgaagccaatagacttagcttggacaaatgtccctgattgtctggccttgagcacgcgcccttccccaaggtgatacgctgaacatgacgctccgcccgacgagacgagaagtctgagcacgcgcccttcccaa

SEQ ID NO: 4380 - DNA, 8911 bp, synthetic construct
  misc_feature 1..8911: note = Synthetic
  source 1..8911: mol_type = other DNA
gctgcgcactacgtgcggcggaggttctttcgtcctgtggaatgcgccgggagataggccggtccgcctcggtcgagtgctctgcattccttgccaggaggttactgggctgtaggggagatggtgcgcgttctattggccgcgccttttatttggctgttagggctttgccgtagttgcagccgaagaggggacgtgcacgttttttcggttgccgctcgcctggggtggggcggggcgtgcatttttgggagttttcagcagccgaggatgcctgcatactggattttggacaaaaggcaggcactatgggccgcatcctgtggaaaatgagcggctcttgaggcgctggggactcttaatcagggctttcagcgcagttttgcgcgcccgcgggctccgggatgctgaatactccggaatttgtacaccgcccccaggggtacctgtggacaaatagcaaccgccccgccgaaatatgcattcggcggggcggtttatgcaataaagcgactgtggcacgtcgcagctcgctacaactcgaatccgagaacaggttactcggcgctcttgagggcgccgaccatgtcgatcttgttgagcgttcggttggtgacgaggttgacgataaacgtaaagacaaaggaaagcactacggcgagcacataactcagcggctcgacctcaacgtcaaagtagagcgacggcatctgcagaatgtacgtaaaactctcggccagcaagccgcccagcggcacgcccagcgcagtgccgatcgccgtgagaatcaacgtctccttgttgacgtaatggtgcacctcgccgcgacggaagcccagcaccttgatggtcgccagctcgcgttcgcgctcggagatattcgtgttggacagcgtaaacaccaccacaaacgacaggcacgccgccataaaggtcacaagtaccacgacggaattgatgatagtgaagttcgcctcatagttttcccaatgctcggccgtgctcgagatggtgagccaaccgtcgctcttaagcttcttgctaaacgcaatctggtcagaagatgagcccttaagcagcgtaaagatgccgttaagacgcgcgcttcggtcgaacgcgcgctcataggtgctctgcgtcatatagagcgtgttgcccagatagttaagcgaaatgtcgctgactttgaccctggcaacgttgagcgacgaatcctggacgtgagccgtatcgcccggctgaatccccagcaccagctgtgaacttttgctcagatacacgtctccgtcacgcaaagacagcggttctttggactcatcctccaggcgcacgtaatcgcccaagtcacccgtgcggtcgttgggaatcacgatgagctgcacagtctcgctcttgccgccaaacgtaaaggtgacgttgtcggtcataatcggcagggtcgaggtcaccgtcacgttggaatcattggccgtgctgcgctcatccaatgccgcgcacgtctgcgaaaaatcgtcaggattggcgaccgccagcaagtcatagcgcgtgatatgcccgtactgtttgggcgaaagcgccaccgacgtgtcgcgaatgcccataccgcagatcacaagcgccgtgcagcccgcgatgccaaagatggtcataaaggcgcgctttttgtagcggaacaggttacgcgctgctaccttgttcaaaaagcccatgcggcgccagataaagccaatgcgctcgagcaagatgcgcgagccggcacgcggggccttggggcgcatgagcgaggccggggtctcggccatctcgtggcggcaggcgataatcgtggcacccaccacgcccacggcaaacagcgccaccgacacaatcgacgacacgatgtcgtacgaaagctgcatctgaggcagcgtgtacatgtcatcgaacaccgtaaacaggaacagcggcaggcccacaaagccgatgatattgccgagcacgccgccgatcagacaagcccacagcgcgtagtctacgtatttggacaggatgcgcccgcgcgaataaccgagcgccttatacaggccgatgagcgtacgctcctcctcaaccatacgcgtagcggtggtaaggctgatgagcacggcgacgataaagaagataaacgggaacaccgtggcgatggcctcgatcgaggaactatcgctctcgacgctcgagtagcttgcgatattgccgcggtcctgaatgtaccaggtgcattcgcccaggtcggaaagctcggcgcgggcatcggcaaaatgctggtcggcggcggcgcggcgctggtccaggtcggcttgcgcctgcacacgctcctcgctgccctctgtcatgcggttgatgttatcctgctcgatcccaaagagcatagcggcctgacgctcggccgcatccaagcttgccggcgtgtcgaccgtcagctcccgagcgcgcgccttctcgcgcccctcgcgtatcttctcgatattgcccttgacctcattgatctttgccgcgtaggcatccgaataggagttgaggctcttggctccctcgacgaccacgtggatcgcggaataggacgacgacgtcgcggcatcctcgctcacatagaacttatagtccgcagccgaagcagcgcgaaaggcgttgactgtcgagtcggagctcacatcagtgggatcgaggacctcggccgtaatggtgtaatcgcccgcggcaaactgatccttggcgctttggttcgacgagctcgcgtcattggcggcaaaactcaccgtatcgccgagctttttgcccgaagccttcaggaacttcgaagtcaccgcgacctcatcggcactctcgggcaaatcgccgttcacgagcactggctgatcgatgttctccttggagagactttgcacgaccacgcgctcgcgcgctgtgcccacggcggtgtaggcggtctcggtgtagataccctcggccgtctcgacgccgtcgacctcttggatagccgcaagatcgtcgcgcgtaaggccataggtcgactgcacgttaatgtcatagacattctgctggtcgaagtaggcgtcgaccgaatcgcgcaaatcttcgcagcctgccttaagaccgcacatcacgctcacgccaagcgcggtgatgaccacgatagataagaagcgcttaagactgccgcggattgtgcggtggatgccgcggcgaaaaaccgtcggcaccatatcgtttgaactttgggcggtgcgataggtcgtaaaatcctgctcgtgctccatgttccgcgcgtcgcggcgttggctgttttggcggtcctggtccatgggcgctaccactcgatcgtctcgatcggcacgggattttgctggaccgtctcgctctccacgcgaccactcttaaagcggatcaggcgatcggccatgggcgcgagcgcggagttgtgcgtgatgatgatgaccgtaatgccctgcttgcggcaggtatcctgcagcagctgcaagatctgcttgccggttttatagtcgagcgcgcccgtgggctcgtcgcacaggagcagcttggggttctttgccagtgcgcgggcgatggacacgcgctgctgctcgccgcccgaaagctgtgccggaaagttgcccaggcgctcgcccaggccaacctggcgaagcgtttgctcggcatcgagcgaatcggggcagatttgcgccgcgagctcgacgttttcgagcgctgtcaggttggggaccagattgtagaactgaaagacaaagccgacgtcggcgcggcggtattccacgagctgtgcctcgttggcagagctcacgtcgcgcccgtccactgtcacggagccggaggttaccgtatccatgccgcctaggatgttgagcgccgtagtcttgccggcgcccgaagcgcccaggataatggcgagctcgccgcgctcaacggtaaagctcgcgccgtcgagcgcatggatgcgggcatcgccctcgccatatgctttgatgacgtctttgaattcgatataggccatcgatcggttcccatctggtcggataactctttagtattacccatttcacgccgaccaaaaagggacaggttcattttggcaggttttatatggggaaacgacagccatagatgaggcgccgggaaggcagagaaatcatcgacggggtcaggccgaccgccaaacacaacgcacgcatctctatctgtcagcaaaatcattcgaacaactgttcgtttctatgatatgattccgttatctaagcaggccaatacgcagaaaggcggccaacatggcgttcgactttaagaaggaatgcaaggagctctacaaacctgcaagcaagccgagcatcgtaactgtcccgcctatgagctacgttgccgttcgcggaaagggcgacccaaataccgaaggtggcgagtatcaaaacgccctgccgctgctttacggcatcgcctataccgtcaagatgtcgaagaaaggctcaaggagtatcaagggctatttcgactttgtggtaccgccgctcgagggtttctggtggcaagactccccgagcggcgacatcgattatgtacgcaaggacgatttcaactttatctcgtgcattcgcctgcccgatttcgtcacccgagatgactttgactgggcagtcgcggaagccacgaccaaaaagaaacttaacttttctgccgtcgatctgcttaaagttgacgagggcctctgcgttcaatgcatgcacaccgggccctacgacaacgaaccggcgaccgtaggcgctatgaatgaatacacgaccgagcagggctatgtccccgacttctcagacacccgtttccatcacgaaatctatctctccgatccacgcaaatgtgcaccggagaaacttaagactgtggttcgtcatcctatcaagcgcgctgaatagcgtggggcgccgccccgccattcaatctcagggcgggattcagtcgggattcaatttcaacaaacgacatcatccggcaaccgatatgtaaggctgtataaatcgcttccgtttgcctaacaaaatgaccgctcggctaacaagctcggcccatgtcctcacgcgatggtaccgttctctagagttcttattagagaggggtgcttcatggagatcaccatcaatcgcgaaattgggaagctcgaacttcccaggcatcttgtgcttggcatggatccaggtattgcaagctgcggattcgcacttatcgacacagctaatcatgaaatcctggatttgggcgtcagattatttgactctccaactcatcctaaaacgggccaaagtcttgcggttattcgcaggggcttccgctctacccgtcgaaacattgaccgtacccaggcgcgcttgaagcactgtctccaagtcctcaaggcttatggcctcatcccccaagacgccaccaaagagtacttccacaccacaaaaggcgacaagcaaccgctcaagcttcgtgttgatggtcttgaccgtctgctcaacgatcgcgagtgggcgctaatcctttactccctctgcaaacgccgtggatacatcccccacggagaaggcaatcaggataaatcaagcgaaggtggcaaggttctatctgcccttgcggccaacaaggaagcaattgcagagacctcttgccgcaccgttggcgaatggctcgctcagcagcctcaaagtcgcaatcgtggcggcaattacgacaagtgtgtaacgcacgcccagcttatcgaagaaactcatatcctatttgatgctcaacgctcctttggctccaaatacgcttcgccggaatttgaggccgcatgtatcgaggtttgcgattgggagcgttcgcgcaaagacttcgaccgccgcacgtacgacctcgttggtcactgctcatacttcccagcagaaaaacgagctgcacgctgcacgcttacgagcgaactcgtttcagcctatggcgcactcggcaacatcaccatcatccacgaaaacgggacctctcgcgccctgagcgctacggagcgtgatgagtgcattgcaatcctgttctcgtgcgagccaattcgaggcaacaaagattgtgctgttaaattcggcgccctcagaaaagcgctcgaccttagttccggcgattactttaagggagttccagctgccgacgaaaaaacacgcgaggtgtacaagcccaagggatggcgcgtgctccgcaataccctcaatgcagccaaccccattctcctgcagcgtttacgcgatgaccgtgatctcgccgacgccgttatggaggcggtggcatactcttcagctctccccgtacttcaagagcggcttcaggggttaccactctcggaagcggagatcgaggcgctttgtaggcttccctattcatccgaagctcttaacggctatggcaaccgttccaaaaaagcactcgacatgctgctcgattgcctcgaggagcccgaggtcctcaaccttacgcaggccgaaaatgactgcggcctgctgggacttcgcatcgctggcgcccagctcaagcgctgcaatcgcctgatgccctatgagacctggatcgaacttaccggtcggacaaataacaatcccgtcgtcattcgctccatgtcgcaaatgcgaaaagtggtcaacgccgtctgccgcaagtggggcgtgccaaacgaaatccacgttgagcttgatcgagagctcaggttgcctcagcgcgcaaaagacgagattgccaaggccaataagaagaatgagaaaaatcgtgagcgcattgccaggcaaatcgctgaattgcgtggctgcacggcagatgaggtcacgggcaaacagatagagaagtaccgcctgtgggaagagcaggaatgcttcgacctttacacgggcgctaaaatcgaagtcgatcgcctaattagtgacgacacctacacgcagatcgaccacatcctgccgttctctcgcacgggagaaaactctcgcaacaacaaagtcctagtcctcgccaaaagcaatcaggacaaacgcgaacagacgccttacgaatggatgtcccacgacggcgcgccttcatgggatgcttttgagcgtcgcgttcaggaaaaccagaaactcagtcgtcgcaaaaagaacttcctgctggaaaaagacctggctcttcggtggtttctgtgggagagattccggcataggcccagctcagcgggcgaaaacaacgatctggaactgaaacggccccgggaggggccgtttccgcgtcatccgcctatgattgctaagccaaattcagacaaccgaagaggtgtgacgcatgaagagtctactacttctcgccctcggtctggcccgcacggtcgtcctgggcgcgcgcatcgaggccgagcgcatcgtcgtgagcgtccggccctacaagcgcgagcagcgccgctgccccgtatgcggcagggcctgcgacttctacgacatggcgaaccgcggggcccccaggctgtggagggcgatggacctggcgcgctcggcctgctacctggagtacgcgccctgcagggtgcgctgcccggagcacggcgtgcgcaccgaggccgtcccctgggcgcggcacggggcgcgcttcacgcgcgacttcgaggactgggtggcgtggctggcggtccgctgcaccgcctcggcggtctccgagctcgcccgcgtcgagtggcacagcgtgggcggcgtgtgcaggcgcgtctacgccgagctggaggccgcgcgcggcgcctcgaggttcgacggcgtgcgccgcatcggcatcgacgagacgtcgtacaagaagggccacaagtacgtcacggtggtcgtcgaccacgaccgcggctgcctcatctgggcgcacgagggcaccggcaaggacgtgctcaacctgttcctcgacgagctcacgcgcgagcagaggcgcgccatagaggtggtgaccgccgacggcgcgaggtggataaggcagctggtcaagcgccgctgccccaacgcgaggtgggtcatggaccccttccacgtggtccagtggatgaacgacgcgctcgacgccgtgcgctgcgaggagtggaacgccgccagggccgccaggcccaggcccgagggcaagcgcggcaggcctgccaaaggcgagctggattggcaacacctatttggacgattccgggagggacagccccgcctccctgaactcgaccggagacatgtagcccagcgtcgagtggatcctgaagttgttgtaccagtgcacgtagtccgagagcttggcccggagctcgcgcgtcgtgccgaacgtctcgcggtggacgagctcggccttcagtatcctgttggtcgactcgtcgacggcgttgtcgtaggggcagcccttggccgacagcgacctctcaatgccgaaggcctcgagcatcaggtcgatctcggcgttgtcgaactcgctgccgcggtccgtgtggaagacctcgatgtccgagatggggaaggagagcgtcgcgaacgccgacttgaccagccgggcgtccttcctgggcccggcggagtggccgacgatctccctgttgtagaggtcgacgagcaggcagacgtagttccacgaggccccgacgcgcacgtaggtcaggtcgctgcatatatgggtgcgcggcgccctgccgccgaagccgcgcgcgacgacgttgggcacgtcggcctcgttgaccgccccggggtgcaccttgaacctcttcctgccgtatgcgctgaccaggccgttctccctcatgatgcggcagacccggcgccggctgacggtgacgcccgacctctcgagcgacgcctttatcttgcgcgagccgtaccggcccttgctggcggcgtgggccgcgaccacggccggc

SEQ ID NO: 4381 - DNA, 7184 bp, synthetic construct
  misc_feature 1..7184: note = Synthetic
  source 1..7184: mol_type = other DNA
gccattctctcggccacacgcacaacaaaataggtcggggcggacacccaaaggaacccgccccgaccttggcgcaatggaaagaggagtatcgaattgctagcaggcgcgcttgcgctcctgagcgaacagcacgatgcctatgagtgccggaatgcacacggaaaatgccagcaccgcggcgtcgccaaaatggaacacagggatgccaataaacaggcccgcgcagtacgggatgagccagatgagccacacgcagatgctcagcttgtggaagccccgacgactctgctcactgccgcgcacggtgacaaacgttgcccacagggcatggaagagcatgaggatgatagccagcaggccggtgatggcgtgcagcggggagacagccgcagtcgaggtgcgggcgatggtggtcatgatggcggtgcccgttgtgtcgcagatcaggcccaaccagaacaacgcaaggtggctcttcttaagcgtaccggcgcggcgctcgccaaaaacgccgatggtatagaacacaagagcgagcgtaatcgccgtcgatgcgggcataatcagcgaattcataggtatgtgattcctccaaagtcgatatcgcgccggatgcgctagttgcccccggcttcgaatcatattgtggaatcgccgcacctgaacatcaaaggtgccttgttcatgtctcacgcgatatagagcgtccttcgaagaaggccaaaaaggatggggcagctgctctcccccgcatgcagcgcgttgagcatgttatcaaaggtaaagcggcatactcgcttggcgtcaaagcccacaggtaggtctgtgcgaatggcggcgtcgtttttgtaaacctctaccagaccgcgcagggcatgggccaaaatctgctgttcacgcagatgggcggcatttttctcggccgcggggagcacctcggcgcctttgagccagcaacgtctaaagcggtcgagcaccatgacgagcgatgcgtaaaggtcctcgcaatagtcgacaaaacccttctgcacgtcgaggcggcaaaagccgtcaaagacggaacggcggaagaacagctcgatagttgctgtggtgagtttgtccttagaagcaaagtggttgtagatggtgcccacgctcacatggcacgcctgcgccagcgagcggatggaaagcgccgagaggccctgcgcatcggcgatgcgatatgcctcttctaagagttcatcacgagaaataacgctcgaagccatccggtctcccctgttgcgcctgcacgttctagattgctcgtatcaaagatggtaaaacaaacggagcgtgccgtggcaacgcatcaatacctgcgatgtgtgacgagccgtctactcgaaccaggcgatggcgcggatgggagagccatcggagtcctcgatcttcaaggggcagcagctaaaccaaaagagatcatcgccgcagcaatccagatttttaaggttctcgatattcacgatgtcgcaggaagagaagagcttcttgtggcgcgttaggttctcgtcggcaatgggatccaagccgatgacgtcaaagccaatgcctttgtagccacctgcgataataaagtcgagcacttcttcgtccacgcaggggcagtcgccaaagtaggcgtccgtgccccagtattcgtcccagcccagattgaagaggagaaagtctgcctgggcgactttgtcaccgtaagggcgcagctgctccatggcgatggcaccaccttctggcaggtcacagcaatcgataacaagggctttgccgataaactggcttgcggggaattcgtcgagcgttgtcctgtcagagaacagatgcgagggcgaatccatgtgcgtgccggtatgggaggacatctgcagtagcgtctctttgaagccgtccttctcgtacgtgccggcaagtgcaagccgaggcgtgtccgtccccggatagaccggcatgtcctgggtgatggtatgggtaaggtcgataacgcgcatgatggatcctttcgagcttgtcccatcgtatcaaagcggcgcgatgggaccgagaggttttgcccagttataggccaacttgccccgcgcaacaaacggttgcttggattggctgcctgcgccgcttaagcttgcactatcaagaaactcgctggaaggggagccgctatggcctttgccgagaaccttatttccgtacgtcgagcgcatggccttacgcaagagcagcttgcaagcaagctctttgtgacacgtcaggccgtgagccgctgggaacgcggggaagttgcgcccggaatcgacatgatgaagctcatcgccgccgtcaccggcgagccgctgtcgcaccttttggagatgcccgagcattattgcgagagctgcggcatgcacctcacccccgatgattacggcaccgatgcgagcggcaagaagaccgaacattactgtaaatggtgctacgaacagggcgaatacacgtacgagaccacgatggaggccatgattgaagattgcgccccgcgcttggcagagaatacgggcatgacgctcgacgaggcagtgtcgcttatgggtgcggtgttgccgcagctggagcggtggcgcgcggtgcgcgagaacgaggagcgttatggcgaagaagcccgcgagctctacggaaacgagacgattgatgctgccaatgagcgcctgttggatatggacccggcagtatggaatgacatgaaggaacttgagcgagcgattctgggccagttctcgattgctatggcagagggcgacccacgcggccccgaggcgaaaaagctggtagaaatgcatcgccactgggtgggcctccactggggaagtgagcccgaagacgaggcttacctggggcttgttaagggataccttgtcgacccgcggtttgtgtcctattacgatgacccctgcggagccggcgccaccgcgtttctggttgaggctgtagagggcgagatgtagggcgaggtcggagacaatagggccatcgagagcatttttcaacccaggccctagcagccggctatacaattcgcagcacttttcgacagttcaactgggcgaaacaatagcccctggctaattgcctccgttcgcccatcaaaaatgccactcgtattgcccccgacggtattgtccgcacgcaatggtacctttcttatagctttctttagaaaggggtgcactatgacaagcaccgtcaaccgcgagattggaaagctcggacttcccaggcatcttgtgctaggtatggaccctggcatcgcaagctgcggattcgcacttatcgacatcaataatcacgagattcttgaaatcggcgtccgccttttcgactcgccaacccatccaaaaacgggccaaagcctagcggtcatcaggaggggattccgctccactcgccgcaatatcgatcgcactcaggcgcgcttaaaacactgtcttgaagttcttgagaagtatgacgttatcccccaagacgccacaaaagagttttttcacactaccaaaggcgacaagcaaccactcaaattgcgcgtcgagggtctcgaccgcttgttgaccaatcgcgaatgggcccttgtgctctattcgctttgcaaacgccgcggttatatcccccacggcgaggggagccaggacaaatcaagcgagggaggaaaggtcctctccgccctcgccgcaaacaaagaagccttcgccgagacctcctgccgcacggtaggagaatggctcgcccaacaaccgcagagccgaaaccgcggtggtaactacgacaagtgcgtaacccacgcccagcttatcgaagaaacgcgcgttcttttcgaagcccagcgcaactttggctcgcagtacgcctcggcagagctggaggaagcatacgttcaggtatgcgactgggaacgttcgcgcaaagacttcgatcgccgtagctatgaccttgttggctactgcacatacttcccaacggaaaagcgtgccgcccgttgcacgctcaccagcgagctcgtcgcagcctatggtgcccttggcaatatcacgattgtccacgaagacggaacgacgcgcaccctaactgccgcagaacgcgacaaatgtatcgccatcttattctcatatgaaccaattcgcggcaataaggattgcgccgtcaagtttggggctctccgaagagagctcgatctgaactccggtgattactttaaaggcgtccccgctgcagatgaaaagacccgcgaggtttataaacccaagagttggcgcgcactgcgcaatacgctcaacacgacaagccccttcctcctccgtcgcctgtatgacgaccgagatcttgccgactctgtcatggaggccgttgcctattcttccgcccttcccgtacttgaagaacagctccaggcactgccgctctctccagccgaaatcgacgctctctgcaagctgccttattcctccaaagcccttaatggctatggcaatcgctccaaaaaggcgctcgatatgctccttgattgcctcgaggattccgaagtccttggcctaactcaagccgaagatgactgcggcttgctgggcctgcgcatccaaggttctcaactggagcgctccgaacgccttatgccctatgaaatgtgggttgagctcacgggacgcaccaacaataatcctgttgtcatccgctctatgtctcaaatgcgcaaagtagttaacgccatctgccgcaaatggggcgtacccaacgagattcatatcgagctcgaccgcgaactccgacttccccagcgcgccaaagacgatattgccaaggcgcataagaaaaacgagaaaaaccgcgaacgcatagcggggcaaattgccgagctgcgcggatgcaaccccgaagatgtctcgggcaggctgattgaaaagtatcgcctctgggaagagcaggagtgctttgatctctacacaggcgccaagattgaagtggatcgcctgataagcgacgaaacctatacgcagatcgaccacatcctgccgttctcgcgcacaggagagaactctcccagcaacaaggtactcgttctcgcaaagagtaaccaggacaagcgcgagcagacccccttcgaatggatgtcaaaagaaggcgcgccttcatgggacgctttcaagcgccgtgtagaagaaaaccagaagctcggtcgccgtaaaaagaacttcctcctagaagaggacctcgaagccaaagagggggaattcctaacccgcagctttaccgacaccgcctatatgtcacgcgaagtctgtgcctatctggcagactgcctattgttccccgaagacggaaccaaatcgcacgttgtcccaacaaccggcagagccacagcatggcttcgtcgcagatggggactcaactttggcacaaatggcgagaaagatcgttccgatgaccgtcatcacgccactgatgcctgcgtcatcgccgcctgcagtagaagtttggtaatcaagaccgcaaagatcagcgagcagacgcactggactgtcaccaagaatctggacaaagatgagcgcgatcacctgcgcatgaaggcactcgaaaacgtaatgccctgggaaacgtttgcaaacgaggtgcgcgcaagccacgattttgttatccccacacgctttgttccacgtaagggaaaaggagagctgttcgagcagacaacttatcgctatgccggcgttaacgataagggcaaagaccttgctcgcaaggcgaactccgatcagaacatcgtcatgggcaacgccgttgtctccgatgacggcaagtcagtcattaaagtaagcgaaatgctgtgcctgaggctctggcatgaccccgaggcaaagaaaggacaaggctgctggtacgccgaccctgtctacaaggcggatatccccgcgcttaaagacggaacctatgtgcccaaaatcgcaaaagcgcacaccggacgcaaggcatggaagccagtaccagaatctgctatgaaacacgctccgctggagatttacctcggcgaccttgtaaagattggcgatttcattggtcggtttagcggctataacattgacaatgccaattggtcattcaccgacagacttacgcgccagaaactgagctgcccgactgttggaaaactcaacaacgctcttattccggtaattatacgcgaatcgtcaattcgctaatgacaccagggccctacttgcttgatcttagaagcaaagtagggcccgtgcatctcctctcgttcttgctttaaaaggcctcgcatacgatggtgctggtgagttactgaaatctttcccgcatgcggctttccaaagatgaagctctccccaaaatgataaccccctcaacaaaggacgcggggtgcgctcgtcgtcttgagttcacgcccatccccaaggtgatacgcttaataaatagcgagaaagcttgatggtgcaagtcttgagcgcgagcccttccccgaggtgatacgctgttcctcgcgatctcgcccgactcgagcctgtcttgagcgcgcgcccttccccaaggtgatacgctgcacttgacgttgagattgcaagcacgatagtcttgagcacgcgcccttccccaaggtgatacgctaccagccgtgtcgaagtagctctcacgcacgtcttgagcacgcgcccttccccaaggtgatacgctacgtgaaccgttggttgcagtggcggcggcgtcttgagcacgcgcccttccccaaggtgatacgctccttgtacacgtacaggcccatgagccagcgtcttgagcacgcgcccttccccaaggtgatacgcttaccattgtcggttacgcacgacgcactgcgtcttgagcacgcgcccttccccaaggtgatacgctctaaagctttcattgctgtattgatgggatcgtcttgagcacgcgcccttccccaaggtgatacgctgtactaccgatatatcaacaccgacaaagagtcttgagcacgcgcccttccccaaggtgatacgctagaggtctaaggcgaaacgtcgtaagaagagtcttgagcacgcgcccttccccaaggtgatacgcttcatgagcgtgtcaaggttacaatgctgatgtcttgagcacgcgcccttccccaa

SEQ ID NO: 4382 - DNA, 5637 bp, synthetic construct
  misc_feature 1..5637: note = Synthetic
  source 1..5637: mol_type = other DNA
gagctgcgcctcgttagcggagctcacatcgcgcccgtccaccgtcacggtaccggaagtcgccgtatccatgccgcccagaatgttgagcgccgtggtcttgccggcacccgaagcacccaaaatgatggcgagctcgccgcgctcgaccgtaaagctcgcgccgtcgagcgcatggatgcgggcatcgccctcgccatatgctttgatgacgtctttgaattcgatataggccatcgatcggttcccatctggtcggataactctttagtattacccatttcacgccgaccaaaaagggacaggttcattttggcaggttttatatggagaaacggcagctatagatgaggcgccggggaggcagagaaatcatcgattgggtcaggccgaccgccaaacacaacgcacgcatctctatctgtcagcaaaatcattcgaacagctgttcgtttctatgatatgattccgttatctaagcaggccaatacgcagaaaggcggccaacatggcgttcgactttaagaaggaatgcaaggagctctacaaacctgcaagcaagccgagcatcgtaactgtcccgcctatgagctacgttgccgttcgcggaaagggcgacccaaataccgaaggtggcgagtatcaaaacgccctgccgctgctttacggcatcgcctataccgtcaagatgtcgaagaaaggctcaaggagtatcaagggctatttcgactttgtggtaccgccgctcgagggcttctggtggcaagactccccgagcggcgacatcgattatgtacgcaaggacgatttcaactttatctcgtgcatccgcctgcccgatttcgtcactcaggatgactttgactgggcggtcgcggaagccacggccaaaaagaaactggacttttctgccgtcgagctgcttaaagttgacgagggtctctgcgttcaatgcatgcacaccgggccctacgacaacgaaccggcgaccgtaggcgctatgaatgaatacacgaccgagcagggctatgtccccgacttctcagacacccgtttacatcacgaaatctatctctccgatccacgcaaatgtgcaccggagaaacttaagactgtggttcgtcatcctatcaagcgcgctgaatagcgtggggcgccgccccgccattcaatctcagggcgggattcagtcgggattcaatttcaacaaacgacatcatccggcaaccgatatgtaaggctgtataaatcgcttccgtttgcctaacaaaatgaccgctcggctaacaagctcggcccatgtcctcacgcgatggtaccgttctctagagttcttattagagaggggtgcttcatggagatcaccatcaatcgcgaaattgggaagctcgaacttcccaggcatcttgtgcttggcatggatccaggtattgcaagctgcggattcgcacttatcgacacagctaatcatgaaatcctggatttgggcgtcagattatttgactctccaactcatcctaaaacgggccaaagtcttgcggttattcgcaggggcttccgctctacccgtcgaaacattgaccgtacccaggcgcgcttgaagcactgtctccaagtcctcaaggcttatggcctcatcccccaagacgccaccaaagagtacttccacaccacaaaaggcgacaagcaaccgctcaagcttcgtgttgatggtcttgaccgtctgctcaacgatcgcgagtgggcgctaatcctttactccctctgcaaacgccgtggatacatcccccacggagaaggcaatcaggataaatcaagcgaaggtggcaaggttctatctgcccttgcggccaacaaggaagcaattgcagagacctcttgccgcaccgttggcgaatggctcgctcagcagcctcaaagtcgcaatcgtggcggcaattacgacaagtgtgtaacgcacgcccagcttatcgaagaaactcatatcctatttgatgctcaacgctcctttggctccaaatacgcttcgccggaatttgaggccgcatgtatcgaggtttgcgattgggagcgttcgcgcaaagacttcgaccgccgcacgtacgacctcgttggtcactgctcatacttcccagcagaaaaacgagctgcacgctgcacgcttacgagcgaactcgtttcagcctatggcgcactcggcaacatcaccatcatccacgaaaacgggacctctcgcgccctgagcgctacggagcgtgatgagtgcattgcaatcctgttctcgtgcgagccaattcgaggcaacaaagattgtgctgttaaattcggcgccctcagaaaagcgctcgaccttagttccggcgattactttaagggagttccagctgccgacgaaaaaacacgcgaggtgtacaagcccaagggatggcgcgtgctccgcaataccctcaatgcagccaaccccattctcctgcagcgtttacgcgatgaccgtgatctcgccgacgccgttatggaggcggtggcatactcttcagctctccccgtacttcaagagcggcttcaggggttaccactctcggaagcggagatcgaggcgctttgtaggcttccctattcatccgaagctcttaacggctatggcaaccgttccaaaaaagcactcgacatgctgctcgattgcctcgaggagcccgaggtcctcaaccttacgcaggccgaaaatgactgcggcctgctgggacttcgcatcgctggcgcccagctcaagcgctgcaatcgcctgatgccctatgagacctggatcgaacttaccggtcggacaaataacaatcccgtcgtcattcgctccatgtcgcaaatgcgaaaagtggtcaacgccgtctgccgcaagtggggcgtgccaaacgaaatccacgttgagcttgatcgagagctcaggttgcctcagcgcgcaaaagacgagattgccaaggccaataagaagaatgagaaaaatcgtgagcgcattgccaggcaaatcgctgaattgcgtggctgcacggcagatgaggtcacgggcaaacagatagagaagtaccgcctgtgggaagagcaggaatgcttcgacctttacacgggcgctaaaatcgaagtcgatcgcctaattagtgacgacacctacacgcagatcgaccacatcctgccgttctctcgcacgggagaaaactctcgcaacaacaaagtcctagtcctcgccaaaagcaatcaggacaaacgcgaacagacgccttacgaatggatgtcccacgacggcgcgccttcatgggatgcttttgagcgtcgcgttcaggaaaaccagaaactcagtcgtcgcaaaaagaacttcctgctggaaaaagacctggctcttcggtggtttctgtgggagagattccggcataggcccagctcagcgggcgaaaacaacgatctggaactgaaacggccccgggaggggccgtttccgcgtcatccgcctatgattgctaagccaaattcagacaaccgaagaggtgtgacgcatgaagagtctactacttctcgccctcggtctggcccgcacggtcgtcctgggcgcgcgcatcgaggccgagcgcatcgtcgtgagcgtccggccctacaagcgcgagcagcgccgctgccccgtatgtcttccagatcccgtcggacgcttcggacaatctctggacttaatccaaatttctccagcttttccttatagcccggcacgtccggatcgatctttccggtcacacagcggcttccaaaggtccccccgagaacactggattcttccatattgaacccccagatttccagggaatgacggagcctgcgcccctcctcccttaaccgcgcggctgcctctattgccccggccacacccagcatcccgtcgtatagtcctcccctgatgactgtatcaagatgggaaccaattacaatggaacctgcctggggatcgcttcccggcagaacgccgtggagattccccaccgggtccgtttccacgtccattccaagttcctccatcttccctttaaaaaactccagggcctggaagtattccctggagaatcccacccgggtaatggagccatctccattcctcccaatactgcccgcctggtgaagcaattcgttcaatctgctcatgttcccttttcctccatggttgccataatctgtttccaatatatcctcgcccagtctgtttgtcaatgacaatccgtctacctgacactggctatccctccttcaggccctaaaatcatccattcttctatgtttccatggcgtatttccgcttccgtatgctatactggaactgtgaatcagtaaagaaaggcagattacatttatgaacattcagatttttgggacgaaaaaagattttgaaacgaaaaaggcagaacgctattttaaagaacgcgggatccggtaccagttcatcgacatgaaggaaaaggggttgagcaagggcgaatttctatctgttctccaggccgtcggcggatatgaaaagctgatcgacccaaaatgcaaagacagagacctcctggctctgatcacctatcttgccgaagaggaccggacagacaaaatatttgaaaaccagcggatcataaaaacacccattgtacgcaatcagagacaggcgacggttggatgccagccggaagtatggaagacctggaaataatggaggtacaccatgaagaacaaccagaccggtgagctgccggaagtccggtgggaccgtctccttcgcattaagactgctggaagagatgattccagcgccgatcagtaccggtatccctatgagcccacgccctattccgttctggaacgcctggctggatccggctggatccggaaggggaatattctgctggactatggctgcggcaagggacgggtcgggctttttctgtcctgccagacccgctgccgctccattggcgtcgaatatgatccgcgcatttatgaaaaagctctggagaaccaaagttcctgtgtatcctctggaagatcctcctttgtcctggccaatgccgaacattatgccgttccctcctccgtcgaccgggtttactttttcaacccattttctctggagcttctccaaaaggtcatggcccggatcctaaactcatattatgagcatccgcggtctatactgctgtttttttattatccttcagacagctatctctcatatctgacctctgttccagagatggcgtttttcgacgaaattccatgcggtgacctgtttccaggaaatgatccccgggagaccatcatgatctttgagcttccgtatccgatgtaggatacggactcaatgtgtgtttgtgcttagacactcccgtggggaccttgcatgatccagatatttatcaagcaattctgagatgaaaaaaagcacgagacgggagggtctgccccagcgcagcccacaacagtgggcgcagcaagggcattcggacctgggcgtcagccctgtgggggcggagactgtctcgtgctttcagactcttttttatctttttctgcaaataaaaaaagcacgagacgggattcgaacccgcgaccctcgccttggcaagg

SEQ ID NO: 4383 - DNA, 3965 bp, synthetic construct
  misc_feature 1..3965: note = Synthetic
  source 1..3965: mol_type = other DNA
ctcgcgccgtcgagcgcgtggatgcgggcatcgccctcgccgtatgccttgatgacgtctttgaattcgatataggccatcgattaattcccatctggtcggataactctttagtattacccatttcgcaccgaccaaaaagggacaggtttattttgacagggtttatatgggaaaacggcagccatagatgaggctacggggaggcagagaaatcatcgacgggatcaggccgaccgccaaacacaacgcacgcatctctatctgtcagccaaatcattcgagcagctgttcgtttctataatatgattccgctatctaagcaggccgatacgcagaaaggcggccaacatggcgttcgactttaagaaggaatgcaaggagctctacaaacctgcaagcaagccgagcatcgtaactgtcccgccattcaatctcagcgcgggattcagtcgggattcaatttcaacaaacagcatcatccggtaaccgatatgtaaggctgtataaatcatttccatttgcctaacaaaatgaccgctcggctaacaagctcggcccatgtcctcacgcgatggtactgttctctagagttcttattagagaggggtgctccatggagatcaccatcaatcgcgaaattgggaagctcggacttcccaggcatcttgtgcttggcatggatccaggaattgcaagctgcggattcgcacttatcgacacggccaatcatgaaatcctggatttgggcgtcagattatttgactctccaactcatcctaaaacgggccaaagtcttgcggttattcgcaggggcttccgctctacccgtcgaaacattgaccgtacccaggcgcgcttgaagcactgtctccaaatcctcaaggcttatggcctcatcccccaagacgccaccaaagagtacttccacaccacaaaaggcgacaagcagccgctcaagcttcgcgttgatgggcttgaccgcctgctcaacgatcgcgagtgggcgctagtcctatattccctctgcaagcgccgtggatacatcccccacggagaaggcaatcaggataaatcaagcgaaggcggcaaggttctatccgcccttgcggccaacaaggaagcaattgcggagacctcgtgccgcaccgttggcgaatggctcgctcagcagcctcaaagtcgcaatcgtggcggcaattacgacaagtgtgtaacgcacgcccagcttatcgaagaaactcatatcctatttgatgctcaacgctcctttggctccaaatacgcttcgccggaatttgagaccgcatatatcgaggtttgcgattgggagcgttcgcgcaaagacttcgaccgccgcacgtacgacctcgttggccactgctcatacttcccaacagaaaaacgagctgcacgctgcacgcttacgagcgaactcgtttcagcctatggcgcactcggcaacatcaccatcatccacgaaaacgggacctctcgcgccctgagcgcaacggagcgcgatgagtgcattgcaatcctgttctcgtgcgagccaattcgaggcaacaaagattgtgctgttaaattcggcgccctcagaaaagcgctcgaccttagttccggcgattactttaagggagttccagctgccgacgaaaaaacgcgcgaggtgtacaagcccaagggatggcgcgtgctccgcaataccctcaatgcagccaaccccattctcctgcagcgtttgcgcgatgaccgcaatctcgccgatgccgttatggaggcagtggcatactcttcagctctccccgtactccaagagcagcttcaggggttaccgctctcggaagcggagatcgaggcgctttgcaggcttccctattcatccaaagctcttaacggctatggcaaccgttccaaaaaagcactcgacatgttgctcgattgcctcgaggagcccgaggtcctcaaccttacgcaggccgaaaatgactgcggtctgctgggactgcgcatcgctggcgcccagctcgagcgctccgatcgcctgatgccctatgagacctggatcgaacgtaccggtcggacaaataacaatcccgtcgtcattcgctccatgtcgcaaatgcgaaaagtggtcaacgccgtctgccgcaagtggggcgtgccaaacgaaatccacgttgagcttgatcgagagctcaggttgcctcagcgcgcaaaagacgagattgccaaggccaataagaagaatgagaaaaatcgtgagcgcattgccggacaaatcgctgaactgcgcggctgcacagcagatgaggtcacgggcaaacagatagagaagtaccgcctgtgggaagagcaggaatgcttcgatctttacacgggcgctaaaatcgaagtcgatcgcctaattagcgacgacacctacacgcagatcgaccacatcctgccgttctctcgcacgggagaaaactctcgcaacaacaaagtcctagtcctcgccaaaagcaatcaggacaaacgcgaacagacgccttacgaatggatgtcccacgacggcgcgccttcatgggatgcttttgagcgtcgcgttcaggaaaaccagaaactcagccgtcgcaaaaagaacttcctgctggaaaaagaccttgataccaaggaaggctaattcttagcacgcagcttcaccgacaccgcctatatgtcgcgagaagtatgcgcttacctcgccgactgcctgctgttccccgatgatggcgcaaaagcacatgttgttcctaccactggcagagcgaccgcatggctgcgtcgcaggtgggggcttaactttggctcgaatggcgaaaaagaccgctcggacgatcgtcaccatgccaccgatgcttgtgtgattgcagcatgtagtcgaagcctcgtgattaaaaccgctcgaatcaaccaagagacacactggagcataaccagaggtatgaacgagacccaacgccgcgatgccatcatgaaggctctcgaaagtgttatgccctgggaaacctttgcgaacgaagtacgcgcggcgcacgatttcgtcgtacccacccgctttgttccgcgcaagggaaagggcgagttgttcgagcagacggtctatcgctatgccggcgttaatgcacagggcaaagacattgctcgcaaggcgagctccgataaggacatcgtcatgggcaacgccgttgtgtcggcagacgagaagtcggtcatcaaggtgagcgagatgttgtgcctgaggctctggcatgacccggaggccaagaaggggcagggcgcttggtacgcagaccccgtctataaggcggatattcctgcacttaaggatgggacgtatgtgcccaggattgcgaaggcgcatactggccgaaaagcctggaaacccgtgcccgaaagtgccatgaagaaaccgccgctggagatatatctgggcgatctagtacagataggcgattttgttgggcggtttagcggctacaacatcgcaaatgcaaactggtcgtttgtcgacaggctcactaaagaagccctaggctgtcccaccgttgtcaagttggacaacaaactggctcccgccataattcgcgagtccataatcatgcaccaataaatagctccgcgccctattcggtatccgatccgaatagggcgcattctcaactagaaaagacatccgattagcctaagcgtatcccttattaattctgagctgaaagcggattagttcacgctattgaagcagtacctcgactcaaacaggcgccccagtcataccactctcgacatgcgacatatcaaccgaccccatatcgtcaatgaatgttgaaaaagcaaaggtctttgtcgtggcccttcccgaagcgatggccgccatcgagaagggctacgagcaagttcgtgaagatgtcctgagcacgcgcccttccccaaggtgatacgct

SEQ ID NO: 4384 - DNA, 4101 bp, synthetic construct
  misc_feature 1..4101: note = Synthetic
  source 1..4101: mol_type = other DNA
gattgagagtctgctgcaatcaggggtcaggagagatcgcaccgcgtctttacgcacgaaaatgtgcaggagaggtcaggagagtgcggctgtgacgcgaaacgtgccacaaagtgccatacgcctgagatcggcagccgccatcgactagcgccccgctcgaccgacgttgaccggctgcgtcaggcggcacctcaccccccgcattgcaccccctgcccgccagcggtaggctggtcatctcgatgttaatcgtcgtggtcggtgggcccagatcgtggttgtcgttaccgggaacaggcggcggtgcgccatggccccgccgggtttggcgcgtacataaatcggcccctcgtctcacccgaaggtgtcgtaggggccggagggcgctccgaagagcggagccttacgcaagcgaaagctcacattattgtgaatagtgacaatcgccgctcaagtacactacgtgcatcctagcggaccgttccgccactggtcaagaggcatgcagaagactaagccgcgcattctaggcctcgatctcggcgccaattctttgggatgggcgctgcttgaacccgatgcggacacctgccgggtggtggccgctggcgtccgagtcttcgaggccggtcacgacaacttcgacacccacaaggaagcgtcccgtaacaaggaccggcgtgaccaacgacagattcgccgccaactcaagcgccgggcacagcgcaagaccacgctgttccatctgctccagggtggcgggttgttacccgaggggccggcctccacggccgaggagcggaccaagatcctcatggacctcgaccgcgccttgctggcgcaatgggctgatggtgatcatcggcgcgcccaggtcgtgccgtatcgcttaagggcggcggcgctggatcagccgctcccaccgcacagtttaggccgcgccctgtatcacctaggacaacggcggggcttcaagagcaaccgcaagtcagcaccgagcgcagatgagaagcccggccaggtcaaggaagacgttgctgccctacagaagaaactgcaagacaccggctgtcgcaccctgggtgagttctttgcgtcctgcgaccccttcgagcggcggatccgacaacgctggaccggccgcgagatgttcgtcaaggaattcgacgccatctggagtgcccagttgccccaccaccccgccatactcaccacggccctcggcaacgacgtccggcacgccatgtttttccagcgccccctcaagagccagcgtcacttgattggccgttgcgagttcgagcccacgcgccgacgcgcttcccgcgcgtgccttgcgttccaacggtttcggatcgtgcagacggtgaataacctggtgttcatcagcgaggacaccggtgaggagcgacgactcgacccagacgaacggcagaagctcgttcagcacctggacacgaagacgaagattacgttcaaaggcatcgcccgcctcttgaggctcgggaaggttcggttcaatctggaagacggcggcgagaagcagatcaaagggaacagcaccacctacaaactgcgtggcctgctcggcgcgcactgggacgatctggccgcgacggatcgggatcgtctggtggacgagatccttgcctacgaatcagagacggggctgcggcggcgtctcaggcgggagtgggggttcgaccacgacacggctacgaacgtagcggcagtcaccctggaacccgactacgccaacctctcgcgtgccgccatcagtacgctgctgccgcacctggagaacgggctccactacgcagaagccgtcgacaaggcttatccggactatcgcagtgcgcagaccgccgtggagacgcttcctcctgtgaccaagatggtgggggaggtgcgcaaccccaccgtgctcaggtccctgagtgagctccgtaaggtggtgaacgctatcatccgtgcacacggcaagcccaccacgattcgccttgaaatggcccgagacctcaagaggcccaggcaagcccgcatggatatccagaagcgggcgaggcagaaccagaaagcgcgggaggccgcggccacgagcatcatcaaggaggtagggattgacgcaccatctcgcgctgacattgagaagtacctattggctgaagagtgcaattggacgtgtccctataccggcaagcgcatcacgatgaacacgctcttcaataccccacaatttgacgtagagcacatcatcccgcgcgagcgatcactgaacaacaccttcctgaataagaccctgtgctggcatgaggaaaaccgccaccgcaagggcagcaaaacccccctggaagcctacggtcccgtcgagtcatcggaattcggcgcgatcctaggcagggtgcgccagtttcagggctcgaaagggcagacgctcgccaagttccgcttcttcacaatgaccagcgagcaggtgcaggaagcattcgacggcttctgcgaccggcacttgcaagataccgcctacgcctcgaggctggcggcggactacctggccgggctctacggcgggcggatagatgccgctggcacacaacgtatccagaccacatccgggcaggcaaacgcgatctttcgtaacgtctggggcctgaatgccatcctcggcgacggtccgggcaaatctcgggatgatcatcgacatcatgctgttgatgccatcgtcaccgccctggctacccctaatcggatcaagggactgagcacccgtgccagccgccagcacggacgccaggggttccatgatgtgccccttcctcatacgaacttactcgacgaagcccggcgggccattcacggcatcgtggtgagccatcgcctgacgcgtcgactcaatggcgctcttcacgaagacaccaactacagcaatcgtcagcaccatccgacgggcaaggacggcgccgtggaagagtggcgacacctgcggaaacccattgaggggctctcggcgggagacatcgaacggattgttgatcgccgcgttcgcgactgcgtgcagagcaaactggaggaatcggggcattcggatcccgggaaagccttcaaggatccggcgcgtcatccccggctgccgaccgctgctggtgacggtgttcccatccacaaggtacggattcgcctacagcgaaacaccaaacgcattgcgggcggcgtggcagcgcggaacgtgtggctccgttccaaccaccatttagagatcctagaggtggcgtcagcagatgctgggcaacagcccacctggattggacgggtggtgtctcgtcttgaggccatgcgtcgcaagcagcggggcacctccatcatcggcggtcccacgtgcccggaagaaacgctgctcttcacgctcaggcccagtgaatgcgtgaagatggtgcacaaaggcgaagagggcgtctttgtggtgaaggggatctcgcaggaacgtcatggctccgccaggctctcgttgcaggcgcttaacgaagcacgcccggcaagcgccgttcggaaaaagggagagaaggcgcgggttggaaaaacgccagacaccttgcggactgctcacgccagcaaggtcgcgatctctcccctaggtgccgttcttccgagtcgtgattgaacgcatcctggttctctccgagaggcgcaccttcctgcaagtccaccacgagtgtctccaggtaaaggtgaacggaaccgtccaagcgtcgatcccgctccctgaagtgacggtgatcgtggcggacggaccagaaaccacctttacccaacctgccctggctggactggcggcccatggcggtacctgtatcctgtgcgacgagaagcatcaacccgtgggtatgatcttgcccctgcaggctcatcaccttcaggtggaacggttcgcccgtcaggcgcgggccacccatcccacgcgtaaacggctctggcaggcaatcgtcaaagccaagatcctgtcccaagatcgaagtctggcccgtctggatcgcgccgatgccttgttgcccaccctagcgaacaaagtccgttcgggagacccaaccaacatcgaggcgc

SEQ ID NO: 4385 - DNA, 23306 bp, synthetic construct
  variation 15548..15690: note = note, n is a, c, g, or t
  source 1..23306: mol_type = other DNA
  misc_feature 1..23306: note = Synthetic
tttgcgacaagcttggcggtgatcggtgttcggccctcatccttgcgatcctgacgggcgtagccgaaatacggcatcacggcagtaatccgcttcgccgaagcccgtcgcaggcagtccatgaacacgagcaattccatcaaattgtcattgacgggctggcaggtggatagcacgacaaaacagtcccgccctcgcacgtcttcatcgatcttgacaatcgtctcaccatcgggaaagagttcggtcgtgctctgaccgagcggtatctcgaggtgagcgcagactttttcgccaaagtggcgactgccgcgacctgcgaagatccgcatcatgctggtatcagaattgttcaatgcaccgctccctcggccaagcgttttgcgaggatggtagagacgaactcgagttgttctgcggtgttgatgctgtgcacctcgtcggcgcccacggcatcgatcacttcgacctgcaaaccatcgccgcgcagtatggcgcagacatcggtgaggtagtattcgccacttgcgttcttgttcgtgagccgatgcagtgctgcaaacaaccgtcgggaatcaaagcagtagtagctcgggttaatctcgttgatttgcttctcagccggcgtcgcgtccttgtcttccacgatgcggtcgaagtgtccggttgcgtcacgcacaatacggccatacccggcgggatcggcgatgcgggccgtcgccagtgaaccggctgccccagcctggcggtggcgctgcaccagccgctccaacgtctcgcaccgaatcagtggcccatctccggcaagcacaacaaggtcaccgtcaaaaccagccaacagtgtttcggcctgcatgaccgcatgaccagtgcccagcggctggtgttggttgacgaattcgacatcagattgttcagcgaacgcttcgcgcaccttgtcgccctgaaagcccacgacaaggatgatccggctgcagccagccgcccgacacgcgtcaaccacccactcgaccatgggtcggtcgcagactgggtgaagcactttgacaacgtccgagttcatccgcttggaacgcccagccgcaagaacaaccgccgccagcgcgcggggtgcggcggagatcgatgctggagatgtacgcgatacctcggtcatgagtcgatctgaactggttaccccgccggcgccgaaaaagctggcccgcctggactcgaaccaggaatgacagtaccaaaaactgctgtgttgccaattacaccacgggccagtggtgtgcgacccgtcaggtggtcgcgggcaggcaaggcggcgtccctgattgctccctgaaaaggctcgtagccgagacgagtcgtgaaacttcgttttcgcggcccaccgagcgaattggcttggagcgccaatgcgggacggtcagatccgcggccaaatctcccgtggactggagcaccgaccggccgcgccgcgatgccccatggatgggccaggctacaagccagccccatccggccccatattggagacggccaagtgtagacacgggggccaaacggtcaatcacgtcggagcgaggtccacgtctgcggatcaggttccgttggcttggggtgatcccctgccactgcagcaccgcgtggtgttcctatcctgtcagaccatgtaccgctcgctcggcgatttcatcgatgctctggaccaggcgggtgaactggtgcgcatcactgctccggtctcgccgctgcttgaaatcacggagatcgccgaccgggtaagccgagccagggcgccgaccgccggggtgactggccagatcgttgatcccgatcatgccgatctcggcgggcctgccctgctttttgagaacatcgagggaaccaaatcaaggatccccgtggcgatcaatctcttcgggagctaccagcgcatggagatggcccttggttgtcacgactcgggccacacacccggcggctttgaagcgatcgcggaccgcatcgcatcgctcacgcgtcccgagccgccgaccggtctgggtgccctgctgcgcaaagccgcagagtttgctcctctgctacggacacccccccgactcgtgggtagcggtttctgtcaggagatggtgaaaacaggcagcaatgtcaacctgcttgaactgcctgtcgcaaaatgctggccgttggatggggatctggcgggagtaggctatccaactccccccgaccaacccgacacgcgcgtgggtcaggggcggttcatcacctttgccggcatgtacacgattcacgccgacgatcggggaaagcgcaaagcgccgagccgcaacatcggaatgtatcgcgctcaactcatcgatcgatcgcgtctcattatgcactggcacatgcaccacgacggcgcgcggcactggcgatcctggaagcgcctcggccaaccgatgccgatcgccattgtgctcggcggagagagtgtcctgccctacgccgcgacttgcccgctgccgccgggaatcagtgaactgctcatggcgggatttctcaaccgcggcgggattcgactcgtcaagtgcaagtcggtaccgctccaggtcccggccagcgcggagatcgtcatcgaaggctgggtctcaacggaggcaggcggcattgggttcgatccccggacccgcgacgaacccctcggagctggtgcagcgttcgagggaccatttggcgatcacacgggatactactcgttgcccgatcgctatccgatcgtcgaagtgtctgcgatcacgcatcgacgccacccgatctacccatccacgattgtcggcctgccgccgcaggaggattactacctgggcaaggcgaccgaacggatcatgcttccactgttacggactgtgattccggacattgtggactacgacctgccgatgttcggcgcgttccacaactgtgcgtttatcaagatccgcaaggagtatcccctgcaagcgcggcgggtgatgcacgcggtatggggcgcggggcagatggcgtggacgaagttcatcgtcgtggtggatgaggatgtcgatgtacatcggcgtgacgaagtgctccgcgcgaccttccgtaatgcgcactttggtcgcgatctggaatttgtgaacggaccgctggacatcctggatcacgccgcgcctcgacttggcgcgggacacaagcttggcattgacgcaacgcggaagattgccggcgaggaggtgggcgggattccgatcgacatcgtaagaactgcgccacctcgcccgttggtcgacgcatactccgacgacggggctaccgcgatgtttcagccgggatttgggtttggccgctgcgccttcgtgcaacttcccgccggagatcgcggtcatggacgagagatactcgcgtccatgatggaccgactttcgagggctgatgggcagccgacatgggaattcatcgtgcttgtggatgatgatgccgatccgagagacacagaggcagtgctgttctgctggtgcgccaactgcgatccagggcgagacatgatccggcgcggttcgcgaatcgcatttgatgccaccgccaagaccgccggcacgatcatcaatggccacccggtgcgcgactacccgccgatactccgcatgagcgaggaggtccggcagcgggtcaccgaccgatggtcagagtatggcctcgatcagtaccaggtgaccgcgcggcagtgagtctcggttcctatcgaacggtctcctcgagcaccgtggaggtgtttccaagttctgctgcctggagccagagcgtccgtccgcttgccccggggggaacgcggcgagacagtgcggcatcgccgtttccatcagcggtggacgagccaaccagaactggactcgcgagattgagatatacgtcgagcgcattgacccgagtccatgtgttgccgccgaccaggctataagcgaagtagacgcgctgtccgggagttgctccggccactgacaacgtcgtgctctggccgccaacgagccccgtggtggtgagagccatccgagatccgatggcttcagagacgtcgagaatgaacaacccgcgatcgcgatcgtcgagaatgacgatccctgagtcgaagaacggataggccgtccacgcgccgtgtccgtatccgggcgcgtcgttctcgggatacgaatcgaaccatccaacccgcgtggggttttccggatcggtccgcgcgtcaaagagttgcatgccgctggcgtagttggcttcgtagatgaagccgtccttccagaagagattgtgatctgtagccgtcgaaccggatgtgaaggtggaaaccagtgtcgggttgctcaggtccgagacgtcgtagaccagcgtacgtgtggtcggcgtgtaaccattgagttcatcaagttcatcattcagatagaagtagtgcctgtcggcgctgagccagccctgatggcagtagttcaaaccgggatagatatccgaacccagcaggatcatgttggacttgtcggtgacgtcgatgatgtcaaatcgccaatagccgctggggcagaaggcaatctccttgcccgcgtagggaccatcgtggtagttcacgacctgagcgtcatgaacgtggccgcctgtggggttcgtcgatcccgcgacagcaggcgtagtcgggtcgctcaggtcgagcgcgacgatgccgctgccctggcttgaggcagtcatgtatgcatagccgctctcttcattgagcgcgaagttgtggctgcgatagggtcgctcgttgatcatcgtgaccgtaccgctgtcgatctggctcagatcgaacacctgcaggttgaagtagtcgccaatgcagtaggcgtagtgcccgtagatcttcatgtcctcggtgacactctgagcgtggggctgaatgtggaggatgacaggattaaccggatcggtcacttcgataaacgcggtggtttcataggtgccgacgatggcgtactcgcggccggaggggctggtgtatccccagcagtcattgccacccgtagcgttcatctgctgcggggtgatctggctcatcagccggacattgtgggcgtcatattgggcaatcgccgagcccgacgcgaaagcaatcagcccgagggcgaatcctgccgccgcacggctgtcaacaaaattgaaccaatgcttcacaataactcctcctattggcaagctccgaccgtcaatcggccggaagtggccaatcgaggatggctgcaaaacgcgtagcctaacggataaccgttgccggtgtcaatggctaaaccccaaaatccaccgaatcattccgaaagttggctggtgagtgaaaataggtatgactacgatccgtgtcgattcgggcgcttagctcagctggctagagcactgcttttacacggcaggggtcactggttcgaatccagtagcgcccacttgttcactctgcgggatgcaatcgcataccgcattatcttgcgcaacccctacgaatacaggctcatccggtgattcgtgcgaagtccgatcttcagacgcggcttgctgctgcgccgcattctgcgcctctggtgcgccgcattccgcgccgcttccggtggcgagttcgaagtgagcatcgcgggtttgcagatagtggcgagccgcaatcagcggactgtgcccgagccaccccgccacgacgtgcgccgggaatcgctcgcaccagtccgtagcacacgacgcccggaggttgtggaacagtcgcggccacggctcggcgccggctcgcttgatgatcttcgtgaacgtggttcgcaggttcgtcccgcgatcgcgcagccgggggacgatccactccgccccctcatccgcttcgtcgaagagtcgcagcaggatcgcccggagttcgggcacgagtggaacgacgcgcaccgcgtgcccttcgtgccctgccgtctttggactgtgcacggtcaacctgccgcgttcccagttcacatccccccagcggagtccgacgatctccgaggggcaccggaggcccgtgtagcggcccagagcgacaatggcgcgccactggtcatcggggcagtgggcgaggatcgcttcgatcgtctcgactgtgacgtagtgcgagcgatccgagttgcactgtgagccggcgcggaggtcggcgaacgggctggagtcgatcagtccccacttgacggccttgcggaagatcgtctttgcaacgtgcacccgcttggccacggtcgccgtggcgagtccggagtccgcgagcactttgcgccattggtccgcatgcgccggggtgattcgatcaatggccatcggcccgccgaagtggtcgcgcaggctctcggttgtctggcgataggccgcgcgggttgacggcttgacgactgccgacgatacaaagcgcgtcaagagtcgatccagcgtcatcgccccggtatcttcgcgaggttcgaccaggccgacgcgggcaagccgcgcgtgaatcacgttcggccgatcgcgcacccatgccgagagcgccgcattccacgggttcccgttcaattgcgccgcgagcaggtcttcgactcgcagggcgaacgtctcggccgacttgacggagcacttgccgagccggatcgtcttgcgattcccgtcgccgtcggtgaactggactcgcttcgttccgtttgcatctcgtataacactggccactgttcagcgtcctttccgcctcttcgggcgaatcacaatctcaagccccagatagtcagcaatccgttcgatcgcatcggctttcaaaccccgttcgccgctcaggagacgggacaacgcgctttgtgcgatgcccgtctccttggcgattcgatactgagtctggccactgcgctcgatcgctttgcggattgcctcttccagcttggtcattggaagagcgtaggccgatatatgccgtacgtcaagtagtcgcgccgtcgccaccgatccaccgccagcgcgatgcggtgttgggccgtccgccatgaccttgcttccctcgcgtgacattctcgatcacaccgtctcgcacgagtttccagagcgcgtcgtaggcgatcttctggtcagtttcgatgaggtcgccggcgaggtgcgaggaaagcacgatcactttccccggcgctcgcttgtccagttcgtagagcagcgccacgagcaggcgcgttttcggggagtcgtactgcatggcgatagccggttgcggacccttgcggacccgctccatcgcttcccgtgccggtgatgatccccgcggtatgcgggccgacagatacgctcgttcgaacttgaaccagccgagttcgggatccggctcgctcatgtaccgcttgccctgttcgtgccagtcgcggaagtacggaagcgatgcgtccaagccgagcatcaggtcgtacttcaggaaccgcgcgaagtccatcgtcttggcatcatgctcgccactgccacgaacgatcaattcgtcagggatcacgggcttctcactccccacccttagggtctcagtatgacgtccctgaggcccggagtccccgatgccctgattagagatagcaggcagaggctggtgctggggttgctgcttgatctcaggagcgagtcctatctgcaccggatcggcttcgggaattgaggacccaaggggcacgagccattcgtagagaacgcccgagtcgttgacgctcggcgggagaatgacgtacgcgcgctcaccgcgaagttctccttccgtgccgatcttccgagttgcgggcacgtcgccacgaaagtagacgtggtacgcccgaggcgtcctcacggtcgggagtcgcttcgcgtcgtccggatgctcggcagcccaccgctcatatgccgccacctcgtcgaagtctcggcaggcgagcccgccgcttaccttgccgagcacgaccgccaggccgcgaacacggggcttcgcgaaccactcgcgaatcgtcgcttcgtcggcccgcacagattggtagttcctccacgcgcccagtggcttcttgttcctgacgatcgggatgatcgaccatccgcgccggcagtagtcgagcgccgcttcgagcagttcattctttgacgtgctttcgttttcgttgttgttcacggttgggtccttccaacgttgactatctcgccggggcacacattgcaagcgacgcgccgcccggccaagcgcatcgttcggcttggtgacgccccgcatcgacggggcgacgtttggcgttatccgttggcgtttgcactggcggcggatcgctccgcgtttcgcatccccttggccgcctcttccgtcagccaggcgcgcagggcgtccacggggtagacgatcgctttcgagcccatgcgggcgtgcgggatcgccccctcatgggtcagcgtccacaagaggcgctggccgataccgagcgctttggcggcgtctttggggcggagggctaggggagtttcgtaggctagtttggctgaatcgagagcattattcgcgttcatgccacaagcatcggcccgaaaaacgcgaatgaaagcgcgaacaggcgagcgtcacgcatgttcacgcggcttcccgcaagttcactcttttggcacgtcggtcggccaccatcggcgcgcatcttcgacgttatacatcgtcgtcccgtcgataattcgacttctcactcgcttgctcttgcgttgcggaccagccgcctttcgcaaccgactccctagtgacttgtcgaagtatgaagcaggtttgtaggcatcgtcaccggccgactctacctcctctgcgccgtcaactctcgaccgcaacaccatcccggagggacgatcgtacggagatggcggctccacaatcctgtcgggcgagcaagagagttcggtccggtcagactgagtcgaggccgacggggagcacaggtcggcgagcagggcgcaggcatccgcctctactctggccttctcgcgcagccgtcccaacaccaactcatcgggcgcattgattggcggaacaatcgaatcactgggggacgggcagtcaaagcaatccggatagcgcgcgggaagcagctcgaacgcgagggcagtccacgcgatctcggccagagcatgcgcggtgaggggtatcggcacctcctttgaccgcgggccaacccaaaggcaatgctcgccaatcgaaaggtccgactcagactccccgagattctcccggaagcgatcatcctgctcgattgcacggcgcagcgatttcgcgtcctccaaggtctggtattccgggggaacgagatcatgctccagacaggtcgcatacagcttcgccgctcgtagcgaaagccaacccacccgatcgctgatcctcgcaacgtcagtatcggttgacacagcacaggcgcggaactcgtcgcctagcagtctccattgtgaaggcggcggggccgcgcgcttgctcacgctgtgtcctcgatcttcggggccgtcagtcagtctcgcatccagtcgggtcgtccccggctagtagagggaaagatatcgcgctgttggtaggggccgaatgcggagatttcaagcacacacgcgcgaccggacgcccgaacgtttttcgcgccgtctggactccaccggtcccgccgctccgctccggtcacggccgcgaactcgctcgggccagtcggatgcgggtcgaagggttggagtcggggcaggtcacgagcgacttccgccggcgtcggctgccgaatgggacgcggaatccaccccccgacattgcccacctttgtctagtgttcgccgagttctcacaaccggaaaaaaaacgccccacagggaggcgttaaggggtgccgtcgctccagtggaggggcagagccctgcgcggatcattttcccttaccgtgataagcggaaaacgtcgctctgatacactggaagtcattgtacaatgccggttggagctatcaagtccccttggcaggagtgagtcatggttggaagccggacgcgtcagtcatacgtcctcggtctggacattggtgtggcctcgatcggatgggcggtggtggatccctccacggcacgagtcatccgcgccggcgtccacctctttgaggcgggcgtggacggaggcaagcagaatcccgaaacggcgatggccagtggtcgagagcaatcccgcgcgactccgcgccgcgatgcgaggcaacagagacgtcagacctggcggcgggcctataggaagcgtgtcctgctcaaagcactcatacggcgggggctgttgccggcgcccgagcggcggctcgactcgccacaggacattgacagctatctcaaggcgatcgacgccggcttgcgccacgcatgggaggcgaagcagaatgccgatcatcgccttcggcaacttctcccctatcgcctgcgcgccgaagcattgcggacgcggcttgaagcgcacgaggtgggccgggcgctctaccacctcgcgcagcgtcgcgggtttctgagcaaccgcaagaccgacaaggatgacgccggtgacgagaacaagaacactggaaaggtgaagacgggcatcagcgaacttgagacactcatgaaggccgccggcgcggatactttggggcagtacttcgccgcgctcgatccaagcgattccgcggcgcttcggatccgtggccgatggacggctcggagcatgtacgaacatgagttcgctcgcatctgggagcaacagtccaagcaccatccatcgctgatgactgccgaagccagaacggaaatccaccgcgccatcttctttcaacggccgctcaagagtcaggcgcatctcatcggtcggtgctcacttgttcccgccaaacgccgcgcgccgatcgccgatcgtctcgcacagcgcttccggatgcttcagaaggtcaacgaccttgagatcatgccctgcgtgcagatcgaactggaggacttcgacagggagaccggcgaggtcaggatgaatccaaagacgggcaagccgagagtcaagaagcaatgggttccggacccggcgcagacgcagcggcggctcactccggaagagcgagaagccgccatcgtccggttttcgcggggcgatgccacatttaaccaactcaggcagtccggcgctgcgccgagagaatcgcgcttcaactttgagcgcgagggcgagactggactgccggggctgcgcaccgacgccaaactcagggcggtctttggggaacggtgggacggattctcggaagatgacaagaatgcggcagtcgaggattgcctttccttcgagcgcgccgacgcgatggaaaagcgcggccgcgagcattggggactctccgcggagagcgctcgggcgtttgcacgcgtgagactcgaagaagggcatgcgagtctctcgcgtgccgcgattcgcaggttgctgccgggtctcgaatcgggcgtgcggtatgccacaatccgcgagaaggtgtttcccgagtcatccaagccgatcgtgcccgtcggtcagcttccgccactggacgacgcattcgatgcgcccgtgagcccggctgtctccagggccctttcggaaatgcgcggcgtcgtgaacgcaatcatccgcaggtacggcaagccggcgcacgttcgcatcgaactggcacgcgacctcaagaaaggccgcaagcggcgcgaggcgatcagcaagcagatggcagcgcggaggaaacttcgtgaggacgccgcgtatcgcctgctcaagcaatatcctgacttcggctcaaggcccgaggacgtgcgcccgggggatgttctgaaagtgctgctcgccgatgagtgcggctggctctgtccctatacggggcggagttttggctgggaggatgtgttcggggcgcatccaacgatcgacatcgagcacgtctggcctttcaagcgctcgctggacgattcgtacctgaacaagacgctctgctgcgtgcgcgaaaaccgggaggtgaagcagcatcgcatgccaagcgaggcgtattcgcctgatcggctcgcagagattctccagcgcgtggcgagattcaagggtgacgcggcgagagagaagctcgaccgctttcgagcggaggctattccaccggacttcacgaatcggcacctttccgaaacgcgctacatctcgcgcaaggctgctgagtacatcgcgctgctctatggaggattcagcgacgaggaatcaacgcgccgcgtccatgttccttcggggggattgacaggatggctccgccgggaatgggcgatggacgcgattctttcggatcggaacgaaaaggaacggagcgaccatcgccaccacgccatcgacgcgatcatcatcgcgcatacaacccccacgaccatcaagagacttcaggaatcagcggcgaaggccgatgagatgggatcgcgccggcgctttgcaggggtccaggcgcctttcgaccttgcagatacgaagcgcgcggtccaagcaattatcgtgagtcatcgccagaacaagaaagctcgcggcaagttccacaaggacacggtgtacagtaagccgctgccgagcgcggggggcaagacgaggcaccgcatccgcaaggagctccataaactcaacgaaagcgagatcggagcgatcgtcgatcggcgcgtacgggaggtggtgcgtgccgcatttgaagaacgcaagcgtgcgggcgcaaggactcccgcgcaagccttcggggaaccgcagcaccggcccacgctgccgcacggcgagcgtatacgtcgcgtgcgcctctatacgtcagcacagccgcaattactcggtgtcgctcgtcgtgatcgcaaggcgcgcggcgaggctaagcagcgacgcgtcgaccttcaggccaaccatcacacggtcatcatggcgaaacttgggaaggacggaaccgagaaggcctgggtagacgagccggtgacgctctgtgaggccatggatcgcgtgaggcagcgccccgcccggccacttgtgtcccatgaagtgccggatggctgtcgcttcaagttctcgcttgcagcgaatgacttcatcgagatggacactcctgatggacaggggcgcgcgatctaccgcgtgctgaacgtgtcgaagaacgatatggaagtagtgtcgcaccaggatgcgcggacgcagaagactaggatatccgagaagcagcgcgagcgcgtgcgggggtcatcgctgcactcgcggcacgcccgtaaggttcacatcacctatctcggcgaggtgaagaatgccggggggtgaacgtgtcatcgacttctccgatggtccggcgcatctatcgatgcgatatgagcagctcgtcattcgcgctgaggatggagaggggcaggcggccgaggtgacggtgccgctcacggaaatcgcggcgctcattctcacgactccacgtctgactgccacgcaatccgctctcgccggcgtcatgcgccacggcggctcggtcatcgtgtgcgatgactcgcgccagccggcgggcatgatgctgccgcttaacgccaacacgagtcagacgcaacgtatgctcgcacagattcgtgcgcctgttccaacggcgaaacggctgtggaagcaaattgttcaggagaagattcgcgctcaagccgccacgcttcttgctgcggggcgcggcgacggcggcttgcccgcgctcgcacctcgcgtgcgctccggtgacccctcaaacgtggaggcccaagcggcgcagcggtactggccgctgctcttcaacgatgcgaactttcggaggcgccgagaatcgccggaccagaaccgccttctgaattacgggtacgctgtgcttcgggccgccgtgggcagggcgatctgcgcatccggcctccatccctccatcggtgtacatcactgcgggcgcagcaatccgtggtgccttgcggatgatctgatggaaccatatcggccgctcatggatagcgccgtcgtggaactcgtgggcctctacggacccgattgcgcgcttgaccgtcgatcaaaatcggcgctggtttccgttcttaccgatcgcctcgaatcgaagggagaagcgcgaagcgtcttcgagtggatcagtaggacatccgcatcactggcgcaggtatttctcggggcgtcggatcggctcctgtttccggatggacttcatcatgcgccggacgcatcctgacacttcggcatatcgatcaatgtggctttttgcaatgttcgatcttccggtcaagaccaaggcagcccgaaagcgctatgcgcaattcaggaagctgctgctcgcggagggatttacgatgctccagttctccgtctacgcgcgacacctcgcgagcgaggagtcaggtgcgattctgaagaagcgactgcgccacgggctgccgccggacgggcaagtgcggctgctccccgtcacggaccggcaattcgggaagatggaggtgtactttggaaaaaaacgccatcaggccgaagatcctccgacccagttcatgcttttctgacggctggatcgagcgcaagtccatgtcccgcaattacttgggacaggaatagtgtatcagagcgacgcttccggccaaaccacggcggcgtgcttcgcggcaatacgcgcgatctgagtgtatcagagcgacgcttccggccaaaccacggcaggatcgggtcgctggcggcgatgctgcttagtgtatcagagcgacgcttccggccaaaccacggcgattggaggggtgttgtctctgacgattttagtgtatcagagcgacgcttccggccaaaccacggccgcatctggcttctccagcaagggggcgggagtgtatcagagcgacgcttccggccaaaccacggctctgatcgaccggggcggccgcgtcggcgcgagtgtatcagagcgacgcttccggccaaaccacggcatctgccccactggcaacacctgcccctgcagtgtatcagagcgacgcttccggccaaaccacggcactgttctcggtttcatttgcttcctctctagtgtatcagagcgacgcttccggccaaaccacggcgagtagcaacagtcgatcctgagcctctccagtgtatcagagcgacgcttccggccaaaccacggcgggcgagacgtggactgcatcatcgacattagtgtatcagagcgacgcttccggccaaaccacggcaagaactgaactacccgcacgaacgcctcgagtgtatcagagcgacgcttccggccaaaccacggcccaaagaggtctatcaatcgggggcgtgtcagtgtatcagagcgacgcttccggccaaaccacggcggaacactcagcggggcggggattggcggaagtgtatcagagcgacgcttccggccaaaccacggcgaggtcgttacagcatcgtgcacacgccacagtgtatcagagcgacgcttccggccaaaccacggccccgtgaatgactgggttccggcgttgctgagtgtatcagagcgacgcttccnnnnnnnnnnnnnnnnnnnnnnnnnnnnnnnnnnnnnnnnnnnnnnnnnnnnnnnnnnnnnnnnnnnnnnnnnnnnnnnnnnnnnnnnnnnnnnnnnnnnnnnnnnnnnnnnnnnnnnnnnnnnnnnnnnnnnnnnnnnnnnncttccggccaaaccacggcgagcgagccgaagccgagtgcggaggcggtagtgtatcagagcgacgcttccggccaaaccacggcgtcgatctcgatggtggtgatcttgagtttagtgtctcagagcgacatgcctcttgctgcggaaatgacgcggcactagctgcagttgaaacggggccatctatcgcactaggatgccggccgatgaccagaactacgctcgctagctgagcgactgcagttcgggtcatcgcaaaacaactggggtatatcagatgcgtcgagttgcgaggataatgattgctatcctgttcgcggctgcggcggcagtggacattatcatctcgctcatgccatcgtcacccgcaatcgaacgatggcaactcatcctgctggccatactggtggctcttggcactgcgttcgcctcgacatgggcatcttgggattggtttcggaaatgcctgaccgggggtatcagggcgtccgatcggtgcacgcgttggtggcagagtgtcaaagacgaggccaggaagtaggctcctgatggcgatcgtctggattggttttggtgcggtgctggttgtcgggttcttgtggctgcgcggaacgtggcgggcattgggttcgattgctgatcttgacctgtcgccggtgcagcaccgcttctggaacttcgcctgcaagcactacatgcgaaccgaaggacgaaaactgacctcccgagaactccacaacttggcgatcttctcggctgcgacggaggatgaattgtgccaggccgtaatgagtggcaaagtcagtatggacggagcgatggaagcaatggaagccaagttgagcgaaccatcgcaactcaatgcggaagtggatgcgatcctgtcgtccggagcgccgcagcacagtccaatcgagcgattcgatctgaatgccagtcaaatcagggcgtggcattcaatgatggtcgcatttgagcaccagtgcgggcgcaaactcaagcccgatgagcgcatttactttgctggggtcgccgcgtgtatcccctttgactcgctcgaactcttgaacagtggcacgatttcaccagactccgcctactgcgatgctgtccgtcaggcgaagtcggccagtacagaactgaaggcagaatgggacacgttcaccgctaattttgcaccgccagagatcagatgagcgacttgcatactgactcgttcggtttgagccggcgcgccatcgagcgccccccagcgacgttatccaacacgaaaggtaggtagacaatgaaggatcctgtacgaagcgtgctggatgaagcgacgcaagcagcattgagcaagtgttatgcactcgactgaagcataacacagtacgtagcgtggattcagtcggctccgtcggacacctgccatgaatacgcatagctaacatgcaagatctcagggacgacatttgggtgcatgtctacgacatgccactcctgctcggaccgtttgacgctaggatcgtcaattgatcaaccgagcttctctattattctgggtcatccgcggcgaccgccgtcacgacgacgatagcaagtgagggtactcgtgagcaaagcgaggaagatacactgtgtcagtttggaggcacacggagcaacgggtcgtgagtgaagctattggtcccacatcgggtggcggagcggcaactttgggaggtacgactttccaagaggacgtcgcgtgctacctctcaactctcatccttgccgaagcctccgcggagccacttgcagggcttccccaagacgtgtacctcacggcaatcgtctccgaagcaccgcaaccaattgacgatttgttgatcgggacgtccgaaggcggcgccctctatgtgcaggccaagacagcgctggatcgttcgcaggctgccgactcagcatttgcgaaggtgatcgaccagttcgtacgccagcgattgttgggagcccgacctatcggcaccgagccacgtccgctcgaccacgcgcgtgaccggttcattctcgccgtggggcatgacactcctgctacgatcaccagttcgttaccgaatgtgctcgaaaagtgtcgaccgatcacagattcggcgaggctcaaggagcttctccgttcactgaacgcaacagaagcgaaaacactcgagatcactcgcgcacatattcagcgaagttggcttgctaagacgggcacatcaccgagcgcacaggatgaactctccttgatccagctcatgcgtgtgctccagcttgatctgcggacggatggaagtgctcttcttcgtgccaaggatcttctccggcaagtagtcctcacaaacccgggtagatctggagacgcctggagtgcgctaatcacaatttgtcggagtttcggaccgaacaagaccggtggagatctcgcatttctcagagctgagcttcagaaccgtcgcattcctatccgaagcgtacctagttacgcgggagacatcgaggcacttgtcaagtacacctctgatcggctcacgttccttcgccgcctcagcgtaatggagctcggaggcaaggacgtcaagatcaggcgagaggtaatcgtcccgctattcgaattctccgctaaagaccacacagtgctcgttggcgagcccggcgcgggcaagtcaggatgtgtacatgacctcgctcagcatttgattgacgacggcaacgatgtcgtgctcttggccgccgacacgatcaaggcatcaagtgccaacgagctctcagcgagcctcggtctggcgagaacaagaacgctggtcgacatactgcaacgctggtcgggagaacggcccgcattcctcctcgtagacgccctcgatgccgcgcgatccgggatgagcctgaacgtgctttgtgagatattccgcgaactgcgagagcgtgctccccggtggcacatagtcgcatccatccgcgaatacgacttgagaacgagtcctgaggtacaagaactcttcgcgggctctcctcacctccagttctgcgattcccggtttccaatggtgcgccacattcgagtcagccgcttgtcggcagccgaactctctcaagttaccgcaggccatccacgaatgctcgggttgctgcaatccgcaccaacattggccgaactcgtcagaaaccccttcaacttaaacctcctttgcacgctcctcgacaacaacgtgagcgacgctgacctgacggccgtacagcagcagatcgaattgctggatctgcactggactcgtcgtgtggaggccagcgatcgcgcaggacgacaggtcgtgcttaccgctgccgtaaggcagatggtaacggcacgagaattgaatgttcagcgaatcccgctcgctatggcggtggcggcgaacgcagcgtcgcttgagagtctgctgagcattggagttttggtggagctcgcgccgagatccagagcagacgcactcatcagcttcgcacacaacatcctgtttgattacgccgtgtgccgcctgtggcttaatggtctgagcgattcacaaatctcccaactctccgagccagcgaatcacgacctgctacttgcgatcaggccgagcatcaagatggcctttgaagagctctggttcgagggcccaatgagatgcgcgttttgggagcgtgccatcgccttcgagcgccctccacaaatgcggcttatcggcaagatcatcgctgccggcgttgccgcggagcgatacgaaactctgtcagatgttcagcctgtactcgatgggcttagacagaaggacgcctcagcaaaggcactgctgcgattcatgattcaggcggcactaactcagcaagaacccggtccaactcagcgactgatgttgggtgatggcgcaccggagtggatggctctagcctctgcactttccgaacacctagatcaggttgcctgggacaccaggtctcttctctcgcccattgctcgcggagccgagacggcaaccaaagaccaatgccgagccgcgaatacgactgcggttgccctactgaagttcggacttgcagattcgcgttactatggactcgtgcgactcgcgattgaagtgtgcgccgagactatcaccgccgatcccaattcaacagttcagtcacttgctgaggtgcttcgacctgacaaattggaagtcggcgcgcacgagtggctgcatccactcgcagaacgactccacctaatcgcagaggttgatcccacattcgccgtccaggtagtcgaagttgtgttcaacgcatccggcgatcctgatgcatccgtccccctgggcagtcgcattctcccgatgtcgatgaacaagcgcgatctggttcgaatggcaagacatgacgtgaagacggcagtcggggcactttggtcgatagacccggtcacagcaacacgaatcgtccttagtgtaatgaccgcaacgatgagtgaagaacacgccaacctcactgagccaaagaacacctatcacattccatttcgaggggcgaccgctacgctaaaaccagatgcaagccacatctggacggcaggcagccatcatcaacacgatgactggtatcaggtcttgtcggtattccgattgggtattagtaccttggccaaggacgatgggcaggctcttctagggcaggtacttgacgtgctccgcgatgaatgcgcgtgggcggttgtgtggagtacgttgcttggggccgcggctgagcagcctgagagtcttgctggcccagtaagcgagttgctcgaggctccggaggtattgcgtgagatggacacacgaacgaacgctggggaactcatcgaacgtggatttgcgtttctttctgtagagcgccgtcttgcgatcgagactgcaatcatccgcatccctgaaatcactccaccggaaatgcaggagttcgccgagcacacgcgaaaccggatgatcggttgcataccggtcgatctgattcagtccaccgagctaagggttatccgcgcacaactcgatgaggcgggtggtccacctcccaatactcccgacttctcgatatccttttcttccactggagaggaagaccaatggtggcttcggcgaaagggggtagatccgagtaatccttcgaacgctgcgatgttggagctcagcaaagcagtagtggggatctgtgcagaccgccggtcgcacgatccatcgagggacgaagcttcacagctgctatcgcttctccgagatgcggaacgggtcgtcaggactgatcacaatcaaggcgtgcatcaggctgtcgtcgagcaactcgaggacgagattatcgctgcctgcacccgcctcgttctcgcaggtcgactcctctctgacgctcccgtcaagctctttgctcgaactatcctattgcgaggcgccacctcaccgcgtccaccgtatcgggaagaagacaatgagcagtgggacagagataacgctggctggggttcccccgccgcacgaatcgaatccgcgcgtggattagtccaccttgcctcagattcgacaacggtcgacgaggaaatactcggcacgctacgccgcttggccacggatccggttccggcggttcggtaccaagtgctggttcatagcggctggctttacaagtcggccagtgagcttatgtggtcgctcattgagtatgcttgcgtcaatgaacctcgcacagcaattctcacacacttcagttccaatgtcctgctacgaatgccattccgtgattatgaacgaattgagccgtacgtcaggacactgtataagcggtgtcgaagcaaagcctcgatgcggagcgttcggcgttactgcgcaaacttctacgctatccatgcgctgtggaaccgcaattctcgggcgattcgctacatcagagtgttcgcggcgaatccgggtcattttcctttggaatcgaacacagttataggtctttgccgtgatctcattcgctaccgtgacaatgcgacgccaggggagaacgaacgggttcgaaggtcggcgttcgaattcctaacagcggtagtcgaggccatccaaactcgcacgcaatcgcttcgccaacagtacgagtcgaaaccgttcgaccagtggagcaaggacgacttggatgaacttcgtgaattgcatgcgctagcccacggcgttgctactgaggtatacattggatctggagcatccgaacatcggcgcgcatcgactgatcgctctggcgagtaccacccaccaactgatcaggagaagactgagctcttgaacgagggaagagagttgtttgactctctatgcaatgtggagttcgttgaaacagcatacgaggtactcaagactctggagttcctaatcggagcagacaatcgcgaggtaattctgcgcgtggcctcactcgtgcgaggagcggaaagtgatggcattcaatatgagtcaatggctgccgacttggttgtccgcatcgtcgaacggtacttctccgaatacggcagtctgttccgtgaagatgccgatgctcgtgcagcattgatcgacatcttggatgtgttcgttggtgcggggtggccaaaggctactcgactgacctatcggcttggcgaggtgttccggtgacgttcacctggaactcggacgatctccgagtgaatctaacccaagcattcagagccgcacaagcggtcagggcggttctggaacaagcccctccgatcgatgcacaagagtcgcctgagcaggccatcgagacaaggcgagagatctggttggagtgtcatgcgcgcgacttcgtcatagatcacatcctgtctgcactgaattggcgattgcaaccgtctatcgaagcgggtgagtacattcaagcaaatttggtcacagagcagcgatctgatggtacgggttgcgacgtacgccagctgaagcctgaaaccggcgataatcggcggcgactagactacttcggctacgaacgagaaaccgacagacccctgcttgtggtcgaagcgaagcgcccccgtctcctgcttcccggggaaccgaatcctaacttacgacccgatgcgcatcccgtatcgggaatactggctgagtttctgcaaaacgctcgatcggacacgaatggcgaaagccaactgaccgcagaatgggaatcagctgttgttcagctgcgggactattgccggattgtcgcagcaagggctgcatggcccgcacgtgccgtattgacaaacggagaatggctaattgctttcgtcgaaccggggaatgcctttgcagaggcctctcccgaatcgatcaggaagcacagcatcttggtgttcgagagcagagaccacctaatcctgaactgccgactgctctgggagcaactcgcgtactctgtgctcgctagccttgatcgaacggtactcccgactgaaatcccattcgtgatcgatcctgccaggatcgagtcatgctcccatggtttgcgcctttcctacacctacaagcaaaccaactttcgcaaggctccgctcatgagcgtctcccccttgctgttcgttcgctccgagggaacaacgtttattaaggtgggcacaacctggga

SEQ ID NO: 4386 - DNA, 13770 bp, synthetic construct
  source 1..13770: mol_type = other DNA
  misc_feature 1..13770: note = Synthetic
ggttcgagtccagtatcgcccactttcttagatccagtcggatcaccacaggcgccaacccctgcgaatcctgcgagattcggaggggtttgtttttgggttgtttgacttcgaggggggagtgttcaagccaggtcgcgacgacatgggccgggaagcgctcgcgccagtccctagcgagggacgctcgcatgatgtcgaatgggcgggggcgaggcgatggattcggcgggtcggccaccggccgcgggtccgtccacaagtttgtggacgtggcgtgcgggtatcgggcctctatgatgcgggatcctcgaggggcgatcatcgtacccgcttgatcgattcggctctgggcaaagaaaaacgccccacttcggaggcgtaagagggcggcgcatgcgccggagcctcgcgcggttcgtttcccttaccgtgatgccgggcgggaaacgtcgctcaggtacacgatctgagtgtatactcattctcgattggcgtcaagcacccaagaaaaggggagttgaatcgtgcgatctgcggcgactgtcggtgatggtgcgcgtgccggtctgcggtacgtgctggggctcgatcttggggtggcgtcggtcgggtgggctgtcgtgagacttggggaggacggggcccccgcggggattatccggatggggacgcacctgttcgaggcggggatcgacgcggggaagagcacgcccgaggccgcgctggcggcggggaaggaggcgagtcgggcgacgccgcggcggctggcgcggcagcagcggcggcagacgtggcgtcgggcggcgcgcaagcgcaggctgctccgcacgctgcagcgctacggccttcttcccgaaggggacacgagagatggcgcggcgatcgatgcgtacatgaaggcgctggatgcggggttgcgcgaaacctggaacgaaggtgctgaccatcggacgcatcagatcctgccgtaccggctgcgggcggccgcgctggagcggaggctggagccgtacgaggtggggcgggcgctctaccacctcgcgcagcggcgcggattcctgagcaaccgcaagacggatcgcggcgacgaggatcaggaagcggggaaggtcaagcaggggatcgcggacctggccgcggcgatggagcgggccggagcgccgacgctgggggcgtacttcgcgtcgctcgacccgacgaaccccgaggaacgccgcatccgggaacgctggacggatcggcggatgtatgtgaaggagttcgaggcgatctggggtgcgcaggccgagcaccatcccgaactgatgaccgaggaggcccgcgaggcggtccggtgcgcgatcttcttccagcggccgctgaagagccagcgacacctcatcgggcggtgcaggctgatcccgtcccgtcggcggtgcgctgtggcggaccgggcgtaccagcggctgcggctgctgcagaaggtcaatgacctccggtacgtcgataccgcaacgggggaggagcgaggtctgacgcccgagcagcgggctgcactgatccagttgctggaggcgggggacgtcccgttctcggcgctcaagcgaacgaggggggggctgggacttccgaagtcggtggagttcaacctggagcgggggggcgagaagaagatcgtcgggcaccggaccgacgagaagctccgcaaggtcttcggggaggagcggtgggggagactcagcgaggcggaccgtgcggaactggtggaggatgtgctgacgatcgagaatcccgacgcgctggagcggcgcgggcgcgagcggtggggattgccggcggacgcggcggtggagctggcgcgggtgcggctggagggggggtacgcgcccttctcccggcgggcgatcctgcggctgctgccgcacctggagcggggcgtgccgctgcagacagcgatcaaggaagagttcccggcgtcgttcgaggccgcggaggcgatggacctgctgccgccggtgatcggtacgggaccgggcggagagggtggcgccttccgggatccgcccagcccggcggtgactcgggggctcagcgagttgcgcaaggtcgtcaacgcgatcatccggcgatggggcaagccggaacggatccacctggagatggcgcgcgacctgaaaaagggaaggaagcagcgggaggaggcggcgcgcgagatgcgggcgcgagagaaggagcgggaggaggcgaagcggaagttgctggaggaggccgggatcgagcatcccagccgggaggacatcgagaaggtgctcctggcggaagagtgcgggcggacttgcccgttcacggggcgctccttcgagatgcgggaccttgtcgggccgacgccgtcggtggatgtggagcacatctggcccttccggcggtcgctggacaatacgttcctgaacaagacgctgtgcctgcacgaggagaaccggcaccgcaagagagatcggacgcccttcgaggcgtacggggccgacccgcagcggtacggggagatcctgcagcgtgtggcccgattcaaggggggagcgaggcgggagaagttgcggcggttcgccgcgacggagatcgacgaggggttcacggagcggcacctggcggaaacgcgctacgtctcgcgcaaggcggcggagtatctggctctgctgtacggggggctctgggacgcggacggcacgcgccgtgtgcaggtctccaccggcgggctgacggcgtggctgcggcggaactgggggatcgacggcctggtcggcgccgcggacggggaggggggcaaagcgcgggacgaccaccgccatcacgcggtcgatgcgctggtggtggcgctgagcgacgcccgtgcggtgaagaggctcagcgaggcggcgcgggcggcggccgagaacggaggggggcggctgcttgcggaggtggagcggccgtgggaggggttcgagcgggacgcgcgggaagcggtcgcgtcggtggtggtctcacaccgggccgatcgccgcgtcagcggcgcgctgcacaaggacacgatcttcagccggccgatccgcggcgtagggaccagcggcgagggaggacaccgcctgcggaaggcgttgcacaaactcagccgggatgaggtggaggccatcgccgacccgcgcatccgcgatctggttcgtgcggcactggagtcccggggaggcggggacccggcgaaggtcttcgccgaccctgccgcggcaccggtgctggagtacggagacggaaggcgggtccgtgttcgcaaggtgcgtgtggatcggcgggagcgaccgcgcgccttcggccagggtggcggtcgccggtatgttgcgccgcagagcaatcatcacacggtcatcctggcccgtgtcggaccggacgggagggatgtggagtggcgcgacgagccggtgcccctctgggaggcgtacgagcggatccggcgcggcgagccggtggtggacacgcgggatcgggaggatgggtgggtgttccgattctcgctggtcgtcaacgaatacatcgagatggatcggaaggatggcggcgggcggggcgtataccggatcctcaacatctctgggggtgacatggaaatccgcgagcactttgacggccgcacgcggcaggcaatccgcgcggccggctcctccccggagcgggtcagcggatcgtcgctccttcgccgcaacgcccgcaaggttcgcgtgacgcacctcggggaggtggtccgtgccggggggtgagcggatcatcgacctctcggatgccccggcgcggctcagcatcagccacgagcggctggtgatccgactggaggagacggagcgtccggcgtgctccggagccgaatcgtggtcggaggtcacggtgccgttgtcggaagtggcggtggtggtcctctcgaacccgcggatcacgatcacccagcccgtcctcgacgggctggcgcggcacggtgcggcggtggtcgtgtgcgacggctcgcggctgccgaccgggatgcttctgccgctgcacgcccacgggctggcgacgcagcggatggggttccaggtcaacgcttcgcagccggtgcggaagcggctctggcagggggtggtgcgtgccaagatcctcgcccaggcggcgacgctcgacgcctgcgggcgcgaggggggcgacgcgctgcgcgaactggcccgcggggtgcggtcgggcgacccggagaaccgggaggggcaggcggccgcggcgtactggccgcggctgttcgacgatccgaacttccgccgcaggagggaggcggaggacgcgaaccggctgctgaactacgggtacgccgtgctgcgagccgcgacgggccgggcggtctgcgccgcggggctgcacccgtccatcgggatccatcactcgggtcggagcaacccgtacgtcctcgcggacgacctcatggagccgtaccggccgctgatcgatgcggcggtggtggaactggtcgggctgtacgggccgacgtgtcccctggacgcggaggcgaagcgggcgctgatctcggtgctgaccgagcggctcgatgccgggccggttcccggcgccggaggcgaacggcgggtcctggagtgcatcgggcgaacggcatcctcgctggcggccgcgttcgagtgcggggacgccgcagctgcggcttcgcggctgtggttcccggaagagttagggaggccccccagtgcgacggacgcggcctgatctctcggggtattcgtgcgtgtggctgtttgcgatgttcgacctgccggtgacgagcaaggaggcacgctgggagtacgcccagttccgcaaggcgctgctcgcggaggggtttacgatgctgcagttctcggtgtacgcccgatattgcccaacggaagaatccagcgccgggattcgcgcccggctgcgggggcggctcccggacgatgggcaggtgcggttcctgtcggtgacggaccggcagttcgggaagatggaggtctactttgggaaaaagcgcagaccaaccgaggatccgccccagcagatcatgcttttttgaacggccggaggcgtctaagtcgttccggcgcaacgagttgcggacgggatagtgtacctgagcgacgcttcgcgccggaccacggctccaaggctccaccgcccgcaacctctccagtgtacctgagcgacgcttcgcgccggaccacggcgagcgagagggcgacgtctggaaactcgtagtgtacctgagcgacgcttcgcgccggaccacggccagcccgaccaggccgaagagatccacgcagtgtacctgagcgacgcttcgcgccggaccacggccttggaaccttggggagcactggccggcgcagtgtacctgagcgacgcttcgcgccggaccacggcggtgatgcagacactttagcacacaccttgagtgtacctgagcgacgcttcgcgccggaccacggctcggggagcatcggacttggggagcatcggagtgtacctgagcgacgcttcgcgccggaccacggctggtgtcgggatgatcgaggtagcactggcagtgtacctgagcgacgcttcgcgccggaccacggcttgcagtggctgaagtccgaccagattgaagtgtacctgagcgacgcttcgcgccggaccacggcagtcgccggaggtcacggtggactttcaggagtgtacctgagcgacgcttcgcgccggaccacggcgtcgcggggcaagttgggctcggggtgcggagtgtacctgagcgacgcttcgcgccggaccacggcccgacaggcatcccttccgaagatcggtggtagtgtacctgagcgacgcttcgcgccggaccacggcgcatctccgtgtgccccacaatgtgccgcaagtgtacctgagcgacgcttcgcgccggaccacggccgcccccatctacgaccagacccgcatcgcagtgtacctgagcgacgcttcgcgccggaccacggcaacgggaaggtgaggaaggccggcagacggagtgtacctgagcgacgcttcgcgccggaccacggccttgagacaatcaacaagcactacggctcgagtgtacctgagcgacgcttcgcgccggaccacggctcagcgccgtcaccgggtactgccggagctagtgtacctgagcgacgcttcgcgccggaccacggcgcggcgatcaacgcccgccgcgaccgttggagtgtacctgagcgacgcttcgcgccggaccacggcgggcaaagggtcggacgcgccgcccctctagtgtacctgagcgacgcttcgcgccggaccacggcgtccaggcggcgctctaactgggttgtggagtgtacctgagcgacgcttcgcgccggaccacggcgacatccgcgaccggctgctgtccgacaccagtgtacctgagcgacgcttcgcgccggaccacggccgcccgtgtggatgaccggcgaggacagcaagtgtacctgagcgacgcttcgcgccggaccacggctgggattactgcggcttcggcggagtgattagtgtacctgagcgacgcttcgcgccggaccacggctgcaactggtcctcggtggtcggggcaggaagtgtacctgagcgacgcttcgcgccggaccacggcgccgcgggtcttcgcgattgccagcactcgagtgtacctgagcgacgcttcgcgccggaccacggcgacgcggacggcacggcgtctggggtgcgagtgtacctgagcgacgcttcgcgccggaccacggcgagctgcgggactggctgtcgcatggaaacagtgtacctgagcgacgcttcgcgccggaccacggctcatatgtcggctttggatgtttgcggcgtagtgtacctgagcgacgcttcgcgcaggctcacactcgcatctaccacgtcactcctgaagatgccgggccttgttctgcgtcgggggagccgccgaccgcgatgtgcgcgtgacgcggtgctttccctttcgtgctcaggacgcggttgcgtgggaggcgtgtcggtggtgcgggggggggcgtgtgtgggcgccggcggccgcggggtgtggggcggggtggcggggagggctacatctcgggggcgggttcgatgatgccgcggcactggccgaatccgatgcggcggaagccgtcgcgttcgcagtaggcggtcatgatgacctcgtcgccgtcgagaaggaaggtgcgggtctcgccggtggggagccggatcggcttgcgggacttggcggcggagtcccaggtgagttcgaggaggcagccgcgggactcgggggtggggccggagatggtgccggaggcgaggaggtcgccgggctggaggttgcagccgttgctggcgtggtgggtgaccatctggtccacggtccagtacatgtggcggaagttccccttggagaggcggatgggggggatgccctggtcgcgcatctgcttcgaggcgaggtggacctcgacggtgatgtccaggccgccgtcggggtggccgcggaggtaggggaggggctgagggtcgtcggcgtcgcgctcggggccggggacgcggaagggctcaagggcctccatggtgacgacgaagggggagacggtggtggcgaagttcttggcgaggaaggggccgaggggctggtactcccacttctggaggtcgcgggcggaccagtcgttgacgatgcacatgccgaggatgtgctcgcgggccttgtcgatggggatggggcggccgagttggttgccctgggcgatgatcaggccgagttcgagttcgtagtcgaggagtttgcaggggccgaagacgggctcgggggcgccgtcgggcatggtctggccgagggggcggcggaccggggtgcccgaggggatgagcgaggaggcgcggccgtggtaggcgatggggacgtgcctgtagttggggaggagggggttgtcggggcggaacatggagccgacgttggcggcgtggtgcttggaggcgtagaagtcggtgtagttggggaatgaccagatggggagggcgaaggtggcgccggcgatgggctcgatgagggcctcgcggaggtcggcgttgtcgcggagggtggggttgtcgtggcggaggaggttgctgatcttcgcgcggaggcgagagcggaaggcggcgtcggtggtggcgaggtagcccagggagggggcgtcgaagcactccgcgatctcggggtcgtcgccgaagaggccggcctcgtagcagccggtgaggttgaggagttggtcgccgatgggggtgacgacggcgccgaagaaggagccgtcgtcggagtcggactcctcgacgatgacggcgaaggggaggttctggatcgggaagtcggcggcggggtcgttggcggactcgatccaggacttcagggcgggatcgtgggtgtcgttgatgggcatggtgctaccagcgtaggtgtggagaggggcgtggggcggggcggggagagggtcaggcgtcgcgcgggcgggaggcccactgcattttggtgatgagggtggaccagtagctgccgcgggggttgcggacgaactgaacggcgttggggtggcggcggaagacgatgcgctcgtcggcgtagaggcgggtgtggacctgtccgtcgaggacgagggtcgtgccccccccgccccccccgccccccccgctccccccgccttctccacccctctcttggccggcgcaggcgtcgtcgttgacgcggtggaggcggacctcgatggtggaggcggcgccgacgacgacggggcggaaggagagggagtggggggcgatgggggtgatggcgaaggcggcgacgtcgggggagacgatggggccgccggcggaggcgttgtaggcggtggagcccatgggggtggagacgatcaggccgtcgcccatgacggtgggcccgatctcgccgtcgatggagagggagagggcgatcatccggaagggggggccggcggtgacgacgccgtcgttgagggcgaggccctcgaagcggggctcgtggccgtcgtcgtcgtggatgccggtggacggtgggtagacggaggcgcggatgagttcgcggttctcgagttcgagggggtcgtcgccgaagagggccgcggcctgccggcgcaacgcgggcatgtcgaactcggccatgaagccgagtttgccgaagttgacgcccaggagggggaggccgagggtgatggtgcggcgcgcctgggagaggagggtgccgtctccgccgaggacgacgatgaccgaagcgccgtgggggtcggtgatgggggcgtcggaggaggtgtcgaaggccgcggcgacctcgccgccggcggaggcgatcagggcgcggacctcgccgagggcgtcgaggacgcccggcttgaggtggttgtagaggaggaggacgcggcggggcatggggggagtctagtgtgcctcgggccgtcggatccggacccggccgggctccgcggtgacgattgcgcccgcggcaagttggctcgccggcgtgtccaggaggggcaggcaggtctccgcgtgcgccgagaaggggagttggacaaggcggatgatgccgcggtggcgccgcccctgagcgatgatgatctgcccgaagtccttgtcttcggcgatcagcacgcggccctgatcggcggcgagtcggggaacttccgcgtcgcccgggtccgatccgaggtcggagacccggagcacgtcatggcccgcgtcgcgaaggcgctgcgcgacggtgcggccgacgcagccgtcgaggagaacgggcaggcgggagcgaggctctgggcccatatgcgtgcgttctcctggagcgccggcgatccggttgtgctcagcgggctcgtcctccgagcggagcgatcagaacggaggttcaagcggccggcggcacgaagcccagggcgggctcgacccgctcgtgcgcgatcacccggcgtgcgtccgcgaggcacgcccggatgtcctcgggttcgagccattcgtgctcggcgaggatctgcgccggtgaatcatcggccgcgaggtgggcgaggacgtgctcgacggcgaggctgcggccgcggatgatcggtttgcctccgaagatctcgggggtgacgacgatccgtttgaggagttcgttctcgtcggggacgggcgtggtcatcgctggctccgccggcggggggcggagcgggcggcctcgggtgattgcagtggacctagagcgcggccggggcggcctcggcgagggccttgagcaggagcagttcggagcggatgccgccgcggttgaggatgtggaagtaggcgacgcccatgatccacgccagaaaggggaggcgggcggtgaagccttcgacgtgggtgatgcgcgtgccgccgcgggggatggggcggaacgagaaggcgaagaaactgcgggccaggggagagccggtctggatgccggcgtaggcccgcggcggggagtagcggtagcggtagcacgcggggacggggaggccggcgacgcggatgcggcagcgggcgcggcgcgtggggccggggggatcgagcatcaccatggaggcgatctcgcgcgagaagcgggggatcacctcggggtcggtggcgaggcggtagaggcgctcgcagggcgcatcgacgtcgatctgggagcggacggtgtagcggcgggaggtgcggcgtggcacttcggttcgttgcgggggctagcgggaggccgcggcgctgtgcgggagggcggcggtcaacggggcgggcttgatctcggccgcgggaggagcggcgtgggcggcggcctgccggatggcgcgggcgatgcccgcggcgtcgatgcccgcttcggcgagctgtttggagcgggagtcctggatgatccacgcgtccggcaggccgaggcggatgacgcgggaggcgtcgaggcccatctcctgcgcggcctcgaggacggcggcgccgaagccgccgatgacgccgtggtcctcgacggtgacgaccgggatgcggcgctcgagcagggcgcggatgagggagcggtcaacgggcttggcgaagcgggcgtcgtagacggcgacgcggagttcggacgcgaggtcgtcggcggcgcggagggcgtcgatggcgggggtgccgaaggcgaggacggcgacgtccggggcgtccgcgccggcctggacgtcgagcgccggggtgaggcagcgggccttgccgaggacgaagggggggcactcctggccggcgaggcggttgctgacgttgtcgcgcgggtagcggatggcggagaggccgtcgtcgtaggtgcgcatgaactccaggccggcgatcagggagggctcgtcgatggcggcgaggagcgcggcgtcggggagggtgcggaggagggcgacgtcgcagaagccgtggtgcacagcgccgtcgccgccgacgaggccggcgcggtcgaggcagaggcggacggcgaggccctgcagggagacctcctggaaggcctggtcgaaggcgcgctggaggaaggtggagtagacggccaggaaggggcggaagccggtcttggcgagccccgccatcatgtccagggcgtggctctcgcagatgccggtgtcccagacgcggtcggggaagaggggcatgaccttgtcgatgccggtgccgttgggcatggcggcggtggcggcgacgaccttcgggtcgcgggccatgatgtcggcgagggcgtcgccgaaggcggcggtgaaggagcggccgtcggtcttgagttccacgcggcacccctcgcggacgaaggggctcggggagtggaaggtctgcgagtcgctctcggcgaactcgtagcccttgcccttgatggtcttgacgtgcaggaccatggggcggtcgaagtcgcgggcctcggtgaggaactcgatgagggcggagaagtcgtggccgtcgatggggccgacggtgacgaggccgaagtgctcgaaccatccgccctcgttgatcatggccttggtggcctcgccggcgcggtggtaggcctccttaatgagggagccgccggggacgtggcgcaggacctcgccggcggacttcttcatctcggtgtagaggtgggagaggcggacgcggtcgaagtactgcgcgatggcgccctggggcttggagatgctcatcccgttgtcgttgaggacaacgaggaactggcgtttgagcgtgcccgcgccgttgaggccctccatggcgacgccgttgacgatggaggcgtcgccgatgagggtgacgacgcggcggccgttggggttggtggcggggtcgtaggcctggcggttgagcatgtcgccgcgggccatgccgacggcggtggagatgccggtgccggcgtggccgacgcggaagaggtcgtagggggactcggcgggctcggggaagccggacatgcccttgctggtgcggaggttggccagcagggggaggcggccggtgagcagcttgtgggggtagcactggtggccgacgtcgaagaggaggcggtcgcgcgagaagtcaaagacgtagtgcagggcgatggtcagctcgacgaccccgaggttgggggcgaggtggccgccggtcttggagacctgatggcagatggcgtcgcggatctcctgggcgagcacggggagttgctcgatggagagtttgcggaggtcggccggcgactggatcgattcaaggagggccatgcaggtctctcgggcgttgtttcaacgggtcttgaaaactgtacgccgcttggtccgtttcgttcggtgaacgggttggtcggattcggctcggggacgcggggccgacgatcggagtgcctggtggaagcggccgtcgcggggagcggcgcggtcagcgtgagcgcaccgccatgtaggagcagaggcgccgcagcgggtcggccgcggggccgagtggtctgatggcgtccagggccaggtcgtggagccgtcgcacctcgtcgcgcgagcgctcgacgccgtagacgccggggtaggtgagtttgccggcgtcctggtcctttcccgagcgtttgccgaggtggtcggtgctctgggtgacgtcgaggatgtcatcgacgatctggaacatgaggccgatggcctcgccgtaggcggtcagggcgtcgagcgcggcgtggtcggcgcggccggccgcggcctggccgaagagggcgcccatgcggcaggaggcccggatgagggcgccggtcttgttgcggtggatgagttcgagcctggcgccgtcgttcaggggaatccccggcgccgcctcggggaagccgccgagtgtgtcgtagacctggccggcgatcatggccgtggtgctctcggcgagttcgcggatgatcgcgctgccgagggtcgggtcggcgacctcgtcgatgatgatgcggaaggcgagggtgagcatggtgtcgccggcgaggatggccatggcctcgcttgtgtggcgatggagggtggggcggccgcggcggaggtcgtcgttgtcgaggccggggaggtcgtcgtggacgaggctgaaggcgtggatgagttcgatggcggcggcggcggggagggagatccgcgggtcggtaccgtcgcctcccgcggcggcgcaggcgtgccagaccagcagggggcggagccgcttgccggggccgaggagggagtagcggacggcgtcggcgaggttgccggggaggggagc

SEQ ID NO: 4387 - DNA, 11276 bp, synthetic construct
  misc_feature 1..11276: note = Synthetic
  source 1..11276: mol_type = other DNA
tccccaatgccgtgacgctggcgggcgacttggaggtcacgacgaagaccatctaccgcgacgtggagttcatgcgcgaccggctggggctgcccattgacttcgacaagctgcgcaacggctatttctacaccgaggaggtcagcgcgttccccacctttcagatcaccgagggcgagctgtttgcgctgattgtggcggagaaggcgctccagcagtatcgcggcacgagcttcgagaagccgctgctctccgccatccgcaagatggagcaggcgctgcccgacaccatctcgctcaacctggctgacgtggagcaaacgatctccttccgcaccaccgccgagccggtgctgaacctcggcgtcttcgacacgctcgccaaggccaccgccgcccgccgtcagctagaaatcgcctaccgcaaaccgggccagccggctccggaccgccgcgtggtggacccgtatcacctcgcgaacatcaacggcgaatggtttctcttcgcctttgaccacggacggaaggacatccgcacctttgccccggcgcgcattctggaagtgcaggagacggggaaagtctttccacgcccgcaaaagttttcgctcgaaaagcggctgcgcgacagcttcggcgtccattctgcggaaggggagttcgacgtgtgcatccggttcgaggccgcgattgcggactacatccgggagaagcgctggcatgcttcgcagcaggtcacggagctgccggacggcgggctggagctgcgcatgaagctgtccagtctcgccgaggtggagcgttgggtgctggcttgggccggccgcgccgtggcggtggctccgcgtgaattggtcgaggcggtgcgggagggcgcccgcaagctggccggacggcacgctcagtagggcaggcgcgccagccagttgccctcggtcagatgggcgcggctaggccttcacggcggtctttccccgcagccacgcgacggtcaccaccgtgagcgccgaaaccagcacgatgatcgtcgcgagggcgtggatgtccggggtgaggccgcgtttcacggaggaatagatcaggatgggcagcgtggtggagcccgggccgctggtgaagaagctcaccacgaaatcatccaggctcaatgtgaacgccagcagtccgcccgccacaatccccggcatcatcagcggaaacgtcacatgccggaatgtcagccacggcccggccccgaggtcggccgcagcctcctccagttgcgggtcacaatcctccatgcgcgcccgcaccacgatggcgatgaagggaatctgcaaggtgatgtgggccagagtcatcgtggtcatgcccagctcgaagccggcgagaaaccgtcgcaccagggcgaagaacagcagcagcgccacggccatgacaatgtccggaatgaagacgggcacgtgcaggacgtgctggaacaggcctttgcccgggaagttgtagcggctcatgccgtaggccagcgcggtgcccagcagcgttgcgaagaaggtgctggtgcaggccagttgcagggtgttcaccgccgccgccgtggcctggtggctggcgagcaggcggagataccagtcgagcgtgaacccccgccactcgacgccataccgggccgcgttgaaggaataaacaatgacgaccgcgatcggggcgtagaggaaaaggaacaccagcaatgaagtgaaaccggccatggggaagcggcggttcatggcagaccgacctccttgtggccacgggtgacgcgggtgtgcagccacacgcccaggaacatcacgagcaacgcggccacggcgatggccgagcccagcggccagtcccggctcgctccaaactgctgctgcacggcgttgcccagcaacgcgaccttcgcgccgcccagcaaatccggaatgacgaactgccccgtggctggcagcaagacgaggatgctgcctgcgatcatgccgggacggatctgcggcaggatggcgtgccagaagtttcgcagcgggctggctccgagatccgccgccgcctcggtgagcgaccagtcgagcttctccacactcgcgtagagcggcagcaccatgaacggcaggtaatcacacaccatcgccagcatcaccgccggccagccgggataaagcgcctcccccgcgcgcaagagtccggccgccgtgaacagctcggccaccacgccaccgggggcgagcagcaactgccagccgtaagtgcggatgagcagattggtccagaaggggatcaccaccagcgtcaacgctgcgcccttccaccggcgcggcagcccggcaatccagaacgccacgggcaggcccagcaggaggcaaaacaccgctgtgatcagtccgaccagcaggctgcgcaggaggattaccggctgcaccgggtcaaagcccagcgcgccctggccaagcaggcgtgcgtaattcccccaggtgaaccgccactcgatctcgcccgcgtcaccgcgctgcgcgaagctcatcgtgatcacaaacgcgagtggcaacagcaggaacagcgtcatccacagcacgctgggcccgcacagccaggcggcgcggaacgtgtgcgcccccggcggcaggggctcgccgaaatgaacggtgcgccgcagccggcggcgctggcgggtggtcttgccggtggcggatgccatgtcagctctccatcaggaagaagttggccggcggaatggaaacttccacgctgtcgcccacgaacagccccaccgagcgacgccccgtgttcagctccaccacgcgcagcagggtttgcccgacccgtatctggatgtggctttccggtccgttggagatgaaggattccacctgggccaggaagtggttgtcgccgggccgaccgccttcaagggagatgcgttccggccggatgccgatgtgcaagcgttcctgctcagccagatccacggcgctgctgggaagttcaattcggatccggcccagcggcgtgtctgattccaacagggtgccgctgcgggaataaaaccggccctcgaaggcgttgcaggtgccgatgaactccgcgacgaaccggttcttgggccggtcataaagctcgtccggcgtgcccaactgcaccacccgcccggcgttcacgatggccacgcggtcgctcatcgccatggcctcgtcctgatcgtgcgtgacgtgaatgaaggtcgtgccgaggcgctggtgaagctggcgcagttccagttgcagctccgtgcggagcttggcgtcgagcgctcccaatggctcatccagcaacagcacgtccggttcgttgacgatggcccgcgccagggcgacacgctggcgctgcccgcccgaaagctcgtgcggatgacggccggccagcggggtgatctgggtcagctccagcacggcggaggtgcggcgcacaatgtcatgggcggacagccgcttcatgcgcagcccgaaggcgacattctccgagacgctgaggtgcggaaagagcgcgtaggattgaaagaccgtgttcaccggccgcttccacgccggcaaacgcagggcgtccactccgccgatgcggaccgcgccgctatcgggaagatccagcccggcaatgatccggagcagggtggtcttgccgcagccggaaggacccagcagggaaaagaactcgccgcggcggatgctcaaactcactcccgccaacgcctcgaccgtgccgaaacgccggaccacatgctggagttccaccgccggagcgggcggggcggaaggattggaatcggcgggttgcaacggcactgtcataacgaaagccgcgcctattgatgaagcaaaatgttatctcactcggttcgccggccccgggcggacggcggcgaaccgcaggccgcgggtgctcacccgcagcgtggcaatgccgaacgtttccatcaccgcttcaaaaattgcgacgccgaataggatcacatcagcgcgcttggccgggaggccgggcagctccttgcgcgccgccagcggcagcgcccagagccggtccacatgcgcccgcacccgtgctgcggtgaagtgggtggcctcgatccgcgcgcggtcgtaatccggcagttgaagctccaggcgcgccagaatgctcgtggtgccccccgtgccgactagcgcgaggccgtctccgcgaaggggctgtaagtgcggttccaaacgcggttcgacttcgcgctgaaggaaggcgcgcaaatggcggcgcagtgcggcgagttcctccgccgccggcgggtccgcaagcggcgtggcttccagcagacggaccgtgcccagcttgaagctgtcccggaacaacgcgcggccttggtgacccagaatgaactccgtgctcccgccgccgacatccaaaatcagcagcggcgcggcgcgcaggggcacatcggtcaagacgccttgaaaagcccagtccgcctcctgttcgccgctgatgacttcgaccgcgtggccggtggcctcgcgcagtgcgcacagcagttcgtccgcgttcaccgcgtcccgcgctgcgctggtggcgatgatgcgcagggcggacgcgccttgttcccgcgccgtcttagtgaactgcgcggccgcccgggcggtgtcggcgatcgcgtcggcccgcaggcgatggtcttcgtaaaacccgcggcccagcctggtctgttcgctcccttcccacaccggttccaccgtctcgccagccacgtccgcgacgagcagcttcacggagttggtgccgatgtcgatgaccccgcagcgggtggacgaggcagcggctggcagcatgtgtgccggcgtcgcgaagtgttcggggtcaaggctcacaggactcggtgcgacagccagcgcatcacttgctctcccgccgcgcgatcacggcggcccccgtgatccccgcgtcatccccgagcttgctggcgatgatctcgacacccttggccgtgccgggcagggcgtagtccttcgctgtctcggtgatgatcgccagcatgtcatcggcgagctggtccatcacgccgccgcccaagacaatcacctcaggattcagcaggttgatgatgttggccacggcaatgccggtgtattccgccgcctcctcgacaaccttctccaccagtttgtccccgcgccgcagggccttgcgaaggtccccgctgcgcatgtcggccagctccggtcccagcatgtccgtgagcacggtcttctcgccttccttcaccgccgtctgaatccggcggaacagcgcggtgcggctggcgagcgcctcgaagcagcctttgttgccgcagccgcacttgggccccccgacttcgatcaccatgtggccgatctcgcccgccgtgcggttgaagcccgagtaaggttttccatccagcacgatgccgccgccgatgccggtgccgaggaagatgcccaccatggagcgcggcttggggtcaagctcggtctcataaacgccgacagtgcaggcgttgcaatcgttctcggcaaagaccggcaggttcaattgtttctccagcaccttcttgagcggcacatcctcccatttcaggttgggcgcgaaaatcatccggccttccacggggtccactgcccccggtgcgccgatgcccaaggccttgatgttttccattttgaggtcgcactcatccaccacctcatgcacgcaccggaccacgcgttcgagcacgccctcggggccgcgctcgggcttggtgctcatcttcaccttgcccaggcacttgagctgcgggctgaacacgccggcgaggatcttggtcccgcccaggtccacgccgatgaaatgatcgcgtttgccagatgcttcggccatgtgtgcgcaaggataggctgacagtgttatgccggccgccgggcagattgccatcccggcgggaattcctgcgattagaccagccccgccgcgcggagggccagcttggaattgttacaagtgacccctgcccgtgtgccggagggaaacacttgatttgccggaaagccgctggcaataacggaagcatgtcagccaaggattatgttctccgaggggccgtgccgatggacagcaccctcatgccaaaccacatctgggcctttgacctcggcaaggggtccgaaggtgaggcagtgcgacacggaacggatttcccgcacgtcgaatcgctgctgattccagcagagctagcacgtcgcggaccggctgccacatctggaacacccgccaacaagtatcgcgcgctgaagacccgtgaggcgcaccgtgcgcgcgagcggtggctggaaaccgtgtggacggcagcgggattcacgccgttgcacgggcggcaggtcgccaaagtgtgttcactcccggtaaaacttgatgagaacggtgagccaaagttcgacaagggacattgggcgcaagtcgctaaaggcgactaccgtctcgaaatggagttcgcgcccaagctgggaacgaagaccaaagatggcgcaccctcggatttagcgggggcggacatctgctacacctcctgtctgctccgcatcaaactgctgacgtggaaggaaagcggcccgaaggttgcggactggcaaatatacaaggcactgcgctcggctctccaaacgcgcggctacgggcgagtgccgtgggcagccaaggaatcgcaacgcgaacagcaaaccaaggaagaagaggcgaaagaaactgaaaccgcgactcgatgggctgagttcaaacaatccgtggcacccgagttccgattcccgtgctactacgacgctgccaaaatgggactgtggaatcccgccgcgcccaacgaaccgactccgcagaacagccatttggcaaacagcacacgcaacgtccgcttcgaccgggcggatgtggagtgtgagatcaagcaactggcggagaatgcggatcgcatcctggagggcaggctgtccttggcgaaggaaaagctggtccaggaattcatggaggggcggcgcaagcgggtccgcgagatcaacgaaagacgcgcgctgaaaaacctgacgctacctccggacaagcggaaacaaccccgcaaggatcccgcgttccagcgcatttctgcgagcgtcgctgatttcttttgctacggtccttcgggtgtgtcgtgcgcttcgtatgaccggagccttcaagctgacctggcactgagggccggttccgcttacgattggcagggtgcgctcggtcagaaggttccccgctttgacaaccgcatcctcaacgactgcgtgctcatccctcgtttccacgtctgcaaggtggacgtgcgcgtggcggagaaggacgatgacaaacaaggtgtcaaggcgggccaagtctttgccgactcgctgctcgcgaccgaagtcactttcctgctcaagctcaagaacgtcctcgtggctgacttggagaagggtcaacgcaaactcaaggcacacgaggttcgggccatctttgagtatgcacaccggcagcttcagtcgctcaagctcctcagccaagatgggggattggtaaagaattggccgggcaaggtcgctgattgctttgcactgacaaagtcagagtgggggaacaagaagaaggggattggtctgctcgggctgcggcctctggcaggacatgaggaggtcaaagccccaaagaccggcgggcgcagcgcctattcgcgcgcggccctgcgcatcctcaaagaactgattctctcgggtgaagcgcccagtgtgtttcatgcccggcttttgaagcgggagccggagttgctcgggcggttgggaagcagtctggccaagccgttggcgctgcatgccgattcgacggcgcaggatgccgagcaaagcaagcgggaggataccgagcaccgcaagtgcggcctcttggtttctgaactcaagttcctgctccagatgcgcaaggaggacggccagccggattcgtgggaaaacctgttcgcgccttcgcagacgcttgatgcgctcaaagggcgtcacacgactgatggcaaactggattcagaggcggcgattcgtgaactgcttggcaccatcaacgaccctattgtgcggcaccggcttggtgtgtttgccgggcggcttaaaaagctacagttcggggacgcgaaggagaacattcaggcctttggggtgcccgatgccatcgtgctagagtttgtgcgtgaggatttcatgggcgagaaagccctcgcggagttgcaggatttccaaaggcgtcgtgaggcagaccgcaaggaggcgaaggagatggctgcggcagccggagccacatcatcgctctccgctctgaagtatcagctctggaaagctcaaggcggcgagtgcctttacgggaaagaggttttcaatgagtcaggagtttcaaaggcgcaatgcctttaccgggggacagcgcttccatttaccaagctggacgactacgtgatcgaccacatcgtgccgcgcgccaagggcgggccagacgcgatggtcaattacgtgctgaccacccacgagacaaacgaagcaaagggcgaccgcacgccgtttgagtggttgcgcagcgcaccagactgggacgcctacaataagcgcgtggctgctcgcgctcatacgctccgaaacaagaaggttcagcttcttacccgcgaggacgcgccagaacttgtccagcgctacacggcgctcgcagagacggcgtgggtgtccaagctggcgcaggccatcgtcaacttgacctttggctggacgaacgcgaatgacgaggaagggcgcaagcgggtcattgtcgtgtccggcggcctgaccgcccgagtgcggaggaaatacagcttggacaagttgctctatacgaacaccaccgacccggaagttttgacgaagcaagtgaagaaccgcagcgacaagcgccaccatgccctcgacgcgatggtgctcacttacatcccgcagtgggcacgcgatccgggcaaggaaggcttcttccgttttcctgccgagttccgcgacgccaccgggcgcgaggattactcggccattcaaaggctgtttaaggacaagctagccaagacgacacctcgattcctcgcttacgaaaggtccggtctggctgacactgcttatggacgcaggactgatggcgagaaatgtgtggtggtccagcggactccgctgcgcggtctggcatacaagcaggtgaagatgaaatcggtgttcagcttggagtatgcagccacccaggtggcagcgattcgagacgggcgcattcaggccgaaatgaaacgggtgattgctgcgcaacccaacgaggcgcaatggagggccatatgtgatgccttggaaaacggcacgcactctggcttcgagggcgtccgcgttgtgaaggtcacggtcaatcgcaatgaggatccagccgagttcaaagatttgtcaaaggacggcaccggtgcgttgcgcatgagaaagaaggagcaccaaggccagtttgtgttcctcgattctaaggggcgcccgcgcgtcgaggtggttcgtgtcttcgattccctcagggatgtgaaggctagactggcgaaggagcacgctggtctgaaggaagtgggcttctttcagagtatgtgccaagtggagcttgaccagcccgtgaagcacggaaattgcaccctgctccccggaacttatctgctgaacaccatcaagcaggatggccgcgctcaattgaccagcgctgggggagacaagagtccagagatcggcctcgtgaagctgctcccggctggattccgccgcaaagcttgaatcgccgacaacctcatgagccaccacatcctccacgttttccagcatggcgcgctgctgtccaaggagcgcgggttcatcacctgcaaggcggaagaccagccggtgaagcggctcccgcacgcggacatacgggcggtcatcatcgcggcgcgcggggtcacgcttacgagtcatttcctctccgcgattctggagggggatggcatcgtgctgcattgtgacgagagttatcagccgtgcggcgtcacggctccgctggcgcgcatcgtggacacgcaggcgtttctaaaccagaccgcgcagccggcgcggctcaacgcgcggttgtggcatgagatgttgcggggcaagacggcgaatcaggcgtgggttttggcgagccggaacatccgctcggcgtatctggaggtgtcgctgaagcgggcggactttgatgagagcaactgtgcgcggcgttactggcagttgtatttcccctccatcggctggggcgggagcaagcgggagcgcaagacggactcgccgcccaaccagatgctcaactacgggtatgcggtgctggcggcgttgtgccatcgcagtctggtcatccacgggctgtcgccgttgctaggggtgcagcacaagccccgctaccgggcgcatccgctggtgtatgacctcatggagccgttccggccggcggtggacttaatgctggcggagttcatggtgtcgccggaagtgacgatgcgcgcgtggtgcaagcatgtgggcacgcaactgcgtgagacgcgcgtgcggcatgggcagtattccctcaagttgatggatgcgattgacgcgagcgcgaattcgctggcgcgaagctatgcggcgaaggatgcggatgcgttttgggtgccggagctggcggcggcctgaaccgctgagatttcaaaggtgagatttcagatttgggattggagattttagattggagattttagattggaaatgtcagggcggagaggggcttgccaagtaggtgggcttgtggtatcagacagccacacttgttgaccttggagaagcgctctcctgttgccgcgcgtctggttccccgtttggaactggaacgtgcggcgggcaagaggcggcttccgggcacctgcaagcggttgccggacgccagtgggttagccgcaggcgtcaggagacggctggtgggggccaaggagcagtccacgggcatcaaggagcggagttttggggccagaatggggttttctggagcctgaaaatgattttcaggcggccgggaacggatttcaggcgctgagaaaccgttcccgaaggcccgaaattggttcgctgtggccagtgattggctcgcgggaacccaagaacggggattcgggcacggagcctgcaaggataatccggcccggaacgtttttgtcaggacaggcaggg

SEQ ID NO: 4388 - DNA, 23210 bp, synthetic construct
  source 1..23210: mol_type = other DNA
  misc_feature 1..23210: note = Synthetic
  variation 14760..15915: note = note, n is a, c, g, or t
gcctccgcaaaacccgcgaagaaacgcctgccaaaaaaataagccccctagcccccaatgggggtaataaatggcaaatagtcagctcttcacaactcaacaaaggtgatatttttatttgtgaagcaggcgatgccattcctgctgatggtgaaattatcgaagggcttgccaccatcgacgagtcggccatcacgggcgagtcggctcctgtgattcgtgaagcaggcggggataaatcgtcggttacgggtgggacaaaagttctttccgaccaaatcaaggtcaaagtcaccacccaaccaggcgaaagttttttggacaaaatgattgcgttggtggaaggagcttcccgccaaaaaactcccaatgaaattgcgcttaccattcttttggcgggttttacgctcatcttcgtgattgtttgtgtcacgctcaaaccttttgccgactatgccaatacacccattcctatttcggccttcattgcattgtttgtttgcctgattccgaccaccatcggtggtttgctctccgccattgggattgcaggaatggatcgcgcccttcgtgccaatgtcattaccaaatcagggaaagcagtagaaacggctggcgacgtagatacgctcttattggacaaaacgggaaccatcaccatcggaaaccgtagagcaacccacttttggccgactacgggcgttaaaaaagaacaatttatcactgccgctctttattcctctcagtccgacgatacccccgaaggtaagtccattgttgagttggctagcccgcgcggcgtaccgtctctaacccccaatggagggacaaatattcccccattgggggttagggggctatttatcccctttacggcggaaacacgttgttctggtgtcaatttaccaaatgggcttcgtattcgaaaaggagcgcaggatgctattcgtcgattggtcgaacagactggtaatagttttcctgaagatacggcagccaaagtacgtgaaattgcctcaaacggaggaacgccgctggtcgtttctgaaaatgagcgggtattgggcgtcattgagctgcaagatgtcatcaaacctggcattcaagagcgttttgagcggttgcgtaaaatgggggtaaaaacggtgatggtaacgggcgataatccacttacggccaaatacatcgcaaccgtcgcgggggtggatgattttattgccgaggcaaagccagaagacaagatgaactatattcgtgccgaacaagccaatgggaaattggtagccatgatgggcgacggtaccaacgatgcgcctgcccttgctcaagccgacgtaggcgtagccatgaacagcggaacccaagcggccaaggaagcgggaaatatggtagatttggacaatgacccaacgaaacttattgaaattgtggagattggcaaacaactcttgatgacgcgcggcacgctcactactttttccatcgccaacgacgtagccaagtactttgccatcgttcctgccttgtttatgacgtccattcctgccttacaatcgcttaatatcatgcagcttactagccctcagagtgctattttatcggccgtcattttcaatgccattatcattccgatgctcattcctttggcgttgaagggagtcgcttacaaacccatcggagcgagtgccttactccgccgcaaccttctggtgtatggcatgggcggtctcatcattccttttattggcatcaaactcattgatttattggtgggtagccttgtttagctagacagtctaattccctaataatgaccatgacagctcacgatggacactttttcattgtcaactttgtaaatcaaacgatgctcactgttaatccgacgactccaataacctgcccagttacctttcaatggctcgggtttcccaatacctcgaaaagggtctcgtgttacatcaaaaatcaggtcgttaattttattgaaaatttcacggtttttatacgaccattcgacgtagtctttgtaggcaccagcgtcaaaataaatattgcgcatagattaaagcgatttagacaacctcgcaaattcatcaaaggaaaaggcgattacttcctctcctttttcaacattttgaatcgctttatcaattcgctctttagcttcttcgtccgtctcaacacgtaaaaatggagctgatggtttctctgccacttgaatggtaatctcatagttatcatttccctttagtaggtactgtaacttttctaagaggttaacagtcaattctgatgggcgtattttaatgattgtttccatgtcgaatttcttttcttcaaaattataaaataaagatgaaagcacacatcgttcccgcactctcaatgacattcgcaatgtttatgttattggtcgtcatatatcccctactcgtttggggagctgcgttggtagctcccgcccaaggccgcggtgaaacggtcgaatttaacggccgcgtggtgggctttgccaaagttgggcaaaaattcaccaacgatgcctacttctggtcgcgcccttcggcggtcgattataacgcagcggggtcgggcggctccaacaaaggcccttccaaccccgaataccttgcacaagttcaggcccgtattgatacctttttagtacacaacccttccgtcaaaaaggctgacattcctgccgaattggtcacggcttcaggtagcggactcgaccctcatttgtcgccccaagcagcctatgttcaagtagctcgtatcgccaacctaagacatctttctgaaaatcaactcaaaacgctcatccaacagcataccgatgcccccctcttcgggttgtttggccctaaaaaagtcaatattttagcgctcaatatcgcattggacaaaatgaagtaaacaaaaggggtagaatataacacttattctatcaatcaggcaattttccaaaaattaagatgaaaacgcttttaatcactttattctcagggctaccttcatgccttctttttgcccaacaaaatgactctacggcaaaaattagcataagtggctacgtagaagcctattacagctatgatttcaatcagcctactcacaatgagcgcccatcgtttgtctatagccacaaccgtcacaatgagttcaacatcaatttaggctttgtgaaagcggcttacacttcccaacaactacgggccaatgtagcgctcatggcaggtacgtactcaaacgctaatctagcagccgaacctgccgccttacgcaacatttacgaagccaatgttggagttaaactttccaaaaaccgacaactttggctcgatgcaggcgtgttttcatcgcacattggctttgaaagtgcggtttccaaagattgttgggctttaacccgcagccttatggccgacaatacgccttactacgaaactggggcaaaaattggctatacttctcccaacgaaaagtggtacctagcggggctcgtactgaatggctggcaacaaatgcgtcgtcccgacggaaatacgcggttggcagttggcactcaagtgacctataaacctacgtccaagctaactttcaattcaagtacctttgttggtagccgccccgacgacacaaaccgaaatcgtttctttcacaacttttatggcatttttcaactcaccaagcgctgggggatgattgccgatgttgatttcggaatcgaacaacgtcaaacaggagcgtcggtgtatgattcttgggctagttgggccgttatacttcgttatcaactcacaccgcatttcgcgttggcaggaagagccgaaaaatatacggataaacaaggaatcgtcattgccactgcaacccctcacggttttattacgcaaggcttttcgtgtaacctcgattacacccctttgccaaacgttgcttggcgaatggaagcccgcaaactcagcagcaaagatgctatttttgagaagcaaggtaaggctatatcacaaacgtttgcccttaccacctccctagctatttcattctaacacaaccgctatgcctcagccccccgccgaacccaacgctgaatacttccttgacctgattcgtaagtcaaaacgaggaaaatttaaagtctatattggcatgagtgctggcgtaggaaaaactttccgtatgctgcaagaagcacacacgcttttgcggcacggggtcaatgttaaaatcgggtttatcgaaacgcaccgccgcgccgaaacccacgccctgctcgcaggactaccgatggtaccccatcggacggttttttaccgtgggaaagagttggaagagatggatattcaggccattctgaacatccatcctgaggtggtgattgtggacgaactcgcgcataccaatatccacggctccaaaaatgagaagcgctggcaggatgtgcttgatattctcgacgcgggcatcaacgtcatttctgccgtcaatattcagcatttggaaagcctcaacgaagaagtatttaacattacgggcattgaggtaaaagaaaccgttcccgacagcctgctgcaacaagccaatgaagtggtaaacatcgaccttaccgccgacgagctcatcactcgcctgaaggaaggaaaaatttacgatcaatcgaaagtggagactgcccttgccaacttctttcaagccgaaaaaatcttacaactacgggagttggcgctcaaagaagtagcctcgcaagtggaacgaaaagtagaaacggagatcgttcaaaaagtggggcttcgtcccgaacgatttctggcctgtatcagttctaaccacgaaattgctcgcaaaattttacgcaaaacggcccgactagcgagttattatcaaggaaaatggtgcgttctttacgtacagaccgaccgagaagacacggacaaaattgggttggctgcccaacgacaccttatcaataactttaagttggcgaccgagctgggcggtgaggttatacgagtcaaaaacaacgatgtcgttcagggtatttttgaaatagtacaaaaacaaaacagcacgaccatttgtatcggcaaacctcacgatagcttttggaaacacataacaggctcctctctctttactaaattactacaaaaagtatccgacaaagacatcgacttaatcgttattagctaaaaggtcagacgacagtcagaccaacgatttcggtctgactatcgtctgaccttaataaaaccctctccatgaaactcaaagcaaaattacgcctagcgcttggctttttattcgtcgtcattcttctccttggcggattgggagcttggtacctgcaaaaactgtctcaagaagctcaaggtgtcctaaaagacaactacatttcactcgaatatgcccgtactatgcgtggcattattgacgaaaacagctggaaatctgaagattttcaatcatttaatcaagccctttttcaacaagaacaaaacattacagagccaggagagggcgagagtactcggcaagttcgtagtcattttaatgcgttccggactacccgagacagcactcgcattgggcttatcaataaacagctgaatacgattgtacaactcaacatgcaatccatttttcaaaaaaacgaacaggtcaaaaaaacagccgatgaaatctactcctacctagttttcatcgctacgttttgtgcgcttattgccttttcgttcattattaacttccctcggtatatttccgaacctattcaacagcttactgaaggtttacgcgagattacccgcaaaaattacgaaccgcgcctaggcgtagaacgaaacgacgaactaggcgaaatggccaaagcatttaaccaaatggcacaaaagctcgacgaatatgaacacagtagtttggcgagggtgttgtttgaaaaacgccgtaccgaaaccatcatcaaccaaatgaacgatgcgattatcgggcttgatgagcacaatcatttgttgtttatcaactccgtcgccgccaccatgcttgggcttgatgccgtccagattgtaggcaggtacgcccccgatattgccctaaaaaacgacttgcttcgtagcctcctcaacgacgaaccgacggccaagccactcaaaatctttgccaacgaacgagaaagctatttttccaaagaaacgtttgaagtcaccaacgacgaaaaacgcttggggcaggtcattgttctcaaaaacattacgccgtttcatgacctcgacctcgccaaaaccaattttatagccaccatttcccacgagcttaaaacccccatttccagtataaaaatgagcttaaaattgctcgaaaacgaccgcattggcgaacttaacgacgaacaaaaactgctcgtcactcagattcaagaagatagccaacggttgctcaaaattactggggaactgctggacctgtcgcaagtcgaaacggggaatcttcagcttaactttagaaatgtttccgcgtccgaaatcgtgactcccgccgtggaagcccttcagttttttgcttcacaaaaacaaatcgacattcaagtacagataccatcgactctgcctttggttcaagccgattcggacaaaaccacttgggtattgttaaactttctttccaacgccatccgtcacagccccgaaaaatcaatcattgaagtagaagttaaacccaactcaaaagctaattaccttgaattctcggtcaaagacttgggcaaaggcatcgaccccaaataccaacaacgggtctttgaacgctactttcaagtgccctccaacggccaaagcaaagcaggtacgggactcgggttagctatttctaaagagtttatcgaagcccaaaaaggaaacattggggtcgaaagtgaaattggtttaggcagccgcttttggtttcaattacccacggcataaacgcgccgaatagccaccagatgcgcccaaagtaccactggaaccacaaatcctggcaaccaaatgaacgttgatttgaatacccccacattgggttgagcaaaatttagctgctgaaagggcaacggagccgaaagaatcgccatgcctacaatgtttactagcaagcccaacgccaataggttccaccccaacacaacccaacgaggtcgtgtctcacgctgaagataccatgcgagtaatggtgcagtaatccccgccaaaatatcccaattataaccctcaaatgtcatcatttgcgggatttgatgttccaaaaacaagtaccaaagcgacacctctaccgctactcgaacggtatgtagccacgttaacgctttcagcggaagttggtcgagaaaatgtcgcccttgacgggttaaaaacaggaagacaatcaatgccattggcgggcctaataccgctagaaagcgaggaggtctggcatccaactgaataaaaaagggggtttgggtaagtccccaaagcacacccaaccacgccacactaaaacccaaaaaatagaaggcaatacggcgtgaaacggtacgtaacgtagcccaaagaaaccacccaaaacaaacaacgactcctccaaaagcccaagaaagcccctgagaaatgggaacaagaagaaaatcaagattaggctgcatcattcaacggttaaaatttgggcgttattacccacccaaagtaaccgtagtttttggcgacatcttaggcatattgcctctttaaaaaacgagtggtaacaattctgaagatgaatggtcaggaaagcaccgttttttccagccattttttaaattcactactccgatagcgactcaccaccacttcttctgtggtatctgcttgtcgtaatgctggcactaacgacaccgttagcttccgatttgtctcttccttcaccgcttttatggcattgatagaaaccacaaactggcggctaatggcaaaaaaacaggtataaactcccagctgttcagtaagcgctatcaaagaaccataacttgtagtatgtttgctaccgtcggctttgattaataaaatcacccctcccgaagaataaaaataggctatttctgctggctgtactaccaactggccgtggggcgtcgttattcgaatcaacgatttatgtaacgcatcaggtagcttttcgggtaatcccccctcccctttctcagtagaaaaatttgttctttgccaataaatcgttcggagtaaataaaaggcgatataagctccatttacaacaatcgcaatggtaaaacaaacagttgctccagtaaacaacagcgcaaatgtgggccaacgccccacatacacccactgtgcaagtggaaaaataaatagaaatgtaagtaaggtggcacttccattaaaaactaattggcgagcaattcgctttaatgggtggatataaaatggtagcgaggtatctaaccgccaaaacaaacggaggttaaattcccaacatgacagcatcaccgtagcaaccgtcagaaaataaggccagggaaaagaatagccttcttgccatggaaagcttttagtaaacaccacatgagaggctacgaaagcggcgataggaacaaaaattccccttgctagccagtcataccgtctcgatactgccttttcgctcacaaatcaacccttaaacggcctcgtgggtacatcatcgtggtcttcataaaccaactccatggtattacgaacagcgtccaaaatttggattaggttcaggctatccctcaatgtccaccaatcactttcttttcttccttccctcaaacaagtattgacttcttctatttcgtattggtagccccaagtcggacgatcaaaagtgaagcgctcagtcgttccatcctggtatttgaccgtaaatgccttgctttcatgccaacgaggttcaataaaaatcatgcctttttcaccataaataaccgcatcagaagtagtttcagccctaaaagtgcagcttaaaaaagcaaaactaccatcgcgataggtcaatgtcatcccagtggactcatccacttttgtttcggcaaacgtacaatgcgacgcaatttcgtaaggcatcccaaaaactaagtatgccaaaaacacaggataaataccaatgtccagcagcgctcctccgccaaggtctttgttgtaggcacgttgcgtcaaatcttggtttgcccgaaaaccaaaatccgcttttaagcccatcacttttccaatggctcccgactcaatgatttcgagcatcttatgggtccatggcaaaaagcgcgtccaaaaggcttccatcaagaaagtatctctaactcgtgacgaatccaccattgtctccacctgcaacttattcatcgcaaacggcttttcgcacagtacaggaatatttgcgcttagacaaagtagcgtatgttcgaaatgaaatacgtgcggcgacgcaatgtaaaccacatctagctcagggcaagacactatttcgtcgtagctaccataggcatatttagccccgtattcattggcaaatgtttccgcccgccctttgtcgcgcgatgcaactgccgtcagaaccgctccttcgacatgctttaaatcttgagcaaatttatgagcaatccgcccaggcccgattattccccaacgtataaccatctttcttttagtctgtttttgttaatcttttcgtatagatacgcaaaaaaaggcatttagatgcttataaaatcatattttgttcagtttttgtattgaaatatccttttaacgtaataaaatgacaggtactaggaataacgcgcttcttcagaagagatgtgggctttaatccacctaaaaaaacgggcgagaagcaaatgcccccgcccaagaatgttctcactacggtaaaaccttattgtgagtcgctttcaaaagttcgtgttgtaaacttagtatttattttttagatttccaacgcgttcctaatcttttcattttgcatcatgaaaaaagtacttggtattgacattggcgttgcttctattggctgggcttacctatcagaagctgaaaacagcactgagacctctcaaattttacaaactggcgtacgaatcgttccacttaactccgacgctaaacaaaactttaccaaaggcatttcttattcccctaatcaagtaagaagacaaaaacgtaccacccgacggaatttacaacggtaccgattgcgccgacatttactcaaaaaagtgctcgacagcaccggtatgtcacccaactctgagttgtttggactgccatctttagctctgtacgaattaagagttaaagccgtatccgagcagattagtttggctgaaattggccgcatcctctaccaccttaatcaaaaacgcggataccgaagtagccgtaaatcagatgctgctgaaaccgagcaacaaggcgattatcttcaagcgattagccatcgaaaagccattttaaaagaaaagaatcaaaccgttgggcagtattttgccgaacagctttcgctcaatactcactaccgtatcaaacaacaaatctttccccgcgaatgttacattactgagtttgatactatttggaaaacgcagcaggagttctacccaaacgtactcaccgacacattaggaaaacaacttcgcgacgaaatcatttactaccaacgacctttaaaatcccaaaaggaatcagtggctgactgtcgcttttttccaaatcataaagttgcccctaaaagctcgcctgtttttcaattattcaagttgtggcaaaacctaaacgctcttcgcatcgaacgaaaatcaggtgaggtagttgacatcacccttgaacaacgaaaacagctttttgctcgtcttaacgaaacagaccgcctttcggctacggaagttttgaaggaactgggtctaaaaccaacgcgcgatttcaaactcaattttgaaaaatttgaggaaaaccgaacccgcgcagctatcttaaaagttgcaaacgaagcccaaataaatcgccccgatttgttcacattcgacccctatgacaaccccgaccaacagcctttctatcggctttggcacttgttatattccatcgacgagcccgaacatttactggcagctcttcaaaagcccccttttctcttcaaagcggaggaggcccaacaactttccaaagtgggttttaaagcagaatttggcagcctcagtacccgtgccatccgaaaactcctgccttttttggagcaaggtatggtatattccgacgcctgcgaggccgcaggatttaatcattctgattcactcaccaaaaccgaaaacaaacagcgcaccttggccgacaccctagcgttgctcaaacctaattcgctccgtaacccaaccgttgaaaaaatcactaatcaactggtgaaccttgttaatgccatcttaacccatcctgaccttggacgacctgacgaaattagggtagaactggggcgagaactcaagcaaaatgccgaacagcgcaaccgcacctttaaaaacaataatgaacgcgaccgcgaacggcaaaaaatagaaaagcacctccaagagcacggtgttcggaaaccttcaagttctctcattgaaaaataccgattatgggaagaaactggctacctatcgctctacactggtaaccccatttcgctcagttctctcatcaatggtgaagttgatgtagaacacattattcccaaggctcgtctattcgacgattcatttgtcaacaaaaccctgtgcgaacgccatctcaatgaagccaaaggcgaccaaacggcctacgatttcatgcgcggccaaggggatgcaacctttactgcttataccgagcgaattgcactggcgtatgagcgccaaaatggcatcaataaaaccaaacgcgaacgacttcttatgaccgccgccgacattccacaagactttgtcaatcgtcaattgcgtgaaacgcagtacattgctcgcatggtaaaggacttgctgtcggaggtatgctatcaagtttatacaacaacaggaggagtcacaagccatttgcgtcatagttgggggcttgatgctgttttacaagaccttaattttgaaaaatacgaagccgctgggcgaacccgcatcgaaggaaaccgcaaagtgattgaggactggagcaaacgagatgaccatcgccaccacgcgattgacgccttggttgttgcttgtacgaagcaagcctatattcaacggctcaacctcctaaaccagcagctcacccaacgctacgaagccaaagaaagtgcgtggaagttcccgatgccttggcctcacttcgtacgcgatgctcgccaaagcattgcgcaaattttggtatcgttcaaagcaggtaaaaaggtggccacccttagccgcaacgaaaaaacagggcagattagttatgctccacgcggaccactacacgaagaaagtatctatggcagaattaaacacaatcaacaatcaaaatacgtcatcaaatacacgttagggcaaggttttgatttaaaaaaagcaggtactatcgtggataaacgtgttcgtgaattagtgcaaaaacgactagaagacttcaataacgacacagttaaagcttttaaagaacctatttggtttaacgaagcccagcaaattcctatcagagccgttcgttgttttgcccgcctcaacgaagcgccccccattgggtttgatgccgataataagcccactgcatttgttaaacttggaaacaatcaccatgtggccatttatgaagatgccaacggcaaacgttacgaacaagccgtgacgttttgggaagcagtggagcgtcgccgcgacggacagccgattatccaccccacacacgaaaacggggcgagactccttgtctccattcagcaaaatcagtattttatttttggcctcgaacctgagttgctcgaagaagccgtttcatcgcacgattggccgctcatcagtaagcatctgtaccgagttcagagtattgccgaaggggattattggtttaggcaccatctagaaactcagaatgataagtcagaaattgcgaaagccctaaagaagtatattagaatttcgagtttaagctcaatgactggtactaaagttcacttaaatcctttaggacaaatcatcaaaataggcgaatagctcctcaaaatcagaactttaaccgtttaataagtttttctaaacttggcatctttttagtgggagtagttggataactccaattactcccgttatgataaaacgtaccctctatttcagccaaccttattatttgagccgccgacttgagcagctcattatcgaagcacctgttgacaaaaacttacccaaattggtcaaacaagccgacccaattcctattgaagacatcggcctcattgtacttgatcatccccaaattaccattacccaaggattgattacgcggcttttagaacacaatgccgctatcgttcactgcgatgaccgacacctgccaactgcactcctgctcccacttgaaggtcatcacacccttgccgagcgtcaacgggtacaactagcctcttctgaaccgctccgtaaacaactttggcagcaggtagttgtggctaaaattaaaaaccaagccgctctacttcaaaaattaaacaaaccccatacctctttgctgacgtacgccaaaaacgtacgttctggcgaccccgacaattatgaagcccgggcagccgcttactactgggctcacctttttccaagtgaccttgactttcgacgcggccgcgacgagcttccccccaacaatctactcaattatggctatgctattttaagagcattggtagcccgagccattgtaggtgcaggactacttccctcccaaggtcttcaccattcaaacaaatacaatgcctacgcgcttgccgatgaccttatggagcctttccgcccttttgtcgatgccattgtccagcaaattgtggttggtaaaaagccttacgatacgcttaccaaagaacataaagcccgcctgatgatgttaccacaactggacgttcgtattcgtaccgaacgcagtcccctttttaatgctactcacacggtggcagtatcgctctttcgctgttttgaatccgaaactcgcaagcttgcccttccaagctttacggaatcggatacccccgatttggaactccaacttccacttacttaacaatgacacgcctaagccaatatcgaatcatgtgggtcatggttttttttgatttgcccgtggacacgcccgaaatgcgccacatttataccgactttcgtaaaaaattacagaaagacggttttcgtatgtttcaattctccatctatgtacggcactgtagcagtgctgaaaatgcagaggtacacattgagcgagtaaaacggtggttgcccgaaaaagggcaagtaggaatcatgaaaataaccgacaagcagttcggcatgattcaactttttcagggggtaaaacgcggaaaattaccttcgggtagccagcaactcatgcttttttgacgaaatagaacgtaaaaaacccccatcattaccaaaaactgatgggggttttcgttttttttaattctacaacaagagctaactcaatgatttactaagagttacgactacctatgttgtgctaaccaaagatacgaactatttgaaagctactcacaacnnnnnnnnnnnnnnnnnnnnnnnnnnnnnnnnnnnnnnnnnnnnnnnnnnnnnnnnnnnnnnnnnnnnnnnnnnnnnnnnnnnnnnnnnnnnnnnnnnnnnnnnnnnnnnnnnnnnnnnnnnnnnnnnnnnnnnnnnnnnnnnnnnnnnnnnnnnnnnnnnnnnnnnnnnnnnnnnnnnnnnnnnnnnnnnnnnnnnnnnnnnnnnnnnnnnnnnnnnnnnnnnnnnnnnnnnnnnnnnnnnnnnnnnnnnnnnnnnnnnnnnnnnnnnnnnnnnnnnnnnnnnnnnnnnnnnnnnnnnnnnnnnnnnnnnnnnnnnnnnnnnnnnnnnnnnnnnnnnnnnnnnnnnnnnnnnnnnnnnnnnnnnnnnnnnnnnnnnnnnnnnnnnnnnnnnnnnnnnnnnnnnnnnnnnnnnnnnnnnnnnnnnnnnnnnnnnnnnnnnnnnnnnnnnnnnnnnnnnnnnnnnnnnnnnnnnnnnnnnnnnnnnnnnnnnnnnnnnnnnnnnnnnnnnnnnnnnnnnnnnnnnnnnnnnnnnnnnnnnnnnnnnnnnnnnnnnnnnnnnnnnnnnnnnnnnnnnnnnnnnnnnnnnnnnnnnnnnnnnnnnnnnnnnnnnnnnnnnnnnnnnnnnnnnnnnnnnnnnnnnnnnnnnnnnnnnnnnnnnnnnnnnnnnnnnnnnnnnnnnnnnnnnnnnnnnnnnnnnnnnnnnnnnnnnnnnnnnnnnnnnnnnnnnnnnnnnnnnnnnnnnnnnnnnnnnnnnnnnnnnnnnnnnnnnnnnnnnnnnnnnnnnnnnnnnnnnnnnnnnnnnnnnnnnnnnnnnnnnnnnnnnnnnnnnnnnnnnnnnnnnnnnnnnnnnnnnnnnnnnnnnnnnnnnnnnnnnnnnnnnnnnnnnnnnnnnnnnnnnnnnnnnnnnnnnnnnnnnnnnnnnnnnnnnnnnnnnnnnnnnnnnnnnnnnnnnnnnnnnnnnnnnnnnnnnnnnnnnnnnnnnnnnnnnnnnnnnnnnnnnnnnnnnnnnnnnnnnnnnnnnnnnnnnnnnnnnnnnnnnnnnnnnnnnnnnnnnnnnnnnnnnnnnnnnnnnnnnnnnnnnnnnnnnnnnnnnnnnnnnnnnnnnnnnnnnnnnnnnnnnnnnnnnnnnnnnnnnnnnnnnnnnnnnnnnnnnnntacccgagttgtactaaccaaagatacgaactccgtaggacggccccgtttgaaagctactcacaacgttctacttccttatggtgagggccaaagattatgttaaccaaagatacggattccgtagtacgaccccgtttgaaagctactcacaacaaattgatttaactaggaatttttcaggcaatacttcgcttcggcgggttgtgagcaaccctttacaccaagggctaatttgccccccgccgtttcttgtacgctttggcaaacataaacagcagtacgccaaaggccaaaacgccgccaaaagcgtacaggaaattaagcgtgtcgcgcaaaaccgccaacaatgcaatacttaccaaaaagagcgtaggaagctcattgaggagcctaaattgaaaggaatcaaacggatttttgccttgttccaactgcacaatgatacgtttgcaccaaaggtgataaaccgttagtaaaatcaaaatggccaacttaacgtggaaccaacccatttgccaatagcctgggttgagcaaggtcatcgtgaggccgcacgtccaggtcaacatcatcgcggggttacaaataattttgtaggctcgccattccatgaggttaaactgcgctttaaacgcttctcgaagctcaggagtaggtttctgttcggcttctacgtgatacacaaacatccgtaccaaataaaacaaccccgcaaaccacgcaactgcccccacaatgtggaaagctttaaaataaaaaagtgccatgtatgatgctgttaccctacaataagtttctgtcctttacgaacagtattgccttttaagcggttgatttttttcaagcgactgatattgattccataacgttcggcaatggtcgaaagcgtatcgcctggctgaacgcggtggtagcgaatcttgattttcgtttttgtatccgatgccaactgcccttgtactggcgcactgacatttttggtggtttctttgaatacaaccaatcgcttgccacgcatgatgctattgccccgcaagtggttccagcgttttaagtcgtaggtatctactccataacgactggcaatttttccgagtgtttctcctcggcgcaccgtgtggtacatcttccgcgtctgacgcgtaatgatggtttctggatcttcattttcgtcgcccgccgcaaccaatccacctacttttttgatggcgccagcactatctgatatttcctccccattggccgccaataacatacgagcttggaatggcgacttagtcgccgaatcccaaatcgctagacgattttcttgaaaaaagtcaaaattatggctcggaacacggagaacgtattctttggtcgtcgcggggagttcggtgttgataacttgtggattaagtttataaaactcatccaatgaaatattgcttaacttggcaaacgtatgtaaattaacatatcccgatacttgaatcgtgtcaaaaagcatgggataatcgggggtttcggcaaaaataccgtgatcggcatggtagtgcatcaaataggtcatggccacaaattgaggcacataatgacgtgtttgtttgggcaagaaattatagattccccagaaagtacttgagcctgagcgtcgcatcgccctttttacattgcctggccctacgttataagctgccaaggccatttcccaatcgccaaaagcacggtgaaggcgtttcaaatacacacaagctgcttcggttgattttacggggtcaaaacgctcgtcgatgtagtcattttgcttcattccatattctcgacccgttgcaggcataaactgccacaacccacctgctcctgcgtacgaaataatgcgcgggtttagccccgactcaatcaatgacaaaaacttcaactcgcgcggcatatcatgtttttcaagcatctgctcgtacaacggaaagtacaagtgcatttgctctaacattcgcttcacaaagctcggcttacgatagataaaatactccacaaattgatgcgttaccttatgataacggagtggaatgatgttttccaactttgcaagacgttcgcgtacaagcgcttccgacaccgttgagtcggccattgcttctatttgaatttgttcttccactacgttggtgtcagtctctacttcttgtgcacgggcaccctcgcttgctccaagccaacacatccccgctaccaatcccatgcccacaattcgcttcaattccatcatcgttccgttgttttctcgttaggttttacatcttttttgttcgtttttcaatggctattttatcgcttatgttgagtattaggccaaagaatttgctggttctttggcgactatatattttgagaaagccagcaaatcagcttctccgaaaggttttcctagtacttgaagtcccatgggaagcccctgcgcgtcggttcctgcaggaatcgaaatggcaggatacccaatcacgtttgcttgtaccgtaaaaatatcggccaaatacatctgtaacggatcttcggttttgtctccaatcgggaaggccgttgttggcgtagttggcattactaaaaagtcatatttcttaaaaagctcatcggtctgattttttaccagacgacgtactttttgagctttggtataatacgcatcataataactcgcactgagtacaaacgtaccaagcatgatgcgtttttttacttccttaccaaaaccttcactgcgcgattttttgtagagttccatcaaatccacggggttggccgtgcggtgaccgtagcggacgccgtcaaaacgagataagttagaacttgcttctgccgtggtaagaatgtagtaggtaggtaagatgtacgaaagcagcgcaaaatctattggctctacttcatgcccttgctcacgtaaccaatcaagtttggcttgcatagcttggcgaatttcgggttgtaatgcctcgctttctacgccttctcgcaaataagccactttatgcttttgaaccgtcgtttcagccaccgcttgcgtaaaagaaggcacgggcagctgagataccgtactatcaaaatcatccgctcctgccatgatttctagcaaaagagcggcatcatcgacacttttggtgatgggccctacgcagtcaaaagacgaaccgtaggcaatcagcccccaacgcgatacgcgcccgtaggtaggttttaggccaacaagcccacaaaaagccgcaggctgacgcaccgaaccacccgtatctgagcctaatgacgccaagcacatatctgcttggactgccactgccgagccccccgacgaacctccaggaacgcgggaagtatccgcagcgttgcggacaacgccaaacgcacagctttcgttggaagaacccatcgcaaattcatcgcagttttgacggccaatgatgatggcatcttcggccaatactcgctgcacggcggtagcagtaaactgcgacacaaaaccatttaaaatggcacttcctgcttgtaatccgtgattttgatagcataggacatccttaattccgagtaccattcccgctaggcgtcctgccgttcctgccgcaattttttggtcaatttcttctgctctttgcgttgcttcttggtcatacaccgccacaaacgcattcaagactggatttttttcctctatgtttttcaaataatacgccactagctcacggcacgatacagctcccgaacggaggtctgtttgaatttcactaagagaggtataatgatagctcacaatcaatagattaccgccaacggaattggcattaaattgggattggtacaaaacaaaaatcggcagtagtccgaaggctactgctgatttttagctaaattgtcgtaaaaagcttcttttcggcgacatttccccgaaaattagcgggcagaccttagcgactttcgtcaagtcctttttcgatgttttctttcacttccttagaagcttctttgaattcacgaatgccttttcctaaccctttcatcaactcaggaattttctttgcgccaaaaagtaacaacacgataagggcgataaagatgagttcttgtccacccaagcccatgattaaaaaaattgaaagcgtattcatttttgaaaatgcggttagtgatttctctaaattgttgttttgatacattgctgcacattcaagcaatgtattgattacagtaataaaacgaaataggactgtttatttaccgttgattttcgatttttaaccctattttaaggaatcttttggcaaaattaacaactatttcgcagattatcagccaatcgtgatagtatttcgttttgactcccactcacgaaaagcatcaaggtcgtcgccaatggcattaaacaaccaaacaaccaaggcaatgtcatcggtcaaccctacaatcggtagtatatcaggaatgacatcaattggtgacaaaaaatacagcaaaaccgcgataatacgggttagcgttttccaaggtactgttttgtagtctcctttcacgtaggctttgagcaaacgtaccaataacattactttttccctgagggaatcgtaggtagcgccttttagggtgtttgttttgttcaatactttccctaaaagttcaacaaggctacccgcattgcgggcataacgccctgctttaccagtggcgcttttaaaaaatacagacttcaatacccgaactaagatattgtcagaagtggacgcggaaggcattttggtactattaattggatgttaatttatttacaccctcataaacgtaaaaatggttgaaaagatttgctaggcgcgtatcttatttccagccttctttgatacaaagctgattgatatgctcataatggtgctcgctgtgccaagcgtacagcgctgctacttcgcgcaacgggaatacccgttttgtttctgggtgaaaataggtacgttcccaatctgcatcagtcagcgagtttagtaacatcacccaacgcaagtgtacgtatttcagcaactgcaacgaccattctatgggcgcgcctttgccatcggccaactcagcccaaagtgcttcttcgtaaggcttaatcgcgggattgtcctcggtcaaagccaacttaaagcgaatgtaagcattcatgtggctatcaacaacgtggtggactgtttggcgcaccgtccagccttcgggacggtagggtgtttctagttgtgcctcattaagtacattcaccacattaaataactttgaaggcaacgcactgatttcttgaatgtgcgcttgcgtttcggccgccgaataggtttttccaaacgcaaaacggccaatggggtattttagattttccattatcttccaaaatcatcttgtacacgtacgatgtcctcttcgtccgaaggttgttcaggattggtatgttgccaaatttcggccaataccccccactcggctaatcctaccaaacgatggcgctctccttgacgcagcgtaatcaattcgccaggttggtaagtttttacttccgtttcttcgtcggtatcgctttttactactcctactgttcctgacacaactcgccaaatctctgcacgacggtggtggtattgccacgataagcgtttttcgggggcaacgaccaggattttagggcttagtttctgagtaatttgaatacttgatagttcgacggtcggaaaataagtagcagcaaactgcggcgtttggtcttcattaatgacaaaaaaacctccccacggacgggtttggtcttgtttgacgatgtcaaatccttgtgctgcaagttgagtagcaatgccctcaaatacttctaatttagtggggatgggtgtttccatgaaaatttgcttgggtaagtcgtaaaattagaaaaaatcttgtaaagtaatctccgtatttttgcccgaatgtttcaaagtcacatgtcttttcaatctctaaaagttagcctttcacccgcgaagaaaatctattttgcctctgattttcaccttggtgcccccactcatgccgatagcctcattcgcgaaaagcgcattatacggtggctagaaagtatccgtcacgatgcacaacttatctgcttggttggcgatttattcgatttttggtacgaacacaaacgcgttgtgccccgtggctttgttcggttgttgggaaaactcggggaactgacagatgcaggcatccagattatcgcattccctggcaatcacgacatgtggatgaccgactattttgaaaaagaattaaacatcaaaacctaccgccgcccgcttgacttactggttgaaaccacacctaatgcgcccattcggtcgtttcacgtagcgcacggcgacgggcttggcccaggcgaccatttttataaactcctgcgcattgtttttgaaagtaagctggcgagttgggcttttggcaaccttttacatcctaaccttgcactttggctggggcaatcgtgggcgttgcacagttggcgtaaacacgaaaaagaagggcagccctcgtattggggtgaagacaaagagtggcttgttttgtatgcgaaggaacaagaaaaactacaccatcacgatttttacgtttttggccaccgacacatcaagctcgacctacccatcaatcagtacagtcgaaccctcattttgggagattggattgtgtataattcttacgctgtttttgacggccaagcagtgcagctcgtcgattatgacgaacctcaaaaagcgtaattaattgtctttcttcaaaatatcttggcgagagatattttcgcgcggggcttgtttaagaatgtctcggtattctttctttttcaagtcaccgtttttgactgacttaataaagcttgcccaagcaaagggatttaagaaaggcagggtgtttgagaaacttcggttggcggcattatcacgaccaaaaatttgttggtccataaaacttcggtagttagatgcggcgctcatcggtgtggcggctgccatttgcatcaagagctcttggcgcgtatttcgttcgaggttttcgcgttcaaattcgtcaggcaatttcattgcgataaacgcttttttaaagtcttcttccgttgcatacggatagaccttcacttcagccaacgtttttatgtcttctttcatcaaaatgatggccgaatacgattcttccatgtggcgttttggaaccacgtggtattgtttttggtagcccagataactaaacaccacactatccccaggaaatacgggcaa

SEQ ID NO: 4389 - DNA, 23153 bp, synthetic construct
  source 1..23153: mol_type = other DNA
  misc_feature 1..23153: note = Synthetic
ttgtttaagctcccacacccgccgggcgctttgtttcaggcgttgcggggtgagcgttttgccgtattgggcttgtatgtaagcaatcgtatcgtacggtaaatctttgccgataagcggcatatccgccccggcttggtaggcttccagtacggcttgcggggtgccgttggcgcgtttggcaccttccatatccaagctgtcggtggctattacgccctcaaaacctaactccccgcgtaaaaggtctgttaaaatgcggcgggaaaaagtggcggggtgttctttatccaaggccggataaataacatgggaggacataatgccccaaatgcctgcatctatggcggcgcggaacggcgcaatatgctgttccattaattctttaagcggcaaatccgtcaccggggagccggtgtgggagtctaccgccgtatccccatggccggggaagtgtttggcaaacgcggccacctgccgggcctgcaagccctttacggacgcttgcgcgttttgcgccacgccttgcggccacgccccaaaagagcgcgtgccgataatggggttattggggttggtgtttacgtccaaatccggcgcaaagttgatttgcccgcccagggcgcgtatttcgtccgccgccgccccgtaaacggcccgcaccgttttttggctttgccccgcccccaaaagcatattggacggcaggcgcttcatacctaaaaataagggggaaatgacggagccggactcgtaatcaaacgcaattaaaagggggatttggtggcgggagtctttttcccattggcgcagttggcggatggtttgcacggtttgggcgcgtttggcggccgggtcttcctgcccggtcagcccgcctttaatcagcaccgtgccgataaggccgctttttacggcttgttcataaggggcctgttggccggcatctatgcgtaccaccagggtttggccgattagttcttcgggcgttaaatcgtctacttgaaggggccctgccgctagggccggggccaaaaacaaagccattaaaaagccgcgtattttcataaaaaacctccttatatgcggttattgtagcaaaaaaatgcattttggcgcgtagttatagaatagggccttgaattgtaatgcaaaagtagtaaactgtaaaaaaggggggagtaaatgcacaaaaccaaacctatgttggcggtagtagccgccgttttatgggccgggccggggttcgcccagttgcaagatacttggcattttggcgtaaaaccgacggaaaacatcaccacgctggaagtaaaccccacgctgacggtgattgataataaagagggtatttccatcagcggggtgacgttgaaaagctaccgggtgattgacgaaaattttaactggggggcggaattgccgctgctgcgttttgaaacgccgggccattccgtcaacgggataggcgatattagtttatccgccaccggggtacataaactgcatagcggtatagacgtgggggccaaattggaaaccatgctccccaccgccaccaaagaggccctgggcaccgggaaatgggtgattagtccgtccgtttttgcggtcattaatttgccttaccagttttacatacacggggagtataaacattatgtaagtgtagcgggggacggcgggcgcagtacggttaattacggccgcccgcgcctgacggtggggtatacctcgccggcccagtggtatgttttaaccacgctttattattatgtggattttgaaaacgatttacagcatgaatttgcaccggaagcggaaattggcactttggtaaacgaaggcaccgctttttacgccaatgtgagtacacacgcgggcggcaactggaaacaaaaggattggggggtgagcattggtttcaaattactgtatttataaaatttttttcctatacgagggaaagagggggaggtaccccatgggaatgtaccgcacgtgaaacgggaggcttgtttttggaagcctcccgttttgttgttttcagtacgcaaaagaacgcttatatttggcggcgcatggccataaacagttggtcaaaagtaatggcaatatcgtacgctttttggcggatgagcgacccgtcggcaccttttaccagggtatcggtgatgggtataggcagcgtaagcggtttatccaaaaatacataatgaacaggggcttcgccgtctgtatcttgagtgagccgcaggcccgcaagccatttacgcataatttcttccgggtgttcggtaaatgcctgttgggcgaacggttccaactgctcttttaatagggcggtatcggacgcctctttgggggttaaagaaagctggcccaatattttggaaacaaataaaatgccttccccggggtaagacaccgcaaaatacggtaaaatttcccggtcgccgtcttgccggaagacataacagttttcgtatcgttcttgctcggtgggggtttcaagcgttcggatagatatttctttttggctggtcataaatacttcctccccaaaacgggcccgggtttaagagagccaaacatacgccataataaaaaaggcccgtttcctttattatagtacaaaaataggattgataagcacatccggcaggtgctaaaatggattagttaatttggtacaatataaataaaaaggagttttggaaatatgaacaaatcttttacagttttaacagccggtattttattgggtgcgtgcggtacttctaccgcgcccgcgccggagccagaaacgcaagtagtggaatctttcaccccgggaacgccggtgccgcctaaagccggaatgcaggtggaagaagtaagcgccgccccggaacaggcctctgaatataccaaatacgaaggcaccctcccggcggcagatgcggcgggcataaaaaccacgcttattttgtttgaaaacggccgctttgcgttggacgaaacgtacatcgggcgtgacgcttcttttacccaggtgggcacttatacgcgccaaggggatattattacgttgcaagcggaagaagacaccccgcgctactatcagttgggctccgacaccgccaccttgctggaccaggataaaaagcccgtgcaaggggaactggcgccgtattacaccttaaaaaaagtaaacgaataacccaaacacacgccggaaaacaggattgtatgagaaaaaccacgggtgaatgcccgtggttttttgcggccgtaggagtttgccaataagcaagttccctgtttgctctatgggttgttttccaaatacggcgttaaggtttttttgtggttgacgcctaattcttccaaatgcgccgccgctttgataatgccttggttgccccttaatgctttgtcggcctcggtataggctttatcgaccgcggtgagggcggtttttacgccgtccatacgctctacaaagcggcttacgcgggcgtgcatatccgccccggtttttaggatttcttccaacattttgctggtgcgttccacccgccaaagctgttccaccacctgcataacggaaaacagattagacggcgtgacaatagccacttttttagatttggcatacgcgtttaagtctttatccgcctttaatgcggcaaagtaggcgtattctatggggatgaacataaacacgaactccaaaccgtttttgaacagtttggcttggtaatctttggcggaaagttcgtcaatatgtttgcggatggcagagaggtgctgtttcaaaaattgcgtgcagtggaaaacttgctaaaaacgcgcggctaccgcgtggccgtaaacagcccttttgcgggcgcgatgaccaccacggtaaacatccgctatacggcactgatgatagagattaataaaaagttgtatctgccggaaacggaaatttttgcccccggctccaccggggaaaagcaacccttgctccccggtgcgcaagccttgcgcgaaaccctgcaagaagtggtggaaattttattagaagatactttggaataaatttgtgcatccgcaggcggcaaacgcggccccggggtgaggtatatttatccgtaaataaacgcgcatttattcattgttataaaagtgaaaaaaatatacaataaaacgaaggtatgtatttacctttataccaatactgaggtgaaatgtatgaaaaaaatcgtattgttgatgatggcttgcgcttttatggccgcctgcatgggtacccgcggtaccgtcggtgggaaaaaagtttgcaccaacagctatttgttgggcgtgttgtctatcagcgaattagtgtccccctgcggcaaataaataattctattgcaaaaaaagtgccctggtgcaacgccagggtgcttttcttgtaatttatgtataaggactggactatgaaaaggtttttttgtatcgtgtgcgtgtgtttcctcctggccgcttgccaagccgacaggcccgggccggatttgagcagtgcgcaagcggctacccaaacgcttaccgattattttttggcaaatccgcaagttgaaaaaattttcccttatttatcccaatgcaaattggcgcctgccgccccgcaagcgccccaacaaaaccaggctgttgccgctacttatatgtgttccgtggagccgaacgatacccaacgctatattgccgtagtgtcggcggacccgaatttaatgggcgaagtggatatttataaaaatcacgcgaaagacgctgtttatatagcacttttggattacgacaaaaaggccaaccgtctaacggggttcaaactgttattcaacatccacaccaagcgcgtagaaaaacaaaccgaagtgaccgtggagccttaacatccgcttgccttgccgcccccgctccaccacccgccttgtggaaaaacagcctgccgtggcggcggagccttaattccccgcgtgccggcggtatcggtttttatacagaaaacagccccgcaaacgcggggctttcatattttcctgctaaatctctaaaatgtatacgacaacaggttgtctttcttaattactataatgtttgagaggggggacattatgaaacgcgaactcaatgtctataattttatcagcggaattggtgaatacgacgattggtcttattgtgcggatgaggctatgtggtatgaagataaaaaagaagtccttccgttgccaaaaaacaaatctgaaatcgtaaaagatttaacctgcaaaataaaagtagattcattcataacatgtggcgaagcgtgaaataatgcggaacaagaaaaagatttagaaacttatgcccagtacctactgggaacgaataacgcggatgattgtgttagttctgtcgtttgcttgcgaaccgctcaacaagaatgttctttttgttttagccaatacgggatttgggagttggaagaatttgctgataaagtaaagaaccaatcatttgctacccaataacaatggagtgggtgtaaattaattgcgtggtccgggccgcatggatgcacgcggttggttatccacttttataatgagggcgacgtctacccggcaacgcaactggatataacggttgatagagaagaattagtatccaaattaaaagcggttgtagaaatatggaaagataccgtgcgtaaagaaatcttcaaacaaatgaaaattttaagcaaacatactattcatcccgatttggatgctgcaattacgcattttttcccaaaactggttaagaacagcggtaagttgttttagaacagtaataatttattttcctgctataaactccaaaaaatcttacaaatacccaaaatttaggccaaattacttgcgcgtggttgttttttgtgcaaatggtgtatggttgcactataattttcattatttgcttacaaccttggtgccgcggggaatgttcaactctggcattttgccgttagccccaaagaaatatgttataaatataattatatttacagatttggggtgaaatttttatgacagaatcggataatattaaaacaatagaagcatttttgggggacaagaagaatatacaaattcctgattatcaaagagggtatcgttggactaaaacccaaatagaaaaattacttacagatattcaacattttggaactgcgggctatccccttcaacatattaccattaaagaggaaggggaaaattatataattcttgacggccaacaaagacttacaacgatttgtttaatattggatatgtataaagaagacgctgctttttctgacagaataaaacccaaaggtaaagatacatgggacgggcttgatgcggattttatttcaaatgcaagagacattatagaagcgtggaggaaagacaataacaattttaatatagagtggttagaaaaggcaaccattcgcgtgtataaagtgggatcagatttggattccccaacaaaacaaattgagtttttcagtaaaataaattcaaataatattccgttgacaaacagtgaaatgattaaggctcttttcgtgcaaaaattaaaagataaacacgaccaaagacaaaagattttaagagaatgggatgatatagaaaatcagttgcaaaacgataacttttgggcttttatttctaacgatatttataaagcagataccagaattgattttctgtttgatttgattaaaaataaatatggcaaagagcctaaaaatacacagtatggattgtttttagtgtacgaagaccatttacaaaaacaaaaaaccgacgacaaaaaaattaaatcaatttcagatatttggcaaaatgtcaaagaaatattcagccttttgcaaaagctgtataacgataaaacctgttatcatctcttcggttatttgatgtatgatgacctaaatgaggggagaaaatttttatccaaaccgcataaagacaaagaacaggaactgaaagatataataaaaaagaaatgggaaaatgcttctgaaggattggaagagctaaagtacgagaataaaactaaattaaaaataaaaaagatattattgttatttaatgtcgtcagttccgacataacagaagaaaagaattatagattttctttttatgattttaagaggctagggtttgatatagagcatattcatgcaagaaatacaaaaatcccttttgaggcacaatatgcaaaaaaatggtataaagaaaacccaaaagaagggatagacctgaaaaatccggatttaagcgggcgagtagccgctactatagcatatttagaagaatttaataaatataatactacggaagaaaacaaacaagtaggtgctgaggagaaaaccacggtagaaaataagaaactaattgaggaggtaaagaatgcgataaaagatttggaaccttatacgaaattagaaaaggccaaagacaacgaaacaaaaataaaacaaattgtagataaaatttctcaagagttggaaacggttgatgatgatgatttcggcaatttatgcttacttgatgccgcaacaaacagaggttatgggaatagttatttcattaaaaaacaaaaaaccataatggatgaagatttgaacggaaagtttttccctatttgcactaagcgggtatttttgaattattatacgcagaagttaaaggataaaatatggggtaaagaacacaaagaagaatatgcaaaagcattgaaggagtgcttaaatgcttattttgatataccccaacaagaccataaagacgaggataaataaaatggaaacatccaaaacatttagagccgtaattcaaaagtataaaattgaaatccccgaaatccaaagagattacgcccaaggacgcggctacggtgcagaatggaaccgggcaaacaacaaggagcgaatacccggaaaggaagaaaagataattgataaattcctgaacgatattgagaaaatagacccaaaagagggaaatttggattttaactttatttacggggttgtaaaaaatgacaaatttattcccgttgacggtcagcagagattaacgctactttttcttctttattggtatgcacaatataaattattggatttgaaaggattatcagaaaaattgaaaaattttacttatcagttaaggagcagtgcaaaagaattttttgaaaagataacgagtgaaacaataagcgattcttctggtaagaatttaagcaaaaaaataaaaaataacagttggtttttataccaatggttgcaggacccgactataaaatccgttctcgccgttttagataaaatagatgaaaagtttaaggatgataaggaacttgttaataaattggataaaattacttttttatttcaagaaatacaagaagccgaccacgaggatatttatattaaacttaattcccgcggtaaaccgcttgatgaatttgaaaattttaaggcgcaattaatcgggttaatattaaaagcaaagcaagattttgatgtgaaaaattttgaaagatggacgggtgtttttgaaaaattattttctgataaagagaaatacaccaatgacgaattggaagttttaataaaaaataccgataatgcttatttgaattttttgctccgtgctttttatgttgagcatataaaaaataacggaacaaaaaacttagttgaatattctgcagaactgcttgccaatgttgaaaaagcagatttaccggttttaggggctattaccgatacattgacattcttgaataattccgaaaacgagcccttgaattttctaaaagattttagtggtaaaaatgacgaaaatattcctacattagataaacttttacatatagcagttattttgaaaagccctaaagataataaagagaatatggcagatttttatgattttttcaaaaaaatgatagcaaataccgaatggaaatttgaaaattttattaacgcggtaaaatctatttataaattaagtgaagaattgcaacaacaagtaaataagaatatttacgcatatttacggttaaggcaagaaaaaaccttaaacggtttttatgaagagcagtataaagaagaagtgttaaaggccaacacttcgggtgatttgagagtatggataaaagaggccgaaaaatatgactatttagatggtcaattagcctctttattggtgtttagcaaaataaatattacgaattatgatttgcctgctgatgctaaggaaattgatttggataaatttaaaaaatatttccagttattaaagaccgttttggaaatagagggaaatgacacccgggaatttcttttagcgcgggctttgctgtgtttcggacgatacgataataaaaattatgaggacaattacctgctaagatatcgggggtgcaaatcctttcttgtccgcaataaagaaagagacattagttggaaaacccttctcagccaacgcgccaaagaaaagcgtaaatatgtaaaagatttattagacaaattattggagaaaaaagttattttatcggataaagaatctgtcaaacaagccttaaaagagattatcaaggatgcccttaacaaaggggcgctttactggtgtaaatattttataaaagacgatacttctatccgtgaaacgggtggtaatcgtcttattaaaataattggaaatggtattaaattaaatgggttaaagaaaagggattttaaagttttacccttttaacaagcatttctagttcatctttgctatcaactgaccgcacctgctgcaacctaaatatttttgggggtacggaaaggggaactttatcttaaattttatatacaatgtggtacaatagaaaatatcagcacttgataacgcaatatatagcaaattaagttaaaggcttcagaaacaattaatagtatttttggattatggtggaaaatatgacaaaaaaagtatttgcttttgatttgggaagtggtagcttgggggagtgtgttcgtgagggggataaaataacttatcttcattcactattattagatgctgattttgcatcaattaaaaatcaaagaatacaacggcggggttatcgtacccgcctggcacaccaggcccgggagagatggtggcaaaaaattgctcaagcagtcggcttggaagtcttggccacccaacaacccacttttgataatccaactctgaagccggatgaacgtatgttgcgtgaatttgcccaacccggagatgaaactttatatacttcttgcctccttcgtatggctcttatccaagggaaacctctggcatcttggcaagtgtacaaggcggtgtggtctgctctgcaacatcgcggttatgatactaacttgccttggaagagtgatatcgtgcgaattcagaaaaagctaaatgctggcgaaccattgaccgcgcgcgaacaaaaaatatgggaagatgaaaagcaggatatgtcttcggcatctttgtacttaaaagcaatttctgattggccggaaggatatcggcttccctgttattacgaggcttataaattaggattatggacaccgcaaaatccgaaacattttcaacaaaaagtaggtgtgtatccacttgccgcgcggaacaaagagggaacggaaatggtggtggctccacgtaatttagttgaaaaagaattacttcttttacttgcccaagcggccaaacaatatccagccttgaatggaaaggaaaaatttattatttatggcccagctgagcaaccgtatgcttcggtgaaaaatcgggaacaatttggcgaatatcgcggcaaagagtgggaatggcagggagtgttggcgcagaaaacccctcgttttgataaccgggcgttaatggcgtgccgtttgataccccgcttccatgtatgcaaggccgatactcctatcgcacaagaaacacttttggtgctgaaccttaaaaatatgcgctttacgctaggcttggatactcgtgcggcgctcacggcggaacaattaaaacgtatttaccgtgaatatgtgggcaatttgaaaaaaacaggaaataattccctcggtaagcgagaatgggcgaaagtagtgcgtgaatgtggtggagttgttaacgaaaaccaggcggaagtagcgatgccttctaaaagtgggcgttgtcgtttttcgcgcccggcacttaaattactaaaagaattgattttatccgggaaaaatccgcatgatttttatagagagaaaaccgatacattaacaaatgtagaccctaaaaaaggactggtgaaggaggattttaatttcctgttagccatgccaaacgattgggataaaattcatgttgcagactgccgcgaagaagataaggcgctaactcttgcggaacgagcagaggaaattacggccattttgggtaatatcacccatccaatcgtgcggcataggttgcacttcttatggcaagaattagagcgattacagaaacaatacggcacgcccgacgaagtagtattagaagtagttagagatgattttttgtcagatgaacagaaaaaagagtttgaacgccaacaaaagaaaaatcaaaaaattaatgctgcgttggcccaagagtacggtgaaaaaaatgtgcttaaaatgagattatttcaagagcaaaacggtgttgatttatacgatacgtccgaaaataatcacttgcgctccacagatttagaccaatatgatgttgaccatattgttccgcgggcacaaggcggcgcggatagttatgtaaataaagtgcttaccaagcgtgcgttaaatgaggctaaagggaaaaaaactccttacgaatggttaggaaaggataccgctatatggagtgcgtttttatccaatataaaacaagcctgccgcaaaggaggattaagtgatgataagattgaactattgacggcccctgacgcggccgagttggaaaaatctcgtagggacttacacgcaacggcctatttggaaaagctggctcaacgcatcgttgccttacattttggatgggggctaaatacaaaggatgataataggcgtatctttgtagctacgggcgggcaaactgcgtatgtgcgtcgggtatttcacttggataggttgcttcatcaatcgtcaaccaaagaagaattccggcaaatgattgccaatcaagagttaaataagaaaaatagagccaacaagcggcaccatgcgttggatgcgttggtgctaagtctcatccgggatatccgctacaatgtgaaagatgaccgcctggaaacccccatctatttcaatgcgccattttgcgataaggcattgcgtcaggtttatccggaagaagtaaaaaccgtcaaacccaagttgcgcgaaacgatgtatggcttacgcgagcgtattacaaatggtaaaaaagagtattttatcgttacgcgttttaattcactggtagccaatttccaaaaaataagcgatgctaaaaaaatgattccttatgtgtttgacccggatttaaggcaacaattagaaaccaaatttaaggagccggggttaacggaagaatcttggcaagaatggttagatacctggtctgaacatgggcgaaaaatccgcaaaatgacaaaggttgaatccgggccgtttacggagaaagacattttaattaaaaatggcagaaggcagattggttgtttctatgaattaggaaagatgaaagggcaattcctgactaataaagagcaacataaaggacaaattgtatatagagattcaaaaggcaaatggtgcgtgaatcctgtatacttatgggaaagtctgccaaaaaaattggccgaagccaaaaaagaatacggaaaggttttgttttttaggtccggccaattagtagaagtacaagagaatgtcggcaaggttcaaaaaggcgtatatagactaagaagcattcaaactaagggtcaaatgaccatagaatccttggatactcaaattttagaacatccaatgattggtaaaatgctggacgaagggaaaatgcgtctttttaagacatccaaggggtaatttgtgtctacacatcttgtgcatattttgcagcataacagttttctgcaccatgaccgcggatgtatggtgttggatagtccggaaagctcccatcggttgcccatagcggatatactgggggtagttattgcggcgcggggcgtgagcattagcggctctttgttgtctttgctacttagccacggagcctttgttctgcattgtgacgaaaaataccgtccgctaggcaaaacaattccgttatctcatgtaatacaaacggacttatttgaacggcaaattttactgtttccttcatcggcacacgctttgtggaataaaattattgaagctaaaataagtaatcaggccgcggtattagataaaataggcgtgtcgcatcaattaagtgcttatttgccgccttatttacccgatgagggaaatgcggcgcgccagtattggaagtattatttcaaacaatttggtcgtctggctccggatacgagggaacggcaaggggccaaagaccctgtcaacagtatgcttaattatggttatgcggtattgagtgcggttttacaccgaagtatttgtgggcatggtcttaacccatcactgggtatccatcataaatatcgcttccgtagtcaaccactggtatatgacttgtttgagccgtggcgccccctggtagattgttgtttgttgcactaccggtgttcccacaagaaacgtgaattaacggagtgggttaaatttgctgcacaagattttatgcgtttgcgtgttcaattggctgatggacggaaagttaagctgtttgtagcaatagactactatgtgcaatctttttgccacgcccttgtagagcaatgccccaaacgattttttgtgcctcatataagggactttatccttgaaaaagagtaaatatactatgggctggctgttggtgttatttgatttgcctacggatacaaaggcgcaacggagggaggcggcgcgttttcgcaatgccttgcttgatgaggggtacttaatgttgcaatattcggtttatgcgcgatgtgcggttagcatagaaacaaaaaaagcgcatttagtacgcttaaagaaaatagcccctgacacgggcaacgtccaatgtatatttattacggatgttcaatggggaaaaacagttaccatcaggcatcccaacaaccaaaccaaacggcaattggatactaaaaccgctttacatgaacaactgcaattttggtaaaaaattgggtggttagcctgatgtgtgaactaaattcacagagaaccgacctccacccgttagttaagacggaacagtaaaatttatatagtcattttactttagtttgtgtctgttgtcaaattgtcaatttgtactgtttgtcacaatagaatcctattataacaaatcctattttactgtcccttcaaaacacttaattatttatggtttaggtgagaatgaattataacaaatcctattttactgtcccttcaaaacgtctgtcgtttgcaaattctttgcgtatttattataacaaatcctattttactgtcccttcaaaacattggaaggcagtgccaattctcacaaattattataacaaatcctattttactgtcccttcaaaactgaagcggcttcgtaaaaatctaagtgaacattataacaaatcctattttactgtcccttcaaaaccattgggtcatctatttcataaaccatattattataacaaatcctattttactgtcccttcaaaacaaccgggccagtcttgcaacgttctaaaacaattataacaaatcctattttactgtcccttcaaaacacatttgcgctttattcgccaagcacgccggattataacaaatcctattttactgtcccttcaaaactatcaacacctacaaccgaaaaccgccacgattataacaaatcctattttactgtcccttcaaaacgttcgttttttgtcggtcattttctatatcattataacaaatcctattttactgtcccttcaaaaccgtatcgtcaaggtactttttaactttcggaattataacaaatcctattttactgtcccttcaaaacgtctcctagttaatattccagaataattgcaattataacaaatcctattttactgtcccttcaaaacagtttgttgaggcggacccgacgacccgcattataacaaatcctattttactgtcccttcaaaaccaatttatcaaattaaaatggagacaattagattataacaaatcctattttactgtcccttcaaaaccggcaagccaacttttcttaccagcctggaattataacaaatcctattttactgtcccttcaaaactcatagccgatttgtgccaaggccaataccattataacaaatcctattttactgtcccttcaaaacgtactggcaagcataagtgcatggaagcgggccgccggaaaagtttttttccatgagacttaaaacatatttcggtgatgttttataacttcgattgtattggagcaatatgaatactcctccaaaaaacagtgttactaacatacatattattacatattgtttcttcaggtcttcaattccccatcttgagataaactttctaatagacattataacacgttttcaaacgattcctccgcgtgactcgatagccttgctcgtttatacaattctcttatcatttctttgtctttacttataacgatgtcatttgtcatgtaatggccgtacttattatagggaaagtggtacttgtagttaaaaccacaaggtataaacattttggctacttagctttatagtccggtaaccaaggtgaaggtaagggaaatatgactgcataagcaagacaggttattgaaaagaatatcgccgagattaaaaagaagaggccgcacgtgcgaggccccccatgcgaggtttatagccgcgtggtgggctatttgtgccccgctataagctgtttctatgttaaaaaagcactggaattattccgtttgcgccgggggtaaaaccttttataaattttacactttttcaattaaaaaaatattataattttacgataaaggataattatgaatacgcataacactcaaaatcattcttccgttccctctgctaaaaaggtgggggcagaaaataacccacttcaagccggtcagggggcggtgccgcaatcagccgcacaatcaggcgcgcaaacaggcgcccaatcagccgcgcaggcggccccggcgcaaagcacaacggccccggcgcaaggtatggcggcggcgcaatcggccgcgccggccccgcaggacgtgacggcctctgtaaataccaaccaacagcaagtgccgccgaatccgtttgtcgttccggcgcctgccgttcccacgcaggaaggccccctgggcatccgttatgattttaacgacggcgcgcgcgtactgctccccaagggcaaatggcacgttcaaattgaagacgacgaaacagacaacattatttttgcctgtgatgccgacgaaggctgggtactcagcaccaaaaaatattatattccgttccgcatccgcgtgtgggtgcgtggggaaaaggagcccgtcttaaaccacacgttggacctgaccggcaaagaggtccaaatcaaatttcccgttggcacgctgggggatattgtgggttggctgacgtatgcggacagattccagcaaaagcataaatgcgcggcggaaataaccatggcgcacaacctggcggaaatttttgaggggcagtaccccaatttatttttcacgcatttgctgggcaaaatccgttttgaaaaaccctacgccagttatatgttggggttgtttttcaaagggaacgacacccaccaacccatagatttccgcaaggtgggcctgcaccgcaccgcaggttatattttgggtgtggacccgcgcgaagaagcccccaaggtaaagttaggtagccagcgcaaaattaaagagcgttatgtatgtattgccaccaaatccagttcccaggccaaattttggaacaacggctacgggtgggaacaagtggttgcctacttaaaagagttgggctaccgtgtaatttgtatagataaagagcccgtcaccgggttcaaatacacttggaaccgtatgccgcacgaggcggaagattttaccgggaacaagcccctgcaggagcgcatagcgcttttggaacacgcggacttttttatcgggttgtcgtccggcttaacgtggctggcgtggtgtacgcacattccgatagttttaattagcggctttaccttgccgatatgcgagttttacacgccgtaccgcgtgttcaactcccacggttgtaatggttgttgggatgatataaattgcaactttgaccattatgattatttttggtgtcctaaattcaaaaatacggaccgccaatacgaatgcacccgcctaataacgggcaaacaagtaattgggcatattaaacaattaatgaaagattgccatttaaccgcccccaaaaacgaatccgaggagaaataaaatatgagtaaacgttattcccccccagaagaaaacattgattccggtgcttacattcaggcattggagcaggagtattgttccagttgcagtgcggcggtggtaagctcttgcattgtctcccgcggttttggagagcggctggtatcgcgtatttataacggtgggcgccgggcggtgtatacggccacggtggcggccatgctggctaacaatatggccctgccggcgtatggggccggaacgtatgtaagcgcggggaaaacggtgacaggagccactattacctcgggtaattcccaaattatttattcggccggcgtggcagattctactactatctatggcggcctacaagtggtttcctccggcgggctggcaactaataccacaatgtataaggacggttggcagtttgtgtcctccggcggcgtggcgagcaataccactatcaatccggggggccagcgggtgtccgccggcggtgtggcaaatactaccattatcaactccggcggtgctcaacatctgcaatccggcggtgtggcaaatgctaccaccatcaattcccgtggttggcagaatgtggaaggaggcggcttggccaatggtaccaccatcaactcccttggttggctgaacgtggcaagcggcggcgtggcaagcaataccactatcaactccgtcgggcatctgggggtgtcctccggtggcgtggcaaatgaaactactatccactccggcggtagccagaatgtgtatgtcggcggggtggtaagtgacaccactatccatgatggaggattgcagtttgtgcacgccggcgggaaaacatataatgtgaggcaacattccggcgggaaaatgtttgtaatcgtttctggcggggatggggaaacctatgtgtcaggtaccaatgcaagaggggaagccttcagtttacaaaacggcaaggcaagtaattttatcctttactccggcggttctcaacatgtgaagtccggcggggtggcaagtgctaccactatccatggcggagctcagtatctgtcctccggcggcatggcaagtgctaccattatcagctctggcggttggcagaatgtgtcgtccggcggtgttgcaagtgataccactatcaacgagggcggtctgcaggaggtgtcctccggcggtgtggcgagtgctaccactatccatgagggcggttcgcaaaatgtgtcttacagcgcggtggcaagtgataccattgttgcgggcggtacacagaatgtgtctgctggtgggaaagcttataatgtggagcaacattccggcggaaatgtgaatgtgactattcggggaggggatacatcaacctatgtgtctggcactaacgcaagcggggaagcctttactttacaaaacggcgtggcaagcaattttatcctttatgccggcggtttgcagaatgtattctccggcggtgtggcgaatgatacccttgttgcgggcggggtgcagaatgtgtactccagtggcgtggcgagtaataccacgctgaacagcggggcggttaatctttatgagggtggcctgataagcggcctgaatgccacaggcggggacttaaatgtgtatggcaacaacaccttgcaaggcaatattaaccttgcggatgcccaagtaaacatcaaccatacaaccgggatgaataccctgggtatagaaaacctgtccgccaataacgcggtgtttaatatgaatgtggacttagaaacccaaaccgccgataaactgaacattacggatagttatagcgggaatgccaacctgaaactaaccaatgtggcccccaccgcccaagcaaccaccggcgatggtataaaactggtggaatttgccgacactgccactgtaaacggtacgtttgacttattaggcggcaaatgggatgagggcggttatgtgtacaaattggcacaaggtaccgaggccggaaccgggcaggattactacttgcgcaacacccaagaactgacggatacgtttaagaccatgttaaacgtaccgataatgaatgttgttatcgcccaaaccgggatgaactccctacaaaaacggttgggggatttgcgcgccatggataatacgcaggccaagcaaggcgtatgggtgcgcagttattacaaggatatgacggtggatgatttaatcaaaacggaggccaatttgtttggtgccgaggccggatatgactggttgtttagggccgaggaacccaccaaattgtatgccggggtgttggttgggtttgtgtccacacgcaatatcaaaaccaaaaagagcgacggtgtgtacgataaaggggacggcgaagccccgggcgtgggtgtgtatgcaaccttactgaacgaaaacggctggtttgtggatttggcggcgcgaaacttctggagtaagttggatatgaagaaccactcctccaccggaacggaactggcatataagcccaaccggaatgtggttgcggccagtgtggaagtaggaaagagcataaatagcgaactggcccgcaataagttcatccgcatagagccgaaattagaaattggttatatgcacgcctcggcggaaaatgcttccgtaggggataccggtaatgatattaggtataatgcggctaattacgtcaatgccaaagcgggtgtgctgttggcctacaacgccgtgcgggataacggcctgctgatagagccgttgttggaattggcctaccgctatgagtttgccggtaaggatgaccttgcttatgccggcgcggcggaaaagagcgacctttccggcggcacgctggaagtgaacgcagggcttgatatgcaacttaccaaaaacttgtattggtacggcttgggcagttatgaggccggcaatatagtaaaaggttggggcgtacacgcgggcatccgctatgcgtttggcggcacgcaagattcttccgccgcgcaaacccctgccaatgcggcccaaaagggtcaagtggtaaaaaaagcgggcgaaccccaaaaaaagaacggtaaggaaacggactcccctaataaggcgttgaaagagggggcaggtggccgaagccccgcaagccaaaagtgactattcctttatgaaagaaatggaacgccactggcaagaagaaaaaaaataacccatataaacaacccgtcggaaactccggcgggttgtttttgttgtgtttttgaaaccaccggctatgccggggaattgttattattgtgttggtaccattgaaccaaatttttatagcgtaaataaagttatatcgtcattattttagtgttgtaagctcttcaacttttccccaaaaattagaacaaataataagcaggggatgtactcatacggtgcggatggcttgcctctaagatgcgtttaagtattccggctatgcgtttctatgtaatcatacagtgcggatggcctgcctctaagaagtgcaatttgtaccgctgtttttaatcttcgtgctttttggcatacattctatatatattgattaaaacatttattttatataataattttatattatatgcttttaatatttacattatatttttaggcttattgaagattaaattttgtttttcatcaaaagtaaacggcttcccgtgtactaccagatgagaaaatattttctgaataaaaagctgtataggccccgatattaattaggtacattaaataatcaggcaaaatttgccaaaaattaacagcttttttgatagctacaaaatatattataataaatatgagaatacgttttcaggagtgttttattatttgtatacgccacattgtggcgtatgaatgggaaaggaacttatgaatacctccgccaagagtttccacaagccctttcccacaatttaagggaaaaagggcttttttatggaaatagctgttattattccgtctaaaaatggcataacccatttgaaagagtgtttgccaacggttgttaaagccgcccgcaaagctccttttcccgtgcatattaccgtagtagatgataattccacagataaaacaatggaaatactgtcccctctgtttccggaagttgtttttctgcgcaattctaaaaaaggggcttcttctgcccgcaactggggcgtaaaaaatactccttgtgattggatttgttttctagacaatgacgtctttttagacgaacattttttcaatacagtacaaaaatacctaaaacaggatgttttttgcgtcgcctgcgctggctataccgcatatcccaaagtttcgggagcattagagcaaaatgatggcattaaattgctggagtggaagcgaggttttttgcgatttacgggtaatatttataataaggaacttccgttgcaaccggagtatctgtcttggggtgtccagggggcctatttcttttgtaatcgtaataaatttgatagattgtgtggatttgatgaaatatttggaccgtatatgctggaagaaactgatatggtttaccgcggtttgaagcgagggtggaaaattgtttatgcgcccgacacaaaaccccttcataaatgcggtggaacgattgatagtaaaaaaaataaatatacgcaatttctttctaaacgaaacagagtattatttgtttggaaaaatattacttcaaaatctctttttattagtcacattttctggttattattgcgtccaaatttcaaggtattaaagagcgtttggaagtttttaccggacatccggaaccgaagagcaatagaaattaaagaacaaatgcttacagataaagaattgctgaaacaatcaaaatattttaggcaaaagtgtatgtcggcgatgctacaaaaaacattaaagggggaaatatgaaaattattgttcaagcaggtggaaaaggaactcgattggaaggattaacacacaataagcctaaatgtttggtgcctgttaataatttgcccattctcttttatgcttttcagaaattcaaagatgcggattttacaattatcgcagattataaaacagatgttttggaaaaatatttggcagcatttgccaatcagtacaaatttaacattgtaaaagccaccaaaaaaggcacggcttccggcattaaagaggccatagcgcccctgcttgatgatgagccttttatgattctttggtgcgatttgatactgtctgacggatttgaaattcctacggaaacggggaattatattggtatttctaaagattttgaatgccgttggtcttatgtagaaaatcaatttattaaaaccccttcaaaagagaacggcgtggcaggcttgtttgtttttgaaaataaaaaagtattgcagaatgttcccgaagaaggcgcttttg

SEQ ID NO: 4390 - DNA, 18366 bp, synthetic construct
  misc_feature 1..18366: note = Synthetic
  source 1..18366: mol_type = other DNA
gagcggcggggcgtatagcctgttgccccaggctatcggacagaagctggacttgtacgtcaccggcgcgctggacgaacctgcgcaggaatggtgccgcgagggccgcattaactgcgtggccctgggtcattacaattccgaaaaaccgggcgttttggctttaatggaactggtgtccaaacgctttgacgtacagactgaatttatcgatgtggctaacccgctttaagcggccgccggaggataaaatggaaaaagaattatttaagaaaattgacacctataaacaaacggtgatagatttgcaaaccaatatgattgcctgcccggccgtctctccgcaccagggcggcaaaggcgaaaacgccaaagccgcttatttgctttccgttcttaaaaaaatgaaatttgacgaagtgtacgtcatcaacatcaaagattccaaagcccaggacggcgtgcgccccaatatcgtggccaaatactacggcgaaaacaaacagaaaactctgtgggtgatggcccatatggatgtggtgccccccggcgacctggcgctgtggaaaaccgacccttttaaagccgtcgtcaaaggcgacaaaatttacggccgcggctccgaagacaaccagcagggcctcgtgtccggcttgctggccgtgaaggccatgatggactgcaacgttcgcccgccgtgcacctatgcccttctgctgaacgccgacgaagaaatcggcagcacgtacggcattgacgccattcttaaaaaacacggcaaaacgttcggcaagaacgacgctttcttagtgcccgacggcggaaacccggaagggacgatggtggaaatcgccgagaagaatatgctgtgggtcaaattcaccgtttccggccgccagacgcacgcgtccaccccgcactccggcaacaacgcccaccgcgcttcggcgcacctggtggtgaaactgggcgatttgtacaagaaatttaacaagaaagacaaactgttcgcgccggaaagcaccagcacatttgagccgaccaaacgcgaagccaatgtgcccaacgtcaacaccattccgggcacggacgtgttttacctggactgccgcgtcctgccctgctacaaaaatgcggacgtgctggcggagattgcaaaaatcgccaagagcattgaaaaacaatttaaagtaaaagtgaaagtggaaacgcccattaacgaaaattccaaaccgacggataaaaacgccgccgtcgtcaaactgacgcaggccgccgtaaaagccgtgtacaaaaacgcgccgcgcccgatgggcgtgggcgggggcaccgtgggggcatatctgcgcaaccagggctatccggcggtggtgtattccaagttagacgatatggcgcaccagcccaacgagtattccagcattaaaaatacgctgggcgacgcaaaggtgtttgctcttatcgcgctgaactttaagtagaggtgtttatgaggaaaggttttacggtaacggaaatcttgattacggtggtggtgtttgcgctgctgttggggtttaccgtgccgaaatttctcacgctggtgcataaagcccaagagggaagcaccaagcataaactagtaaaagtgcgcagcgccattgccgcttattacggcgagcaccagggcacctatccgacggacgacctgacgagcctcgtgcccgcgtatattgaaaaaattccgcaggccaccgtgccgggctatccgccctcttcgcacgtgtccaccggcaattttgaacagtgctttaccaaaaccggcggctgggcgtacgtgagcgatccgtccgacccgcgctacggcgacttctttgtcaattccgacaaagaagacagctacggcaagccctggcaaacgcactagattttctcccccgctggattgggcgggggatttttacgtccgcaggacgaactggatacaggagttttatggataattcttttattcttcttttcgccaccgttttggggctgttgttcggcagttttttaaacgtgtgcatttaccgtattccgcgcgagaaatcaatcgtatggccgccgtcttcctgcccgaattgcaacgcgcgtatcagctggtacgacaatatcccggtgctgagctttttggtgcttcgcggcaaatgccgaaactgcaaaagccccatttccatccagtatccgattgtggaactgcttaccggcgcgctgacgcttttgtttgtgtggcgttacgggctgagcgtatggacgtttgtggtgttggcggcggtgtatgcgctgattattctgtccgtcattgatttggatattatgattatcccggaccgtttctcgctggggatgattgtgctcggcctggcgtttgcctggtgcaacccgaacttttcgggcgcgtggtggcagaaggagctggcgtctttgctgggcgcgggcgtgggcctgtttggcgtgctggcgattgcgcttttagggacgtggttgtttaagaaggaagccatgggcggaggagacgtcaagctgatgggcggcatcggcgcgctgattggctgggaaggcgtgattacgacgattgtatttgcgtcttttttagggttggtgtatgccgtgttcctgatgatttttaaaggcaaaaaaggcggcgacgcgattcctttcggtccgtttttaagcttgggcgcgctgattaacctgttttatttggttaagccgtccatgctggtgattgaactgtaaacgccggatttaataataacagtacagaggcaaagagatttctctttgcctctttttgcgtcctggagccatctgtaagcaacgtacccattcactcccccgacggctaatttcgtttgtaaaatgaggggcgtccgccggttacgggagaaaagcgccatggttgtgcagcgtggattggtgcgtctgccgtgtatgcggggctgtaaccctgtagtcaggacataaaaaaccgggaaccgcgtacagcagaggttcccggtgtctttgccgtgatgaattttattttttggctttaagcagcactaaatggtcggccagttttttaaacgctttggcgcggtggctgattttgtttttctctttctccgtcagctccgccagtgtttttttggtgttttccaccagaaacagcgggtcgtagccaaagccgttttcgcctctgtatccaaagccgatgtatccgtccagcgtgccgtcaaaggtctggacgcgcccctgcggggtggccagacacgccacggtgcgaaagcttgccgcgcgcgcgggcagaagctgcccttccagggcggcgagcagtttgcggttgttgtcgtccgcgtccgcgtgttctccggcgtaacgcgccgtatgaacgccgggcgcgccgtgcagaaatttcacttccagccccgtatcgtcggacacggcgggcagtccgctttcgcgcgccgcgtaaacggctttaatttccgcattgtcttccagcgtgctgcccgtttccggcggcagcaccaggccgttaaaatcagccaggctgacgtactcaatcggcgtgccgttttttagcttggcgggcagcatatttgtcagttcttttagcttatgcgggttgcccgtggcgattaaaattttcatgctatttggttactttcagctgggctacttgttttaccaaattcaaagccacctgatacgctttaaacatatcttcttcgctgagccattcggtaaacgcgtgcggattgttctggcccgtgaatacggtgtagccgccgaatccgtgtttggccataatcatggccgaagtggtgccggcgcgttcttttttgatgttaggcgttacgccggcttcctgcatggcggcttttaagaggcccagcgcttcgggcttaacgccgtattccacgttttcatactgtttgataacctgtatttcaatagctacgtccagctctttgctgatgctgtcggctttttcttggattctctgcaagtagcgtttgccttcgttttggtcaaagtagcgcaggcggaaatccacgctgtgggtgttttcggccgcattgtattcaatgtgatgcggttccaaatagccttgttcgccgcggctgttgttgggcagattttcggacaaagcggcggtggcaatcaaatcgccgatgggtttggcggagttgcggtagccgttttcggccgcataggactggtgtccgtttacgccgcgggcggtaaccaccacgcggtcggccgagaagttggccgccaccacttcgccttccacgccgccgtcaaagtcgtaggcgtagtcggggtggtagtattccagttccaggcgttcggcgctgcggcccacgtcttcgttgggggtaataaccacctggatggggccgtgcggcattttcggattttcggccagcgtctgcagcagcgtaaccacaatggttacgccggctttgtcgtccgcgcccaggttggtggtgccgtcggaagttacgatggttttgccaatcatattgcgcaggtagggatcgctttgaaaatcaatgacgtggttgtttttaagcataatcggctgtccgtcgtaattcttaattacctgcggcttgacgttgttgccgatgatatcaggcgtcgtgtcgtagtgtgcgctgatgcccagcacgggggctttgcggtttttaaggttggacggaatgtttacatagatgtatttatcttcggaaaaatgggtagggaaaccgaacgcccggatgtcttcgtataaggcctgggccattttttcctggccgggggtcatccactcggcggcgttatcgctcatgctgtcaatctgcacgtatttgacaaagcgcggtatcataccggcacggtatttttcagccagtttggcttggggtgccggggtggaagattttaaatacgtgcgctcataaggggcggaaagggaaaagctggaagcataagcttggcccgcgaacgaagcgccgaatacgaaaacagacaagacggctaacaactgtttcatttgcatagtggctcctttgggtacggctgttggtttttattattgtagtaatctgccgcaaaaacccgcaagggccaaaagacctagaagggcccagactaaaagaaacccaaaaataccgcgtagacggccagataacggcccagtttgctgacggtaaccagcgttagaaatacgtccagccgcacgcccagcgtgccggcggcgagggtgagcggatcgcctataaaaggcacccaggccagcagcagggaccaaacgccgtatttttggaaaaacgtttcggccctggcaaactgtttgtccgtcaccgggaaccatttgcgtccgcgaaaacgcgccagatatctgcccagccaccagttgataaccgaacccagcacattgcccgccgtagccgccgccagcagtaaaacgggggaatactttttgacgccgaggagccaaaataaaatccattccgattgcgagggaatgaccgtagccgccgccagcgcggccaaaaacaacaaagacagcgccgaaagcaggctcacgggcgggccccggtaccaggcagtttaagtgcggcgcgccagagagcctttttctcttcgtaggagcgcgaagcgtgcgccgggctggtggagggaagggtaatgcaggttttgccggcaggctccccaaacgcgcgtttaaagtgcgtccgcgccgcctggccgttgaacaaaagcgtgcggatggcgggaaaacgtttgaaaagggacggaaaatcgttggggtgggggcgggtgatgctgccgtccagactgcccttgcgttcacaggactccagcgcgtcccataaaccaatgtgatgaatgagcagcgtgtttaatttgtcccggtaactttcgggcgtgcgcccgccggccagcaaatcaaacatcagccgccaaaactggttgtgtttgtaggcgtagtattccccggccttcagcgaggcgccgccgggcatgctgcccacaattaaaatgcgcgtatgttcgtcggcgcagggcggaaaactgtgtatcatgaaaggctctccgggccacaggcgggcggcgttacgggttttggcggaaatactcttccaaaatattcgccgcacagcggactttttccgggcacggacgcgctttataatagtccggcgtgcggggttcgggagatggatcctgcgggccggcgggcagcgccagcagttcgcggcagatgatggagccgttttcgtccttgaagcgtttggccagttcctgcacgcgggcgtacagcctggccttggcttcgtggtcggacggggtttcggaagcgtatttaagccccaaggccataaacatcgcgctgaccgcgccgcatacttcgcgcaggcggccgatgcctccgccgaaacaggcgcttacgcgcagggcggttttatcgtccaggcccaggtctttgctaaacgccaaaaatacggcttgggcgcagttgtgccccgcaagaaacagctgtttggcctgctcgcctttggaaagggtgctgtccataaataacgcctccggctaaaaaatatatatttgttccagcgcggtgttcgtgtgttacggctgtttgctgtacggcgcaatcacgaacgaatggccgtcttcggccagtgttacccggcaccacagcggcgtacccgaagggccctggataaaaatggatacttccacaaagtccgccggcggaatcgtttccgtaatcaggtggtatccttggtagtcggggtttctccagccgcgtaccgttactactaccgggatgcgtccgttttcaaaactatttcgggccgcataagaggcgggttcaaccgagttggtcgcgagattgatttgtttgacgtccaaatctttcatcatatcttgtgtgaccggcatcgtgcccatactgcccatccgcattaacctgcccaaatcattggcgttctggcccgcgtcttccgggcgcagaccgttttggagcatattgcgaagcgcatcgccgtccagccccatcccgcggtagagataaatcttgttggtgggaacgggcggtgcgggaagtatgtctgtaaatccgtccagcgttaagccggttaaatcgggcacggtaatggaatgggggagtgttttcggccagccgttgggaggacgtaccccgcgcagctccaccacgcggcgcagcgccttgtgcagggacagcccgttgacgcgttgttcgtatttgacgaccgcgcccggaaacttttgtgcggcgcgcgctttaagagaagacggcgcggcaagcggcgccgccgcgggcatatgcgccgcagcggcgggcagaatggccggatatttgctccaggccgccggtatggcggcggcttcgcgggccgcatttttgcccagcgcctgcgggagttttgtcacgcctttttgaagagtctgcgcctgggcggcaacaaaactgacggttaagaaaagcccggccgtccaaacggccgcgtatttgcgtaaggtcatagagcgctcctaaaaaagtatatcaaaccaatatggcaaaaacacaggccgaagacctgtgtttcccatcaattgccgacggaattatacggcgtaattttaaatccgtcttccgccggttcaattttacaccacgcgggcttgccgtttacttccaacagcgcaatcacttcgtggatttgctcggcgggaatatcgtgtgctacggtaacgatggcgccgcgttccacagattctttgacggacaccattacaacgaggccgtttccggcatggcgccaggcgtagtgcagggcgctgtcgggagaatcggtcaggttgatgacgcgctcgcgcgcgacggcttttaaggcggccattccgcccgcgctggcataggcgaggcggcggtcgttgctgttgcggccgacatctttaattaacaggccgttttccaaaatgttgcgcagggaggcgccgtccgccgccaggcccaggccgcggtacatataatgcggatggcggacaaacggcaggcggggaaccaagccgtctttgtagcgcagggctttaaaatccggtgcggtgaatgcgttttcggtcagcagggccggccggcgcggacgttgaaggggtttggctccccagctgcgcagattttcaaccgcggttttagacgaaatccctaccgtagtttgcaggctgtagagcagttttttatggctatttacaaaccgggcgacggtggtgttttccggcagcgcagccggcgcgggtatggcggcggccggtgtggccgtcggcgtaactgccggtttgacggccgcggaaacgggcttgaccgcggcggaagccaccatgctgcgctgggcctgcaggagcgcattcatcgtttgaggggaagttttgcttaaatggccgatgccgctcatccctttgcttacgccggaaagaacggctttgccggattgggcagaaagattcgtcccgcacaggggcaatacaaaaagagtaagaagaaatacaagttttttccaatttttcatatgataatattatatttaaaatatcttcggaaaaaacagggtcaaaggacctattttttgttgggtccgggcccggggactttggcggtatggcgcgggaggagcgtgaaatggacgaaacatttgtgtattatgaaagcccggtagggcggctggcgctggccggcgacggggaatgcgtcacgcgggtgggattttgccccgccccgtggacgaaaaaaatgccgcagggcgaaacgccgcttttagcgcgcgcccgccgccagctggaagagtattttgcgggtacaagaaaaacctttgatttgccgctccgccccgccgggacgccgtttcgcttgcgggtgtggcgcgcgcttttgaatatcgggtatggtgaaacttgcagttacggggaactggcaaaagccgtgggaaacggaaaagcttcgcgcgccgtaggcggcgccaatcacgccaatcccatcgttattattattccgtgccaccgggtaatcggcgcgaacggcacgctgacgggatacggcggagggctggataaaaaaacgtttttactggagctggaaaagaaacatatccggccgtgaatataaaaaatccgcttttaaaagcgggttttttagtccgaggccgttatttaaaaagtcccggccagggcggccgggaagttctacacagggagtctccccggtttggcgtccgggaagcggacaacaggtgtccacccatataacccaaaaaaacgccgttttattgcaccggttttgctatgataaaactatcagcaggaagaaaggagagatatatggcaaagaatgtatgggttgtttttgcagcggccgggttgctggccgtatccgcctgcggccgcgcgccgcaggatgaaaatgcggacggtgtggaagtggccgaagtaacggaaacggtaacgcttccgacggatatgcacaacgccgcgaattcgctggattataaaggggtttacgaagggctgctgcctgcggctgacgggcccgggattcagaccacgctgacgcttgcgccggacggaacgtttgtttggcgttccgaatacttggacgaacaggacggcgtatttgtggaccgggggacgtatacgctcaccgggaatgtggccgcgctggaagtgccgggcgagggcgtgcgctacgtcaaggtggaagaagggcgtctgcgcctgctggatcaggataaaaatgtgattaccggttcactggcggatatgtacgtgctggaaaagacgcagaaataaaccgtttgtttgatgcaaatctgtttaaaaggccgggaggaattcttcccccggcttttaatttgctcaataaagaattaaatgtataatgaaataaacttcctttgttttctcttcccgcatacaaatatgacttagaggtatttttatgagcacattaaaagaaaatcaatttccttatcgtttgggcgtggatttaggcacctcctctgttggagtagccatatatagaataaatgacaaaggtgatattattgctttagagcatttggacagctatattttcggagaaccggtagcccctaaggaaatggtaacgctcaatactgctcgccgcgcggcccggttaatccgccgccaggtggaacgcaaggcagcccgtttgcgtaaaatcgggtatattgcccaatccttggggatttcaaagcccgcgttagacgcggataaagaggatgttatttggctgcgcgcccgtgccgtagaggaagaaatttcccttccgcaactgataaaagttttttgtcatatggttaagaaccgcgggtataaagggagtattgctgaaaaaacggtgggtacaaaattaaaacatacggaagggcttttgcaagacggcaagaccttggggcaattgttgtgggaggagaagcaaaaagctttgaaaggacagccctggcgtaaaatagaagaggacggcacttttatctaccgccggatggtggaagaagaatttgaacgcatttggcgggaacaaagtaaatatcatcctgagttaaatggaatgtatcaggtttggggaaataatatgttcccggattatcctaagcaggctgaaatttcgctgcatgacgcttttcactcggctttgttctaccagcatcctattaaatgggagctggaaaccgtgggtgcttgcccgttgttcccggaagagaagcgcgcttcgtgcgctcagatggcttatcaaagctatcggctggctaaagagatagccaacttgcgtatttacgaaaagggcggcaaagaaccgtttcgcctgaccctggctcagcagacccaactgtttaactatatagagtctaatactcaggcatatagtcaggaatccggcgtggtgtcatttcaccgcatatataattttttaggtttgccggacaatgcctcgtttacggttgaccgcggcagtaaaaaagggctgaaaggaaatactactttatttgcttttgaaaaggctggtttgctcaacgagtgggcgaatttatccgataaagaacaggaactggtaatagagtttttatcaaatattaccaatatgtccgatgtagcggaaaacgaggacgcgtatatccgggaacgctttggcaaactgacggctaatatcattgctttggatagtgaaaagcaagccggggcagaatttgttgtggcaaataaaagtaaattgagccgtttggtgttagagcaagggcgcggttcttacagtgttaaggggttgcgctggctcgcggaggaggcccggcagggtcatttggacgactccagcgaagaggaatatgtagcggcccgtgtggctaaaaataaagtatatacaggcaaattgcgtacggtggccgccattaaggaacaagaatccattaccgacccggtaatgagccgcgcattggcggagtttcaccgggtgatgacgtatattactcataaatatggcaatccgcaagaaatagtggtggagctttcccgcgagataaaaaattctttgcgccggcggcagtttttggaaaggcaaaacgagctgcaagcccaggagcgtacaaaagctattgccgaattacaaaaagggggcgtattggtaagcccgcgcaatatagataaatatttgctgtgggaggaacaaaaccatatgtgtccctacagcggccagcttatttcttttactcaggcgtttgatgaaaaacaaacgcaggtggatcatattattccccgggcgggagacattgccggccccaatacattggaaaataaagtactggcgtttacgcaggaaaataaggataaaaccaatcgcttgccgtatgaatggaaatttaaagaagacattgacgcttatctggcatttaatcaagagaaaaaagccaaaaagaaaaaaggcgaatactctactgcaccgtttggcaataacagcccacttattaattttgtacagcatttatggggcctgtatagtaaagagaaaaaaggctattattccgccagagaacgtaaatttaagcccacgcagaaaggtgcgcgtattttgcgcaaaatcaataatttgctggctactccggcgcaggttaaagcagagttcgtaaaccgccaaaaccaggaaacggcttggattggcaaaattgtactaggatggtgtaaggatatttgtcctaaagtgaccccgtcttttggcgcgctgacggcgtatctgcgcgggcagcttcagtttgaccggattttgccgcttatccgattgggcgaaaagaagccgctgtttgataaagacgaccgggaaattgacgcgaaaaagtgggaagaattgtttgccgtgccccatttggcttatgagcaggccgacgctttggcggctgattttaataagtattgcgacggactggcagatgaaaggaagcctatgacgtcttcggacaaacaaaaagcgttttatgaattttgtgcgagtcagcgcgtgctgttccaatttaataaacgctgcgattatcgtcaccatgcggtggatgcggctgtgattggcttatgtggtatggctttggtacagcgggcagcggtgcataacagaaaatatggcacattgcataagattgagtggcgtaacgctgacgggacgcgggataaatccaaagatatcgccgggtttacggtggacagcctgccgttgtatgctgcattgaaagacgaagtgaagaaacgtcttactaattacgtagtatggcataagccggaccatttcccgagcgggaggttttttgatgagacggcgtatagcattcagaaaaaagacggtgaagaccgttttgtgaaacgcgctggtttggaaagttttattaaatccgatgcccaaaaaacgattgcaaacctggaaaaattgttgttttcggatacgataaaagaggccattctaacccagtttaaagaacggcttgccaaaggtcttacgcaagaagaggctctttgcggcaaaaaagatgacccgcaagacgggatttattatcggggaaataaagtaaaaaaagcgaaatatatgtatgctacaagcggtattcgtaaatttgatgataacgcagacaagaagattgttacatatgaccgtaacggacgacaacatcaaaaaggataccaaaactatggctatgcctgtatggattttgatgcggaaacaggtaagccggttgctcttgtgccattatggaaatatcaacagcagaagcaggtcgtgccatccgggacggtgcgaatttttgccggagatatcctttttgataaaacaaataaacagttttataaagtacagaaatttagtgctaaaaaaggattaatgttatgtttgacaacggaaaagccgcagaaaaatgatttaaatataacaaccgttaaacatcttaaaaattatagtgtggtatcaacccgtaaagacatcgctaaattcaaaagcgaatgagtatacagcatttaattagcattgacagggaagccaaactgtctgtggacaccgggcggcttaaaattgtgttttcccaggtgggagaaacccattttattgccgcctgcgacattgccgtgttgattttggcgcatccctgcatcagtatgtcgttggctgtgtcgcaggaattggccaaaaacggggctgtcctcgtaacggcgggggaaaagtatttgcccgccgctttgagtttgcccgttgctacaaatatagatggcgcgcgccgaccccatttacaggttaaaccaggtagtgttgaggcggcaggtaattggtgggcccagctgatagaaagtaaaattttagggcaggctgcaatggccgctaattttgacgaaaccctttctacccgtttaaaactaattgccggtcatgtggagccgggagataaaaccggccgggaagcgcaggcggcgcagctttattgggcggggttttttgatgggttaaataatcccgttgattttcgggataagctgggcgctacagacccggtcaatgtttcactaaattatggctatgcggtattgcgggccattatcgcccggagcttggcggctgccgggctttgtttgaattttggggtgggacactgccgcaaagacaatccttttaatttggcggatgattttatagaaccgtttcgttttttagtggataacgcggtgtggcggatttttaaaggttcgcaagtagaatgttttgataaagagattaaaaagcagttgctgtcttctttgttggcaagcaccgtaaacattgcagggaaggaataccgcttattccacggtattgattttgcggtaaatagcttttgcttaagtttagaagattcccgccgcaggctgctgcttcctaatcagcgggtccggcctggtaaaacgccgtcggcgatgttatggcaggccgtgcaatttcaagatgaaacccaatagttggcgcattatgtgggtcgtggctgtttttgatttgccgacacatactaaaatccagcgtaagcggtacgcgggatttaggaaactgttgcttcataatgggtttagtatgatgcagttttctgtatatgtgcgcaatatgcctaccatgcagcaagcgcaggcgataattaaacagctgggaccgcagactccgccgcagggaaaatgtgcttttatgttgattaccgataaacaatacggcttaacaaaaaacttttatgggccggctatgcgtcaagaaaaaattcctaagaaatatgagcaattgattttatttgatgagtgataaataaaacccgctttgtaattattacaaagcgggttttaaaacgaatagaagtgagaatgtattagattctcttttgtgggctttaatgcccttgttacctaagttgaggcacaaataagagtaaggtttctgaaattattgtagcaaaaatacttattttttagcaactttttatagtcagacaaatcttaccttactcttcggtgcctaataggaacaaagcgttcgccacctctgctgttacgtttcaaatcttaccttactcttcggtgcctaataggaacagccaagctaagcacttatttatatcggcacaaatcttaccttactcttcggtgcctaataggaaccatatataagtatatatttaatttatttggcaaatcttaccttactcttcggtgcctaataggaactatactattcgtgataattcaaaaattttaacaaatcttaccttactcttcggtgcctaataggaacagtaagaaaagcacttatccatcaacgaaacaaatcttaccttactcttcggtgcctaataggaacaggcgtgcagcggttgcctctgctgctcttcaaatcttaccttactcttcggtgcctaataggaactaatatagtagtttacattgttttacagtacaaatcttaccttactcttcggtgcctaataggaacacgtgcttaatataatcacaatataagtagcaaatcttaccttactcttcggtgcctaataggaacggcaacaataatcaatcctccgccaccggccaaatcttaccttactcttcggtgcctaataggaacattccaaacgataccccccattaaaccgtttcaaatcttaccttactcttcggtgcctaataggaacataatttcagcgttaagccgcgcgcggtgtcaaatcttaccttactcttcggtgcctaataggaacaacgattaaataatttgtcagcatatttgtcaaatcttaccttactcttcggtgcctaataggaacctctttcttgattactctcttatacttttccaaatcttaccttactcttcggtgcctaataggaacaataaacaagaaaacaaatgggaaagcaaacaaatcttaccttactcttcggtgcctaataggaactgtatcgcgctatataagccgctgattcatcaaatcttaccttactcttcggtaatgcaattgtttcattaagagcataaaattgtcaaagaactactaactatatactaataaagatagaaaaataatgtcaattttctcttatgaggggaaaaagataggcgtaagctaataaaagccccgcttgcgcggggcttttcaaatggtggaccggacaggacttgaacctgtgacctcctgcgtgtaaagcaggcgctctaccagctaagctaccgatcctaaagcaataatttattctagcaaaatcagagcgcgaactcaacgggcagccgggctgccccgtctgagattactcttctgcgcggggcgttgtgcgggcccattcttcttcttccgcgccccatttctcttttaccgcctgcggaattttatacaaaatgctcgtgcatttggccgatacggttccgtccggcaggaggatttctccttccaccagcgcgcgagagccgctgtctttaataatgcgtcccaccgcttttaacggcgtgtgcgtgggggtgttgtgtttgtagaccacttccattttcagcgttaccatcaggcgcgtaaaatcgttgttcagcaggacggcgcggccggatgtttcatccaaaatggtggctacaatcccgccgtgcaccgtgcccgggtacgagcagtaattgtcgtcaagtgtgaaatcggcttccacttgcttgtcgtcataattgttataccattccaatttcaggccgaaggggtttttccgcccgcatccaaagcactgaagggaagtcggctggcgtaattttttcatgcgctacctcctaaaagtattatacttttttgctaaactaaatttatgaagaatatggaaaccgaatttaagtgggatgccaattctccgcgcgcgtttatgcggatgctggccgccgtacgccgtgcggcggggaaagaaaatgtttcgtctccgcgccggctgaagattgaagacgtttatttggaacgtccgggcggcgagtttgaaaaacggttgattgcgttccgcgtgcgcaataccgacggaaaatgggaagccgcttttaaaacgcgcacggaagtgaaaaacggaaaagccgtgcggcgcgaagaaactatgccgcttgcaaacatcaaaaatctggcggacgcattggaatttttaaacgcaaaaaaacggtggaaggtgcttgatataaccgggcttcggccggtgttctccattcgtaaccgccggcgcacggcggaagttttttacgacggggcaaaagccgagctggcattggacgactgcgaaattttggtgctcgggcggcgcgtatgtatgaaagaaattgagctggaactcaaacaggggtctgccgaaaaaatggaacgtctggcgcgggaaatgacgcgcggaagcgggcttgaatatgcgcgggtttccaaagtaaaaacggcggcggctttgcttaaactgtgggggaataaatgaacgcgttaatcgcgcttgtgctgagtttggccgcgcccggcgcggggcatatttttaacggattttacacggagggacttgtgcttggcgtgctgtttgcgtttggaaaaagtacgtttctgccgcttatcctgcgcgtgtttggcgtaagcaatttaaagcgcacgctgcaaattttttatgtgtgcaattggttttacatcgcgcttatttgttatgctgcgctgacaagtttttggagcggattttccgtacggcaaacacatttttggtacgcgcttttgtttgcggttgcggtgtcgctggcgtacaggaacacattaaacgcatttatttttacggccttgtgcggacgcacgggcgtatatgccattttgcgcgcggggagaaaatctccgacggagaaaaaataaaaagtatttttttagacgtaaaaaaacggggcttgatttttttgaaaaaattattttaagacgagaaaaagttgcattttaaaataatttgtgctattatttttatgaggttaaaactaattgtctcaggagaaaaaaatggctgttaaaaaaaccgtgaaaaaggccgccgccaagaaaccggccgccaaaaaagtaaccgtgaaaaaagccgccgtcaaaaaaccggcgaaaaaagcctgtgctaaaaaagcgtgtgcgaaaaaagcctgcgccaaaaaaaccgtgaaaaaagtggccgtgaaaaaagccgccgttaaaaaaaccgctgctaaaaaaccggccgccaaaaaaacgactgtaaaaaaagccgccgtcaaaaaaccggccgctaaaaaagccgttaaaaaagtagcgaagaaaaaat

SEQ ID NO: 4391 - DNA, 15252 bp, synthetic construct
  misc_feature 1..15252: note = Synthetic
  source 1..15252: mol_type = other DNA
agaccttcaagcataatatagtgcggtcaaacgcgtgcatccgctagtaaactttgctttttagagggcaaatttaaggagtctatctagaatacacgaaaaaaccgttacagaatatgtattggatagcctttacagagaaaaaatatgaatcctaaaatttggaagaatcctcaggaaaaaatacattacctttgttccattaccccgctatcccatattaagttaatagagtttacttaattctgatagtgtgatatctattcctaatatcttaaaagaattttttcgtttttttaataacatattaagtattttatttctgatttcatcggttccaaaatgaattgcacgatgacaattcggacataaagatacgatgttttcagggcgatctaagttaatatgatagcgttcataaaaagtcatcgcataggtgagcggaattaaatgatgggcttccatataggggagttttgacgtttttgctatgaaagttggatggcttttatctacttcacagttaaagcaggcattatccagtgctaatttgcctactaatgggtttcgccgaatcatatgttgaaggatctgattccgagttggttgttcttttattttactcttcaaaaattcttttttttcggggcttaaaaaaacaatatttgtttttgcagtatagattgcatcttcttgcaaatcgcttggagtttttaggatatttctaggttggtaagaaatttttaattctttatttgagatgtttcctagattctctgcttgagtgccaataaaccaacaaaaatcttgcgcatccataactgtacattgttgattcacttcttgctttaaaataggcaataaccgattgtgaatgtatgaataaaaatataaataaaggtcaacccctcgcaatccttttgcgtcattaattctcatatattgaaagaaattttttataaaattattagtggttgctaatggatatttgttaggatattttataaataagaaaaagataggcacttggtaatgaagagaatactgataacactctttgattcttaattcttctagtctcataagaaatgtattaattcttttatttaatggtaaactttcattaaaaagattctgaaacgagtcaatatgttgctggggatatttgataaaaatatctttaaaaaatttttttccaaataaaatgtcgcgcgggtaaaaattttctgtaaaagaaagtaattttatatatttatctttaaatgttgcacaagattccaattgggaaaaagtggtcccaaattgggatataaaatcccatttataactttcttggtactcattactaaaaatccaatgaatatattttgagcaaatttctttaaatgacgtgtttttcatatttaaatatcacttgtaaggtattatgatatagtatctggaaatcacactttctattcttctaattatattaatagcatattattgtaataaaggatagcaaacagttctatgaatgtacatcaagaaacttatttaaatctggcctggaaataatattaaaatatctagtgcttttgtgctctttattgcgctatcaccccactaccccttgtgcttgcataaaaaaacggctttttgtatcttatgggtatatacttgtttttccttctcgctaaatttttctattggagcatactatggcaaattaccgttggggtattgatttgggcacatcttctattggcgtggccgtttacgagacggacaataacggaaagattatttccttaaaacatttggacagttatatttttggcgaacctgtggcacccaaagaaatggtaactttaaacaccgcccgccgttcggcgcgtttgattcgccgtcaggtggagcgcaaggctgcccgccttaaaaaaatgtcctatattgctaaatccttgggggttacgccggaagttttgcgcgccacgccagaggacgttgtagccttgcgtgccaaagcggtgcgggaggaaatttctatcccgcaacttatcaaggtgctgagccatatagtcaaaaaccgcggctacaaaggtaccttgtccgcagacgacaaaggcaccgtaggtaaaaaattatcccaaacggcgcaagcccttaccgggggtaaaaccttgggcgaactcttgtatgagcgcaaaacgcaggctaacggccagccgtggcggaaggtggaagaaggcggcacctttatttaccgccaattagtagaggatgaatttgcccgaatttgggacacacaagccaaatttcacccggagttaaacggctcctacgctgtgtggggggataaaatgttccccgatttcccgggcaaaacggaaattctgcttaaagaggctttccactcggcaatgttttaccaacgtccgataaaatgggagttggaaacggttggaaactgcgaaatttatcccacggaaaagcgtgccgccgcggcccaaattgcctaccagcattaccgtatggcaaagacactggccgatttgcgcgtacgcaataaaaacacgcgcgaaagtgtcccgcttaccttggcgcaaaagtcgcaactttttgagtttttgggcgcgcatacagcggaatattcgccggaaaccaaggccgttccgtttaccgtgttatataaggtgttgggcctgccggaaggctgcacctttaccttggaccgcacttatcacgcaagaggcgggctgaaaggaaataccaccttgtacgcctttgaaaaggcgggcgttttaaacgagtggtccaatttaacagacacggtgcaagaattggtattggagttttttgccaatgtttccaacttgtcggatattgaggataattcagacgcgtatataaaagagcgtgtgccggaattaaccaaaaacttaaagcccaccccgcaggcttgcgaagcgtgctgccggtttattttgctgttaaaggcgcacggtgtactgggtgaattagtattagagcaagggcgcagttcgtacagcattaaagcgcttaaaatgctgacggagcgcattatgcagggcgaacaggaagcggatattttggcggacatagaagcgcaaaaaacgcatccgcaaggcaaattccgctctaccgaggctattttgaaagagcaagccattaacgacccggtggttataaaggctttaaacgaatttcatcgtgtggtccaatatttgctttatcggaattggaaacccaaagaaattattatagaactttcccgtgatatgaaaaaatctttaagccgtcggcagtttttagaggctcaaaacaaagcgcaggcggatgaacgaaacgcggcaaagaaagaactagtagaagaatttggtgtattacctactcctaataatatagaacgctacttgctttggaaagagcaggctggaatgtctccttatagtgataatggaagtacgaaaatatcggacgcagaggcttttgatagtagagaaacccaagttgaccatattattccacaacaaggggaaattggtggtccaaatacttttggaaataaagttttggtttttacaaaggaaaaccataaaaaaagcaaccaattaccgtatcaatatgataatggaaagtttaaagaagaaatagatgcttataaagcgtggttagtggacaataatttgttaggtaaaaaacgtagcaatcggaaaaaagtagaacctttttaccctgcaagcaatttaattaaattcgtggagcgattgcgcatattgaaagaaaaagagtggaaatggtctcaacgggataacgaattttggcttacgccgaaaggccgaaatatagaagataaaataaataatctgcttaaaacgcccgaagagttaaaacaagattttgtggatcgccaaaaccaagaaacggcgtggataggcaaagttgtattagggtggtgcaaagatatttgttttgcacagcccacttttggtactttaacagcgtatttgcgtcggcaattacaatttgaccgtattattcctcaaattcgtttttcagaaggaaagcccttgtatgatacagataaaaaaatgcttgatagcaacaaattaaaggaaattttagaaaatgtcccgtatgataaattgagtgctatcaaacctgaatttgaaaaatattgtgctgatttttttaagccgtgcgatacaacaaaagattatgccaaggcgttggcgcggtttcagacagaaatttatggaagtttagataaacggtgcgaccaccgccaccacgcggtggatgcggccgtaatcggtttgtgctctgtttcaatagttcagaaagcgcaaaatttctataagaagcataacacattgtacataaaagcctatgatgaaagaggtaaccgggataagaaacacgatgttgaggggtttttgttggaaaatgatacaattccaaacctagcccgtataagaaaagaggtgcaagcccgattgaccaattatgtggtatggcacaagccggaccattttcctagcggcgcgctgtttgaccaaacggcttataatatacttcccaaagacggcgaaaaacgctttgtaaagcgctccccgctcgttagtttcttaaaggcaaacgaaaagaaaaccttggaaaacttggagaaattgctgttttgcgacgcggtaaaaaacgaaattattacccagtttaaagaacgcctggcgcaagggatgacgcaagaagaagccttgtgcggaaagaaagataacccgaccgacgggatttattaccggggcaataaagtaaagcaagtaaaatatatgtatttagttggacgcggtatccgcgtgtttgatgaaaacgcggataaagaaatttttagcacggataacgtcggtactcagcacaaaaaagcctatcaaaacggcgggtatgcctgtatggattttgacgccaaaacaggcaaaaggttggcacttatccctttgtggcaatatcaaagcaataaacaagtacctcccggcgtggtgcgcgtgtttattggggatatgttgtttaataaaaaagataaagaattttataagattaaacaatttaattctcattttggtgttggtattgttgttgcaagcgaagtaaaaggcgaccttgcctttacttccaatcttaaaaattacagtgtggtatccactcgtcaggatatcgccaaattaaaagataatgagcatacaacatctgattagtattgatagggaagccaaactgtctattgatacgggtcggctcaaaataaccttccaaaacgcaggcgaaacgcattttatcgccgcgtgcgatatcgcagtgctgattttggctaacccgtgtatcagcctgtctttgtccgtttatcaggaactggcaaaaaatggggcggtaatcattacggcgggggaaaaatatatgccttgtgctatgagtgtgcccgtcggtgtgaatatagacggttcccgccgaccgtttttgcaagccaaacagttgcatagcgaggccgccggacaatgctgggcgcagttgctctcgtccaaggtgtcgggccaagccttggtggcaagtgcgtttgctccggaacttgcggagcggcttaaattaattgccaaacacattgagccaggtgataaagagtgccgcgaggcacaggccgcgcaattgtattggccggaattttttaaatcgcttgataatcccattgattttagggataagcaaggagccacggacccagtaaacattgcactaaattatggttatgccgttctgcgggcgattgtggcgcggggactcgccggggcggggctgtgtctgaattttggtgtggggcattgccggaaggataatccttttaacttggccgacgattttatagagccttttcgttttttggctgaccgggccgtatatcagatttttagggataatcagcccgcctgttttgataaagaggttaaaaagcaactgctttccgcgttgcttgcaagcacaattactattactgggaagacataccgcttattccaaggtgtagattttgccgtcaatagttattgtttaagtttgcaagatacgcgccgcaaattgttgttgcccaatttgcccgcgcgtcccggaaaggctcctgatgccttcctgtggcaagccacgcagttcccttatgaaacccaatagttggcgcattatgtgggtggtggcggtgtttgacttaccgacgcaaaccaaaatccagcgcaagcggtacgcggggtttcgcaagttgctgttgcataacgggtttagtatgatgcagtattccgtatatgtgcgcaatatgcccacaatgcaccaggcgcaggcgttaatcaagcagttgggcccgcaaacgccgccgcaaggccaatgtgcttttttgatgattacagacaaacaatttggtctgacgagaaacttctatgggccgtctttacggcaagaaaaaatccccaaaaagcacgagcaactcatactttttgaggatttttaattatttacaattaaatcaaaactaatttaagtgggaataaatccctttgtgggctttaatgcccttgttacctaagttgaggcacaaataagaataaggtttctgaaattattttaccaaaaaggtttattttttaacaactttttatagtttatcaaatcttaccttattcttcggtgcctaataggaacagaagtttcttaacgccctaaaattgatagcaaatcttaccttattcttcggtgcctaataggaacataaataatgcacttgacggaaaatatgaccaaatcttaccttattcttcggtgcctaataggaacagcaattatcttataactagaaactcggctcaaatcttaccttattcttcggtgcctaataggaacaaccaaaacggagaacccgccacgattccgcaaatcttaccttattcttcggtgcctaataggaacaaggcaatttttacccaacttacaagtaagatttctctttttttcaaagaactacttatattttaataagcgcgcggcgcaaagtcaaggagtagtattttaatttcgccgcgcaccttgtccgctccgccgctaggtgtccggggaaaaataagcccctgttccctgtaccgtgtaaatatttgtacaataaaataagttatgaacttgccgcaagaatttatccaatataccgctaatttatttggctcccggcgttgggagcggtttgagcagtcttttgtgcaggaagcggcggtaagtgtacgcttcaacccgtggaaagccaagggcgaagcccttttcccacaggccgagccggtaccgtggtgcgagggggccttttggttgaaagagcgcccgctctttacgcgcgacccgcgctttcacgccggagtgtattatgtgcaggaggccggttccctatttttggaccacgccttgcggcattgggttacggggcctgtcagcgcgcttgatttgtgcgccgctccggggggaaaatctacccttatgcgggccgctttacctgccggttcggtgcttgtcagtaacgaaattgaccgccgccgcgccaatattctcttggaaaatatcctcaaacaaggccaccccggtgtattggttacgcataatgcgccaaaagattttgccaaaacaaatctgttgtttgatgttattttgacggacgttccttgttcgggagagggccttttccgtcgggacccggtcgctatcagcgagtggagccctcaaaatgtatatttttgtgcagagcggcaacggcaaattttgcgtgatatttggccttgcctcaaagacggcggcctgttgatttacagcacctgtacctttaatacgcacgaaaatgaagaaaatgtccgctggattgccgaggaactgggcgcggaacttttggcagtacccgtccggccggagtggcaaattacggaaagtttgcttgcggggtggaatcaacccgtatatcgttttatcccgggtacaacgcgcagtgagggcctttttatggcggtgcttcgtaaaaacgggggaaacagagcctttgccacattacccgcctctttgcgcacacaagttaaaaaatacccgcttttgcatttgctttatgacggtcagcccgcatttgaagccaaggggcgggagcaaatcccgtctattgcacaggccctttctcttactacggaggaaacctcctttcctcgtgccgagttgtctttggacgcggccttgcgctatctccaccgggaagccttagttttgcctgcgggcacaccgcgcggctttgtgttggtaacgtatcaaggatatccgctcggttttgtaaagaacttgggcgaccgcgccaacaatctctatcccaaaccttgggccatccgcagtttgtaaaattaaataacgagcgtatagactttgtattgtacgtcgtctaatgcgtattcatagcggtttgcaataattataagtttgggcggggctgttgtaaatatgacagtaatgcaaaatttattttccacgctggactttgtgcccgaaatatgttaccataaaaccatatatttataggagtataaagtacagccacatagagtggcaaaattacaatttattctgtttttggaatcctattgaagaataggaaggctttgggaaaccaaagttctaaggaagtccaaaaacggctggtttaggcagaagatgaggggaagtcatgagccctttgtcttctgccgagtgttgcacacatattttgcgtgcaaccacggctgtttaatgacaaggcacttccttagacttgacattacgcagccgttttaattttccaaccttcctcgcttctcttgctttgttccgacttcatttttccataggtttcgttcgctttcatacgctacagcacggcgtgtgaacgggaaagggacttatgaatacctccgccaagagtttccacaagtccttttcccacggtttaagggaaaagggcttttttatggaacaaaatcactcatcacggcctcttattagcgtattgattcccgtttataatgcaggtaaatacctagcggagaccctggcttctataaaaaatcaaacttattccaatttggaaattatatgcattgatgatgggtcaacagataaaagtcttgctattttgcaagaatttgcacaaaaagatccccgctttaaaataatttccagaactaataaaggtgttgctaatacccgtaaccaattattgcaagaatccaaaggcgaatatattgcctttgtagatagcgatgatattattgagcctatctgtatagaacatttgctgaactgggccttaaataagcaggcggatgtggtgcggtgtctgtattggtttaatgaaaagggaattaatattccctgtgaaaaacgatgtaaagaatttcttaaatcagagccaatatccctttctgaaagaatacaggccgcattggacgattcccaagtatggcttaaactgattaaaacagaattaattagaaacgcaaagttaaactttttgcccaatactatcgcggaagaccagggctttgaatttttgctttatttaagtgctaaaaacatcgtgtttttaaaggaacatttgtatcattatagggttttggaaggctctgtttccagcaataaagggaagttagcgtatggaacgttacagcaaatggtttatttatgtggagaactggcccgccgtgggtttaaagggccggaggtctataaccccattataagattaactattcaagccgtgcggcggttgcggaaatatccaaatatggagttttcgttagcgcgcagagcactgcaagaagtagccttgcatttacaaaattgcagtttatacccgcgtttaaaatatcaaattttatgtaagttagccggttgtgtagaagataaaaatctaccgaagttagcatggtggattagataacgtataggagaaaatatgaaagtacttttgctggcaggtggacttggtaccagattaggggaagaaacctctatccgccccaaaccgatggtggaaatcggcggctacccgattatttggcacattatgaaactttacacccactacggactgacagactttgttattctgtgcgggtacaagagcgaagtaatcaaagaatactttgtcaattactacaccaacaactctgatgttacgatagatttccaaaccaatcaaattgatgtccatatgaaccgctgtgaaccgtggaaagttacccttttatatacagggcgtaacgcaatgaccggctctcgcattaagcaggcttgcaaatttgtaggagacgagccctttatgctgacgtacggggacggagtgtccgacgtggatattaataagttattagactgccacaaaaaatcgggcaaactggtaactttaacagccgtccagcccacaggccgctttggcgcgcttaatattgagccgagcggcaccatttcacgctttcaggaaaagccggtaggggacggtacgtgggtaaacggcggctttttcgtttgcgagcccaaagcatttgactatatcccggatggggataatgttatctgggagcgcgagccgctcacccaactggccaaggaaggccaattaaacgcatataagcactatggcttttggcacccgatggatacgttgcgcgacaaaattgaactcaacgaacaatggaccgccggaaaagccccgtggaaagtgtgggaaaaataaaatgaaaaatgaaaaaattctgattacgggagccagtggttttattgggagacaagtgactaaggaaatgattaagcgcgggtatgttgtttatgccccctctatcatgcaaacgctttccccacaaaaaaacttaatacaaagtgaactcgatctttttgatactgatgcattaagtgcttatttgcgggaacataaatttgaaaatctgattcatttggcgtggtatgtaggccctaaaggtcatatgagtgcaagtaatatcgattggttaagtttgtcgctaaaactactgaaactctttgccgaaaatggcgggaagaaatttctaggggcgggaagtgtctcggaatatgatttttcttatgggtttttacaagaaaaccgtacaccattggctaatgcttccttatatggacaggtaaaggctgccttatataatacagggaagatcttttgcaagcaaaacgaaatagctttcaagtgggcgagaatttttaacctgtatggaccacacgaacgctccgctaggctgatgccatctgtcatttgctccatgttgaaaaatgaagttgtaaaagtaagtccatgcagtaagtttttggattatttgcatgtggaagatacggctagcgcaattgcccagttttttgcatcggacgtaacggatgcggtaaacatctgttcgggtaagccgatacagttacgatatatggtggaagaaatggcacgtttgacgaattttaagggcaaaattctatggggtgcgcttgaagaaaattttgcggatcctattattgtgggaagcaatacacgtttgacgcaagaagtggggtggacccccgcatattcactgcaaagtggcttaatacaaacaattaactggtggaaggagcatttatatgaataattttaatgatgcatacaagggaaaaacaattttagtaacaggacatacaggttttaaagggtcttggctgtctatttggctttccagtttaggtgcaaatgttgtggggtatgcattggacccctactcagaaagaagcaactactgtgtttcccatttaaaagaacgattgtttgcagatgaacggggcgatgtgcgcgatgcagcacggttggaagaagtgatatcaaaatataaaccaaccatgattttccacttggcggcccaagcgttggtgcgcacctcttatgaacaccctaaaatgacgtatgaaaccaacttaatgggttcgcttaacatcttggaagcggtacgaaaatttgattttatcaaacaagttgtaatgattacctctgataagtgctatgaaaacaaagaacaaatctggggatatcgtgaaacggatcgcatgggtgggtatgacccttattcttcatcaaaaggctgtaccgaattaatgatagcatctttccgcaattcttattttaatcctaaggattatgccaaacatggaaaggcagttgccagcgtgcgcgcgggcaatgtgattggggggggagattggagcgctaatcgcttgattccggattgtatccgtgccatagaagccggtaaggacattgtgattcgttctccttatgctacgcggccttgggagcatgttttggaaccgctctccggctatttgaaagtaggtgaaaaacttttaatggatcccgttacttatagcacaagttttaattttggccccaaactggaaaataaccgtactgtatgggaagtggtgcagaaattaattagttattatggcaaaggaaaagcgattgaccaatctgatccaaatgcggtgcatgaaaacactttgttaagtctagatgttactaaagcttatcatatgctagatcattggcatgcacatttgtcatttgatgaagcaattgaatttaccgcagattggtataaagaatcccttcatagtgaagatatgtgggattattgcttacatcaaattgaagcgcacggagcaaaaaaatagtgtatgcaaaccattatcttagggagtggtattgcaggtatttcagcggggtatcacttaaataaaaaaggaatcaaaagcattatttttgaaaaagataccgactggggaggattatgcgcttcttttaccattgacggctttcgttttgaccgttttgtgcattttagttttgccccagataaatctgataagcaattatttgccggggaaagaggaatgtgggaacacaccccttttcctggcaactattatcatggcatatggttgcgacatcctgctcaaaataatttggcgcctctttctattgaagaaaaagtaaaaattattaccgattttgtacagcgtccacgaaaagaaccagaagacatccatagttatgatgaatggttgcgtgtgcaatatggcaattattttgcggagcattttccgtttgtatatacgcgcaaatattggggggtggatgcacatgaattggaaaccaagtgggtgggggtacgaatgtatactccagatttgaagcaggtgttggctggttcctatgaaacgcaaaaagagtgtttttactttgcaaaaaaaatgctttatccaaaacaaggtggctttagaagtattttgaatacatgtcgaaatgggttggatattcgctttaataagaaagtagtaaacataaatcctagacaaaaaaaagttttttttgaagacggaacaaatcaaacttatgaccgcttgatttctacacttcctttgccggaaatcgtaaaaatgctgccgagtgttccgcaagaagtaatgaaggcgactgctgatttgcattggacatgcggctatcaaatttctctgggttttaatcggcccgatattgcccgatatttgtggttctatatctacgatacggatattttgccggctcgggtgtattctcctaatttaaaatcgccggacaatgtccctctgggttgttcttccttacaggcggaagtgttttttgattgtaaaaaggcgatattgcctgcgcaacaagttttgcaaaatacaattgaaaaattgatacaaatgggcgtatttaagcaagaagatttgattgtgagtgatattcgttttgaaccgtatgccaatattacatttgtgccgagtatttataaaaatagacaaataattattgattatttgcgttccttaggaattgaaagtattggtcgctttggcaaatgggaatatgcttggacccaccaagcttttgcccatggaaaggaggtataaaatgaaaaaaatatttttgacgggtggaacagggttgataggcacgcaaactattccttttttgaaacaagcaggatttgaagtctatgtattaacaatcggggatgaagtaaactatgacggtgtgacatttattaaaggtaacttgtttgataaacaggcaatggataacattttagaagaagtcaaaccagaatacttgttgcattatgcttggctttctactggtctgtttaatgataatatgaattttgattttttaacatcttctgtgaatttgttaaaatcatttgccaaatgtggtggcaagcgtgccgtgatggccggtacctatgctgagtacggttaccataatgaaaatttaaaagaagatatgccagcagaacccattaatatctatagccaatgcaaagattttgtgcgtcaaattgcacaatcgtattgtaaaaacaatggaatttcgtttggttggggacgcattttttctgcctttggcaaggaaacggaccctcggcgtttgacatcacatgtggtgaactgtttgaatgctaatcagcaagttatcatccgcagtggaagcctaattagggattacatttacaccaaagatattgctgctgcgtttgtggcatttctaaatagtccggtagaaggaattgtaaatatctgtacaggaaaaggaacatctatacatgattatgtgatgaaacttgcctcaattatgggtaaagaaaattttgtcatttttaaggagcaatctagccctcaacaagtgcgtgtggtaggagattccacacgcttaaataaagaagtcggattttatcctaaatattgcatagaaaaagcattgaaagaaattgtgttataaatagattttgaagaatctttttatacctcattttatttattggagtttatttatgacctcaaaagaaaattaccacaaggtatctattttactgtccatttataaagtggaagattatttggaagagtgtttagacagtttactaaaccagagttaccacaatttggaaattgtatgcgtggataatggttcgccggataattgtggaaaaattttgcagaaatatgcgaaaaaagattcccgtattaaaattgtcacactcaaagaaaatcgtatgctttgcggcgggcgcaatgccggattggaccatgctactggggatt

SEQ ID NO: 4392 - DNA, 14495 bp, synthetic construct
  variation 9691..9692: note = note, n is a, c, g, or t
  misc_feature 1..14495: note = Synthetic
  source 1..14495: mol_type = other DNA
  variation 9979..9980: note = note, n is a, c, g, or t
  variation 2526..2527: note = note, n is a, c, g, or t
ttacgccgcccgaaataaaaaaccgcatatcggggaaatccgcgcacagggcgtttaatgcggcggggccgtttgcgccgtcgggcgaaaagctgacggccgtaaggcccagcccggccgcggcttgtacgtcggcggatgtgcggcattccggcagggcggggatgtttttctccgcgcacagacggataatttcgggatttacgtccgcggaaatgataaagcccgcgcccgctttcagggcgtcttgggcttcctgcggcgtgcggatgttgcccgcgccggcaagcaggcggggcgagactgcctgaataaattctagtgcttcgggtgcgtcatatgctgttaagacgcatgaaataccgcccgcctgcaaggcctgtgccagcggcgccgcttgggatgcgtttggggcttggataaacacaacaataccgtttttataaagctgctgaagggttttcatgtgatggggctccttgcctgcgcgtacggcgcaggctgatgcttccattttataagcttttggggtgcggcgtaaagagggcctgccgcgtggattttgactatggagccccggggatgaatgagaacaaaccgcccgcgcgctgtttgacgttttattgtgtgtgcaaagatgggcggggctgtgaataaatataaatacgcggaaaatttagacaataaaaacccccgctttcgcggggtctttacatggtgcgccccagacgtattgtagagaacggcatacaagttcgttgggcttccaataaaaatccccgctttcgcggggttttaaatggtgcgcccaacaggaatcgaacttgtatcttcagctccgcaggctgacactctatccattgagctatgggcgcttaaatcggatttttcttttgcggatttcctgctacctaattattttaacatttttgtttttacatttcaatcggatttcccgcggcggatatgcccgacggaaattccagctttattatatcattttaccgcctcgcgccgccgcattaaactgctataataaccatatgaaagaagaaaaaagcggcacttatgtgtacgataaaaaatcaggaaaaatggtaaaagtgtccgaccgtatcccgtcggtgcggaaatccggcggccacgcgtgcggcggctgctgcgggcactgtcactgccatgacgactaaaccttccgtttcgtctattcctcccggcgagccgcaaaatttgtttttgcaggccctgagggggcttttgtccgttttgcaaaaagtgtttttgccgcatctggtggccgggatgggactttttatgatggcggcatatgttacatatgccctgctgttggagcccgcccgcctgcccgcaccggtggaattcgccgcggcgtgcgtgtttttcggcctctacggtctggcggcgtttgtatattccgtcttggctgcgtgtgcgtttgccctgcgcgcggcctgcgccagctgggaagattttattgatgatacattgggccttgtaaaagaaaaagtggcctccaaaattgacaatatgaacgagggccttgccaaagagcaggccaaggtggtcgtggccggaagcgtgagcgaggtgtttgggctgttcggtaagtatgagcggaagtcttttctgcgctggctgtcggcgatacttttgggtgtgataacatttgcgatgcgttcggtgttggtggcgcgcattgttaaaatttccggtacgacggtgaacctgggcaagctttttgccgggcgcgccacgctggccggagccgtgtttttaaacctgcggttgttttccactcttctgctggggctgttttatagtctggggcttttagcgcttgcgcttaattttctttttgtattttggatgaaataatagtttaatagaaataggtatgcgtaaactttttttattgcttctttgtatgtgctgcgtatcggccgcttttggcgagacggccgcccagctgcttgcccgcgccaaaacgcaggcggaccccaacgcgcagattaaactgcttacgcgggcggttgccaagtcgccccggatggcggacgcctaccattaccgggcggacgcttatttgaatttgggccgttataagcaggcgctggaagattattcccgcaccgtgtctttacgtccgcgcgatccgttccgttattatgcccgggcgcttgcctaccagaagatgggccggccgtccctggctcaggcggatttgacgaaagccatttcccttaaacccgcgtaccgcaatttctatctcgcccgcgcgcgcgccaacgcttcgctgggaaagtacgaagactcgctggccgactaccaaaaatatttgggcaggcgcaagcctgcgccggccatcgccgaggaattggtgccggtgtatttgggggcgtaccgttatgaggcggcccaaaaacaggtgtccgcgctgcaggccgccggaaacgatacggcggacgtgcatttttggcaggggcgggtgctgtccggccagaaccnncggctggacgaggccgtttccgcctacagcaaagccattaaccgcgacgaaggctacgcgcaggcctaccgttaccgcgccggcgcgtttaaagatatgggggattatcccgccgcgctggaagattataccgttttattaaaactccagcccgaagcggcgttttataaccgccggggactcgtgcgcgaagaaatgaaacaatttaaagaagcggccgaagattacacccgcgccattgagctggcgcccaaatgggccattccgtacaataaccggggatttgccaaaatgaatttgaaggattggaaaggcgcaaaagaggatttggaaaccgccatccggctggacggctccagccccacgccgtacgtcaacttggcgggcgtgtattggctgagcaaaaaagaccgcaaaaatacgtacgacaatttggataaagccgtgcggcgaaattttaagaattttgaatcgctctacgatgaggaccagaaaggctggatgtttaaaaacattaacaaaacggccgagttccgcgcggtgctgtacaaataaattgttttgtatttttatcccgcttccgtggttcgggggcgggattttttatggctaaagaaatcccccggctgccggggatgtttagtttcggaaaattgtgcgggtaaaattagacgatgcctaaataaatcagccagataacgccgtagcgcaggcatttggccaggcccgccgccgtgaggtaaaacccaaaattcacttttgccgcgccggctacgatggtaatcgggtccccgatgaggggaacgcccgccagcagaagcgtggctttgccgtggcgttcaaacaggcggcgcgctttttgaatatacgcggctttgatggggaaccatttgtcgttttcaaagcgggttaaataacgccccagcacccagttggccgatacgccgataaacgtccccgcgcacgcggccgacaccaacagccaggccgtgtatttgcccgtagccaaaaaggcgaacataatcagctctccctgcgccgggataatactggcggagagaatggaaataaaaaattgaaaaataagaatatgcagttccggcataagccccctatgtatagcatagcggacggaacaacattttgccagcgcaaataagggttaaacggctacaggcccaagagttctttttgcacgcgcggcggcagcgggtgtgcggcgtagggggttattaaaaatccgtccgtctgcggggtgattttgtaccagcgcggggcgccttctttttttaacagcgcgatggcttccagcatcttgccggcgggttcgcccggggagttgatttgcgccgtaaaaataaccgggatgcgctgttccccgcgtccgcggcgaagggcgtcaagcagggccgaagaggggctggccgtcaaagcgacgggcggtatgggggccgcgtctttttccgcggcgggctgagagaggaggccctggcgcaaaatccggcgcaggtccgcaccgtcggcatttagccccatcccgctaaaaacgcggccttcgcgcgcgtaaagcggcgcagcgggcacattatctgccggcgcgggcgagagggcggcgaaatcttttacccggaaagattctttttcaagcggcggatacttggggtgcgccggcggctggagcccccatttttgcagattgaccaatgcccggcgtttggaaatgcccgcgcgggtttgcaaattccacagcaggcgtttgttgcgggtggcgaaattggcggaggaggcgagctgtttttcggcctgtacgagcggcgcgcggacggtctgcgcggccgttgtttgggcggcgtatgccgcgcggcgggcggcttcttctttcattaaaatacgggaatactggggggagcttttggccaaaaacataaaaaagcgcgggccttgcgcctgcgcccatagagcggaagaagaaaaaccgcatagaatcagtaccggcaataaacgcgaaaagggtattttcatacttccattgtaaacgtaaaaagaggcgaaggcaagggccaaaagacctagaagggcccagactaaaagaaacccaaaaataccgcgtagacggccagataacggcccagtttgctgacggtaaccagcgttagaaatacgtccagccgcacgcccagcgtgccggcggcgagggtgagcggatcgcctataaaaggcacccaggccagcagcagggaccaaacgccgtatttttggaaaaacgtttcggccctggcaaactgtttgtccgtcaccgggaaccatttgcgtccgcgaaaacgcgccagatacctgcccagccaccagttgataaccgaacccagcacattgcccgccgtagccgccgccagcagtaaaacgggggaatactttttgacgccgaggagccaaaataaaatccattccgattgcgagggaatgaccgtagccgccgccagcgcggccaaaaacaacaaagacagcgccgaaaacaggctcacgggcgggccccggtaccaggcagtttaagtgcggcgcgccagagggcctttttctcttcgtaggagcgcgaagcgtgcgccgggctggtggagggaagggtaatgcaggttttgccggcaggctccccaaacgcgcgtttaaaatgcgtccgcgccgcctggccgttgaacaaaagcgtgcggatggcgggaaaacgtttgaaaagggacggaaaatcgttggggtgggggcgggtgatgctgccgtccagactgcccttgcgttcacaggattccagcgcgtcccataaaccaatgtgatgaatgagcagcgtgtttaatttgtcccggtaactttcgggcgtgcgcccgccggccagcaaatcaaacatgagccgccaaaactggttgtgtttgtaggcgtagtattccccggccttcagcgaggcgccgccgggcatgctgcccacaattaaaatgcgcgtatgttcgtcggcgcagggcggaaaactgtgtatcataaaaggctctccgggccgcaggcgggcggcgttacgggttttggcggaaatactcttccaaaatattcgccgcacagcggactttttccgggcacggacgcgctttataatagtccggcgtgcggggttcgggagacggatcctgcgggccggcgggcagcgccagcagttcgcggcagatgatggagccgttttcgtccttaaagcgtttggccagttcctgcacgcgggcgtacagcctggccttggcttcgtggtcggacggggtttcggaagcgtatttaagccccaaggccataaacatcgcgctgaccgcgccgcatacttcgcgcaggcggccgatgcctccgccgaaacaggcgcttacgcgcagggcggttttatcgtccaggcccaggtctttgctaaacgccaaaaatacggcttgggcgcagttgtgccccgcaagaaacagctgtttggcctgctcgcctttggaaagggtgctgtccataaataacgcctccggctaaaaaatatatatttgttccagcgcggtgttcgtgtgttacggctgtttgctgtacggcgcaatcacgaacgaatggccgtcttcggccagtgttacccggcaccacagcggcgtacccgaagggccctggataaaaatggatacttccacaaagtccgccggcggaatcgtttccgtaatcaggtggtatccttggtagtcggggtttctccagccgcgtaccgttactactaccgggatgcgtccgttttcaaaactgtttcgggccgcataagaggcgggttcaaccgagttggtcgcgagattgatttgtttgacgtccaaatctttcatcatatcttgtgtgaccggcatcgtgcccatactgcccatccgcattaacctgcccaaatcattggcgttctggcccgcgtcttccgggcgcagaccgttttggagcatattgcgaagcgcatcgccgtccagccccatcccgcggtagagataaatcttgttggtgggaacgggcggtgcgggaagtatgtctgtaaatccgtccagcgttaagccggttaaatcgggtacggtaatggaatgggggagtgttttcggccagccgttgggaggacgtaccccgcgcagctccaccacgcggcgcagcgccttgtgcagggacagcccgttgacgcgttgttcgtatttgacgaccgcgcccggaaacttttgtgcggcgcgcgctttaagagaagacggcgcggcaagcggcgccgccgcgggcatatgcgccgcagcggcgggcagaatggccggatatttgctccaggccgccggtatggcggcggcttcgcgggccgcatttttgcccagcgcctgcgggagttttgtcacgcctttttgaagagtctgcgcctgggcggaaacaaaactgacggttaagaaaagcccggccgtccaaacggccgcgtatttgcgtaaggtcatagagcgctcctaaaaaagtttatcaaaccaatatggcaaaaacacaggccgaagacctgtgtttcccatcaattgccgacggaattatacggcgtaattttaaatccgtcttccgccggttcaattttacaccacgcgggcttgccgtttacttccaacagcgcaatcacttcgtggatttgctcggcgggaatatcgtgtgctacggtaacgatggcgccgcgttccacagattctttgacggacaccatgacaacgaggccgtttccggcatggcgccaggcgtagtgcagggcgctgtcgggagaatcggtcaggttggtgacgcgctcgcgcgcgacggcttttaaggcggccattccgcccgcgctggcatagacgaggcggcggtcgttgctgttgcgaccgacatctttaattaacaggccgttttccaaaatgttgcgcagggaggcgccgtccgccgccaggcccaggccgcggtacatataatgcggatggcggacaaacggcaaagggggaaccgagccgtctttgtagcgcagggctttaaaatccggtgcggtgaatgcgttttcggtcagcagggccggccggcgcggtttttgaaggggtttggccccccagctgcgcagattttcaaccgcggttttagacggaatccctaccgtagtttgcaggctgtagagcagttttttatggctatttacaaaccgggcgacggtggtgttttcctgcagtgcagccggcgcgggtatggcggcggccggtgtggccgtcggcgtaactgccggtttgacggccgcggaaacgggcttgaccgcggcggaagccaccatgctgcgatgggttgcctgcaggagcgcattcatcgtttgaggggaagttttgcttaaatggccgatgccgctcatccctttgcttacgccggaaagaacggctttgccggattgggcagaaagattcgtcccgcacaggggcaatacaaaaagagtaagaagaaatacaagttttttccaatttttcatatgataatattatatttaaaatatcttcggaaaaaacagggtcaaaggacctattttttgttgggtccgggcccggggactttggcggtatggtgcgggagaagcgtgaaatggacgaaacatttgtgtattatgaaagcccggtagggcggctggcgctggccggcgacggggaatacgtcacgcgggtgggattttgccccgccccgtggacggaaaaaatgccgcagggcgaaacgccgcttttggcgcgcgcccgacgccagctggaagagtattttgcgggccgacgaaaaaactttgatttgccgttacgccccgccgggacgccgtttcgcttgcgggtgtggcgcgcgcttttgaatatcgggtatggtgaaacttgcagttacggggaactggcaaaagccgtgggaaacggaaaagcttcgcgcgccgtaggcggcgccaatcacgccaatcccatcgttattattattccgtgccaccgggtaatcggcgcgaacggcacgctgacgggatacggcggagggctggataaaaaaacgtttttactggagctggaaaagaaacatatccggccgtgaatataaaaaatccgcttttaaaagcgggttttttagtccgaggccgttatttaaaaagtcccggccaaggcggccgggaagttctacacagggagtctccccggtttggcgtccgggaagcggacaacaggtgtccacccatataacccaaaaaaacgccgttttattgcaccggttttgctatgataaaactatcagcaggaagaaaggagagatatatggcaaagaatgtatgggttatttttgcagcggccgggttgctggctgtatccgcctgcggccgcgcgccgcaggatgaaaatgcggacggtgtggaagtggccgaagtaacggaaacggtaacgcttccgacggatatgcacaacgccgcgaattcgctggattataaaggggtttacgaagggctgctgcccgcggctgacgggcccgggattcagaccacgctgacgcttgcgccggacggaacgtttgtttggcgttccgaatacttggacgaacaggacggcgtatttgtggaccgggggacatatacgctcaccggaaatgtggccgcgctggaagtgccgggcgagggcgtgcgctacgtcaaggtggaagaagggcgtctgcgcctgctggatcaggataaaaatgtgattaccggttcactggcggatatgtacgtgctggaaaagacgcagaaataaaccgtttgtttgatgcaaatctgtttaaaaggccgggaggaattcttcccccggcttttaatttgctcaataaataattaaatgtataatgaaataaacttcctttgttttctcttcccgcatacaaatatgacttagaggtatttttatgagcaccttaaaagaaaatcaatttccttatcgtttgggcgtggatttaggcacctcctctgttggagtagccatatatagaataaatgacaaaggtgatattattgctttagagcatttggacagctatattttcggagaaccggtagcccctaaggaaatggtaacgctcaatactgcccgccgcgcggcccgcttaatccgccgccaggtggaacgnnattgcccaatccttggggattttaaagcccgcgttagacgcggataaagaggatgttatttggctgcgtgcccgtgccgtagaggaagaaatttcccttccgcaactgataaaagttttttgtcatatggttaagaaccgcgggtataaagggagtattgctgaaaaaacggtgggtacaaaattaaaacatacggaagggcttttgcaagacggcaagaccttggggcaattgttgtgggaggaaaagcaaaaagctttgaaaggacagccctggcgtaaaatagnngtacttttatctaccgccggatggtggaagaagaatttgaacgcatttggcgggaacaaagtaaatatcatcctgagttaaatggaatgtatcaggtttggggaaataatatgttcccggattatcctaagcagcctgaaatttcgctgcatgacgcttttcactcggctttgttctaccagcatcctattaaatgggagctggaaaccgtgggtgcttgcccgttgttcccggaagagaagcgcgcttcgtgcgctcagatggcttatcaaagctatcggctggctaaagagatcgccaacttgcgtatttacgaaaagggcggaaaagactcattccgcctgaccctggcccagcaggcccaactgtttaactatatagagtctaatactcaggcatatagtcaggaatccggcgtggtgtcctttcgccgcatatataattttttaggtttgccggacaatgcctcgtttacggttgaccgcggcagtaaaaaagggctgaaaggaaataccactttatttgcttttgaaaaggctggtttgctcaacgagtgggcgaatttatccgataaagaacaggaactggtaatagagtttttatcaaatattaccaatatgtccgatgtagcggaaaacgaggacgcgtatatccgggaacgctttggcaaattgacggctaatatcattgctttggatagtgaaaagcaagccggggcagaatttgttgtggcaaataaaagtaaattgagccgtttggtgttagagcaagggcgcggttcttacagtgttaaggggttgcgctggctcgcggaggaggcccggcagggtcatttggacgactccagcgaagaggaatatgtagcggcccgtgtggctaaaaataaagtatatacaggcaaattgcgtacggtggccgccattaaggaacaagaatccattaccgacccggtaatgagccgcgcattggcggagtttcaccgggtgatgacgtatattactcataaatatggcaatccgcaagaaatagtggtggagctttcccgcgagataaaaaattctttgcgccggcggcagtttttggaaaggcaaaacgagctgcaagcccaggagcgtacaaaagctattgccgaattacaaaaagggggcgtattggtaagcccgcgcaatatagataaatatttgctgtgggaggaacaaaaccatacgtgtccctacagcggccagcttatttcttttactcaggcgtttgatgaaaaacaaacgcaggtggatcatattattccccgggcgggagacattgccggccccaatacattggaaaataaagtactggcttttacgcaggaaaataaggataaaaccaatcgcttgccgtatgaatggaaatttaaagaagacattgacgcttatctggcatttaatcaagagaaaaaagccaaaaagaaaaaaggcgaagaggctgtcgcaacgtttggcaataacagcccgcttattaattttgtacagcatttatggggcctgtataataaagaaaaaaaaggctattattccgccagagaacgtaaatttaagcccacgcagaaaggtgcgcgtattttgcgcaaaatcaataatttgctggctactccggcgcaaattaaaacggatttcgtaaaccgccaaaaccaggaaacggcttggattggcaaaattgtattagcctggtgtaaggatatttgtcctaaagtgaccccttcttttggcgcgctgacggcgtatctgcgcgggcagcttcagtttgaccggattttgccgctgatccgattggacgaagagaagccgctgtttgataaagacgaccgggaaattgacgagaaaaagtggaaagaattgtttgccgtgccccatttggcttatgagcaggccgacgctttggcggctgattttaataagtattgcgacggactggcagatgacaagaagcctatgacgtcttcggacaaacaaaaagtgttttatgaattttgtgcgagtcagcgcgtgctgttccaatttaataaacgctgcgattatcgtcaccatgcggtggatgcggctgtgattggcttatgtggcatggccttggtacagcgtgcagctgtgcataacagaaaatatggcacattgcataagattgagtggcgtaacgctgacgggacgcgggataaatccaaagatatcgccgggtttacggtggacagtctgccgttgtatgctgcattgaaagacgaagtgaagaaacgtcttactaattacgtagtatggcataagccggaccatttcccgagcgggaggttttttgatgagacggcgtatagcattcagaaaaaagacggtgaagaccgttttgtaaaacgcgctggtttggaaagctttatcaaacctaatgcccaaaaaacgattgcaaacctggaaaaattgttgttttcggatacgataaaagaggccattctaacccagtttaaagaacggcttgccaaaggccttacgcaagaagaggctctttgcggcaaaaaagatgacccgcaagacgggatttattatcggggaaataaagtaaaaaaagcgaaatatatgtatttaaccgggcggggaataagagcgtttgatcctaatgctgataaggttattatttcacgggataaaaatgaaaaagaacaccaaaaaggatatcagaacggtggttatgcctgtatggattttgattccaaaactggtaaacgcattgcgcttattcctttatggcggtacaagcaaaaccaacatgtgccgccggaggtggtgcgggtttttctcggagatatgttgtatgacgggcaaacaaaacaattttataaagtgcagcaatttagtgctcaagctggtttagtattaaagctgagtacagaggttttgggcagcaccgtgcgaacttccaatcttaaaaattatagtgtggtattaacccgtaaagacatcgctaaattcaaaagcgaatgagtatacagcatttaatcagtattgacagggaagccaaactgtctgtggacaccgggcggcttaaaattgtgttttcccaggtgggagaaacccattttattgccgcctgcgacattgccgtgttgattttggcgcatccctgcatcagtatgtcgttggctgtgccgcaggaattggccaaaaacggggctgtcctcgtaacggcgggggaaaagtatttgcccgccgctttgagtttgcccgttgctacaaatatagatggcgcgcgccgaccccatttacaggttaaaccaggtagtgttgaggcggcaggtaattggtgggcccagctgatagaaagtaaaattttagggcaggctgcaatggccgctaattttgacgaaaccctttctacccgtttaaaactaattgccggtcatgtggagccgggagataaaaccggccgggaagcgcaggcggcgcagctttattgggcggggttttttgatgggttaaataatcccgttgattttcgggataagcagggcgctacagacccggtcaatgtttcactaaattatggctatgcggtattgcgggccgttattgcgcggagtttggcggctgccgggctttgtttgaattttggggtgggacactgccgcaaagacaatccttttaatttggcggatgattttatagaaccgtttcgttttttagtggataacgcggtgtggcggatttttaaaggttcgcaagtagaatgttttgataaagagattaaaaagcagttgctgtcttctttgttggcaagcaccgtaaacattgcagggaaggaataccgcttattccacggtattgattttgcggtaaatagcttttgcttaagtttagaagattcccgccgaaggctgctgcttcctaatcagcgggtccggcctggtaaaacgccgtcggcgatgttatggcaagctgtgcaatttcaagatgaaacccaatagttggcgcattatgtgggtagtggccgtttttgatttgccgacacatactaaaatccagcgtaagcggtacgcgggatttaggaaactgttgcttcataatgggtttagtatgatgcagttttctgtatatgtgcgcaatatgcctaccatgcagcaagcgcaggcgataattaaacagctgggaccgcagactccgccacagggaaaatgtgcttttatgttgattaccgataaacaatacggcttaacaaaaaacttttatgggccggctatgcgtcaagaaaaaattcctaagaaatatgagcaattgattttatttgatgagtgataaataaaacccgctttgtaattattacaaagcgggttttaaaacgaatagaagtgagaatgtattagattctcttttgtgggctttaatgcccttgttacctaagttgaggcacaaataagagtaaggtttctgaaattattgtagcaaaaatacttattttttagcaactttttatagtcagacaaatcttaccttactcttaggt

SEQ ID NO: 4393 - DNA, 13440 bp, synthetic construct
  misc_feature 1..13440: note = Synthetic
  source 1..13440: mol_type = other DNA
gtaaatcatcacaagaaggctgagtctacggactcggagatagggtgatagaagacaacgtagggaagtgaaacatctcagtacctacaggaaaagaaatcaaagagattccctgagtagtggcgagcgaaatgggaatagcctaaaccagcccccgcactgtatatatccgtggagggtatatagagtgcgtgggttggggttgcagggcttgctcgtgttagacacaaagagttaccaagcaatcagatagttgaacggtctggaaagtccgaccaaagagggtgatagtcctttaaacgaaatctgattgtctcttagcaagtacctaagtaccactggtcacgtgcaatccggtgggaatccggggagaccactctccaaggctaaatactctctggcaaccgatagtgaaccagtaccgcgagggaaaggcgaaaagaaccccgagaggggagtgaaatagaacctgaaaccgtacatctacaagctattgtagcactatgcccgcaagggaatgtgcgacagtgtgcctgttgaagaatgatccagcgagttaatgtgccgagcgaggttaagggctgaagaggtccgaagccgtagtgaaagcgagctcgaatagagcgaatagttcgtcatattagacccgaagccaagtgatctaaccctgtccaggctgaagttcgcgtaacagtgaatggagggccggagtgttaaacgttgaaaagtttctacatgaggtggggttaggggtgaaaggccaatcgaacttggtgatagctggttctccccgaaatagctttagggctagcgttgagatttaacccgagggggtaaagcactggtagatttagggggagcgaccctccttccgatgtctgtcaaactctgaatacctcggcggatatctcagcagtcagttcgtgagggataagcttcacgtgcgagagggaaacagcccagaccgtcaatttaggtcccaaaatgtatgctaagtggtaaaggatgtggatttacttaaacagctaggaggttggcttagaagcagccaccctttgaagagtgcgtaatagctcactagtcgagtgaatctgcgccgaagatgactcggggctaagcatactaccgaaattacggattgcatagaagttcgcttttatgcagtggtaggggagcgttattagcagctgcgaaggtataccgtaaggagtgctggagcgctaataagtgagaatgctggaatgagtagcgataaggaaggtgagaatccttcccgccgaaaatctaaggtttccttgagcaacgttcgtcggctcagggtcagtcgggcctaagctcaggccgaaaggcgtaggcgaaggacatcaggttaatattcctgaactatagtaagcgcgtcataacctagggagggacgcagcagagtaaaccatctggctatatgccagttcaaggccgtaggcatcttcgggtaggcaaatccgtccggaggctaagccgaaaaccgagtacgagtaaccgcaaggttgcgaagtggtccaatcacactgcctagaaaaacttcgtagggagttcttactataaccgtaccgtaaaccgacacaggtggatggggtgaaaatcctaaggcgcgcgagataaccatcgtcaaggaactaggcaaactagctccgtaacttcggaagaaggagtgcccaagtaccggtgcagcaatgtattgggaaagggtcgcagtgaattgggcttcgtgactgtttaacaaaaacttagggctctgctgaaatctcaagatgatgtatagggcctgatgcctgcccggtgccggaaggtcaaggggagtggttagccgcaaggcgaagctgcgaacttaagccccggtaaacggcggcggtaactataaccgtcctaaggtagcgaaattccttgtcgggtaagttccgacctgcacgaatggcataacaaagaagccgctgtctcgacggtgggctcggcgaaattgtggttcaagtgaagacgcttgatgcatgcaacaagacgaaaagaccctatggagctttactgtagcttgttattggattacggttttcaatacgtagtatagctgggagccattgaaacatcccttgaggggggtgcggaggcaacagtgaaataccagcttttgtgaattgtggttctaacctattacccgtgaatccgggttggggacagtggcaggtgggcagtttgactggggcggtcgcctcctaaagagtaacggaggcgttctaaggttccttcaggccgaatagaaatcggccattgagcgcaaaggtagaaaggagcttgactgtgaggacgacggtccgaacaggtgcgaaagcaggacttagtgatccggtggtccctcgtgggagggccatcgctcaacggacaaaagctaccctggggataacaggctgatcgggcccaagagttcacatcgacggctcggtttggcacctcgatgtcggctcatcacatcctcccgctgaagcaggtgggaagggttgggctgttcgcccattaaagtggtacgtgagctgggttcagtacgtcgtgagacagtacggtctctatctgttgtatgcgcaggaaacttgagaggagttgtccatagtacgagagggcctggatgaacgaacctcctgtatatcagttgtctgtaaacaggcatagctgattagcggtgttcggtagggataaacgctgaaagcatataagcgtgaaacccgcctcaagataaggtttccctggtagattaactacccagaagacccccggaagactaccgggttgataggcagagtgtgtaagcacagcaatgtgttcagctaatctgtactaataggtcgtgaggcttggccatattctttaatcctatagataaagaattgtgagtgtaacacttgcgcttttctaacttatctgacgttggaagatatcgatgacccgctaatcccggcgagaaggtttccaacgataaaggaaccggttgcaatagacaagttccttttaaaatttgttcttttacaagaggctagaatgagactgataataattccgacgaggccacacccgttcccattccgaacacggcagttaagctcgtaagggtcgatggtattggcgcccaattcggcgctgagagagtagatcgttgtcggtctcatcctagccttttgtttaaggtgatttgaaaccccgctaacgcggggttttttgttttatacccgagggagaagaaagcattaaacaggttatccttaccttaatgctcttggaattacgggggatatcgtaaaaaggcacgcgaaatcttttgaaaggctctcttttgcatgaaggggggtgctatcttcccctagaataagcagtgcgtcccttgaaaaatgcaaccaaggaacatatcatttcttcccgaaatggacttatccctcttttagcagttggctacacccccaaatatatccaaatctttattgaaaattacttgaccatacagaactgcgcgcaagaccttcaagcataatatagtgcgctcaatcgcgtgcatccgctagtaaactttccttttgaagggggagtggtgggtaaaattaagcgaagccgaaagtttttaactacaagaaattttaacccccactaacatatgggttgatgtcgttgaactgagaaggataggaatatcgttgccagcgaaaatatttaaggggctacctagaaatacacgaaaagaccgttacagaatatgtatttgatagcctttacagagaaaaaatatgaatcctaaaatttggaagaatcctcaggaaaaaatacattacctttgttccattaccccgctatcccatattaagttaatagagtttacttaattctgttcgtgtgatatctaatcctaatatctttaaagaatttttttccaattattgtaataaaaggatagcaaccagttctatgaatgtacatcaagaaacttattttaatctggcctggaaataatattaaaatatctagtgcttttgtgctctttattgcgctatcaccccactaccccttgtgcttgcataaaaaaacggctttttgtatcttatgggtatatacttgcttttctttctcgttaaatttttctattggagcatactatggcaaattaccgttggggtattgatttgggcacatcttctattggcgtggccgtttacgagacggacaataacggaaagattatttccttaaaacatttggacagttatatctttggcgaacctgtggcacccaaagaaatggtaactttaaacaccgcccgccgttcggcgcgtttgattcgccgtcaggtggagcgcaaggttgcccgccttaaaaaaatgtcctatattgctaaatccttgggggttacgccggaagttttgcgcgccacgccagaggacgttgtagccttgcgtgccaaagcggtgcgggaggaaatttctatcccgcaacttatcaaggtgctgagccatatagtcaaaaaccgcggctacaaaggtaccttgtccgcagacgacaaaggcaccgtaggtaaaaaattatcccaaacggcgcaagcccttaccgggggtaaaaccttgggcgaactcttgtatgagcgcaaaacgcaggctaacggccagccgtggcggaaggtggaagaagacggcacctttatttaccgccaattagtagaggatgaatttgcacgcatttgggacacgcaatccaaatttcaccccgagttaaacggctcctacgctgtgtggggagataaaatgttccccgatttcccgggcaaaacggaaatttcgcttaaagatgcattccactcggcaatgttttaccaacgtccgataaaatgggaattggaaactgtcggaaactgcgaaatttatcccacggaaaagcgtgccgcggcggcccaaattgcctatcagcattaccgtatggcaaagactctggccgatttgcgcgtacgcaataaaaacacgcgcgaaagtgtcccgcttaccttggcgcaaaagtcgcaactttttgagtttttggacgcgcatacagcggaatattcgccggaaaccaaggccgttccgtttgccacgctatataaggtgttgggcctgccggaagggtgcacctttactttggaccgtacctatcacgccagaggcgggctgaaaggcaatacgaccttgtactcgtttgaaaaggcgggtgttttaaacgcgtggtccaatttaacagacacggtacaagaattggtattggagttttttgccaatgtttccaacttgtcggacattgaggataattcagacgcgtatataaaagagcgtgtgccggaattaaccaaaaacttaaaacccaccccgcaggcttgcgaagcgtgctaccagtttattttgctgttaaaggcgcgcggtgtactgggtgaactagtattggagcaagggcgcagttcgtatagcattaaagcgcttaaaatgctgacggagcgcattatacagggcgaacaggaagcggatattttggcagaaatagaagcgcaaaaaacgcatccgcaaggcaaattccgctctaccgaggctattttgaaagagcaagccattaacgacccggtggtttcccgcgcactggcggaatttagacgggtcgttgcttacacattgcataaattcggacagccgtccgaagtggtggtggaactttcccgcgatattaaaaattctttgcgtcgccgtgattttttggaaaaacaaaataaaatccaagcggaaacgcgcaaagaggccattacggccctgcaagcaaatcatacattagtcagcccccgcaatatagaaaaatatttgctatgggaagaacaagagcattattgtccatatagcggacggcctatttcctttggacaggcctttgacgaaaagcaaacacaggtggaccatattatcccgcaacgcggagaaattgctgggccgaacgtgtttgaaaataaggtattggcgtttacggaccaaaataaagataaaagcaaccgcttgccctacgagtggaaattccaagcggatatagacgattacttggccttgcaagccaccaacaagcagaaaaagaagaataaagaaacggttaattatgatttcggacggcatagcccgctgattaattttgtgcagcatttgtggacgctctattccaaagaaaaaaaggggtattactccgccagagatcataaatataaacccacgcaaaagggggcgcgtattttgcgcaaaattaataacttactggctacgccgggtgaagtaaagcaagattttgtggcccgccaaaaccaagaaaccgcttggataggcaaaatcgttttggattggtgcaaggacttttgccccaaagttacgccctcttacggggccttaaccgcctatttgcgcgggcagttacattttgaggatgttttgcctttaatccggttgcaggagggcaaacctctctacaacaaagatgataaagaaatagattccgccaaatggcaggaactatataccaaacatcagttaaattacaaagaggccgggccattgcaggcggattttgagcaatattgcaaggagcagaacatactgacggaaagcgataaacaaaaggcgtattttaattttgtgcgggaacaacgcacccaactgcaatttaacaaacggtgcgaccaccgtcatcacgcggtggatgcggctgtaatcgggttgtgcgatttgtctttggtacaaagggccgctatccataataaaaagaacggaaccttgtataaaatagaagggataaatccggatggcacccgcaataaagataaagacgttccgggcctgatgctggataatatcccgcaatacgccacattgcgcgcggcggtgcaagcgcgcctcaccaactatgtggtatggcacaagccggaccattttcctagcggcgcactgtttgaccaaacggcttataatatacttcccaaagatggcgaaaaacgctttgtaaagcgcgccccgctcgttagtttcttaaaatcaaacgaaaagaaaaccttggaaaacttggagaagttgctgttttgcgacgcggtaaaaaacgaaattattacccagtttaaagaacgcctggcgcaagggatgacgcaagaagaagccttgtgcggaaagaaagataacccgaccgacgggatttattatcggggcaataaagtaaagcaagtaaaatatatgtatttagttggacgcggtatccgcgtgtttgatgaaaacgcggataaagaagtttttagcacggataacgtcggtacccagcacaaaaaaaactatcaaaacggcgggtacgcctgtatggattttgacgaaaaaacaggcaacaagttggctcttatccctttgtggcaatattcaagcaagaaacaagtatctcccggtgtggtgcgcgtgtttattggggatatgttgtttgataaggaacagaagcaattttacactatcaaacaatttagtgcacaggctggtttggtattgcaattaaatacagaagttcaaaaatttgaagtcaggacttctaatcttaaaaattacagtgtggtatccactcgtcaggatatcgccaaattaaaagataatgagcatacaacatctgattagtattgatagggaagccaaactgtctattgatacgggtcggctcaaaataaccttccaaaacgcaggcgaaacgcattttatcgccgcgtgcgatatcgcagtgctgattttggctaacccgtgtatcagcctgtctttgtccgtttatcaggaactggcaaaaaacggggcggtaatcattacggcgggggaaaaatatatgccttgtgctatgagtgtgcccgtcggtgtgaatatagacggttcccgccgaccgtttttgcaagcccaacagttgcatagcgagtccgccggacaatgctgggcgcagttgctctcgtccaaggtgtcgggccaagccttggtggcaagtgcgtttgcttcggaacttgcggagcggcttaaattaattgccaaacacattgagccaggggataaagattgccgcgaggcacaggccgcgcaactgtattggccggaattttttaaatcgcttgataatcccattgattttagggataagcaaggagccacggacccggtaaacattgcactaaattatggttatgccgttctgcgggcgattgtggcgcggggactcgccggggcgggcctgtgtctgaattttggtgtggggcattgccggaaggataatccttttaacttggccgacgattttatagagccttttcgttttttggctgaccgggccgtatatcagatttttagggataatcagcccgcctgttttgataaagaggttaaaaagcaactgctttccgcgttgcttgcaagcacaattactattacagggaagacgtaccgcttattccaaggtgtagattttgccgtcaatagttattgtttaagtttgcaagatacgcgccgcaaattgttgttgcccaatttgcccgcgcgtcccggaaaggctcctgatgccctcctgtggcaagccacgcagttcccttatgaaccccaatagttggcgcattatgtgggtggtggcggtgtttgatttaccgacgcaaaccaaaatccagcgcaagcggtacgcggggtttcgcaagttgctgttgcataacgggtttagtatgatgcagtattccgtatatgtgcgcaatatgcccacaatgcaccaggctcaggcgttaatcaagcagttgggcccgcaaacgccgccgcaaggccaatgtgcttttttgatgattacagacaaacaatttggtctgacgcgaaacttctatgggccgtctttacggcaagaaaaaatccccaaaaagcacgagcaactcatactttttgaggatttttaattatttacagtcaaatcaaaactaatttaagtgggaataaatccctttgtgggctttaatgcccttgttacctaagttgagacacaaataagaataaggtttctgaaattattttaccaaaaaggtttattttttaacaactttttatagtttatcaaatcttaccttattcttcggtgcctaataggaacttatccaagtgataggcttccaaggtttgccaaatcttaccttattcttcggtgcctaataggaaccgcggcaagcaaaggatttgacgagagtatcaaatcttaccttattcttcggtgcctaataggaacaaggaggtggcgagggtaaaccttgcccctcaaatcttaccttattcttcggtgcctaataggaactgtagaacatatcaaggatattttgcaagtcaaatcttaccttattcttcggtgcctaataggaactcgtcggtgtcacgaacgcgcacgcgcgcccaaatcttaccttattcttcggtgcctaataggaacgtatcataaaatcttatcctattaaaaatacaaatcttaccttattcttcggtgcctaataggaacacctctctttttttttaatctggggcattccaaatcttaccttattcttcggtgcctaataggaacagtccctgtccgccatattactcgacctcccaaatcttaccttattcttcggtgcctaataggaaccaatcatagccaaactccctcattctctttcaaatcttaccttattcttcggtgcctaataggaacagtaaagataaaaacatcgtccagcgtcttcaaatcttaccttattcttcggtgcctaataggaactccaaactataaatccctgtgggagataaacaaatcttaccttattcttcggtgcctaataggaaccagaccttccgaaagggccgatttgcaattcaaatcttaccttattcttcggtgcctaataggaactaggcaatttttacccaacttacaagtaagatttctatttttttcaaagaactacttatattttaataagcgcgcggcgcaaagtcaaggagtagtattttaatttcgccgcgcaccttatccgctccgccgctaggtgtctggggaaaaataagcccctgtgctgtgcaaataattgtacaataaaataagttatgaacttgccgcaagaatttatccaatataccgctaatttatttggctcccagcgttgggagcggtttgagcagtcttttgtgcaggaggcggcggtaagtgtgcgcttcaacccgtggaaagccaagggcgaagccatttttccacaggctgagccggtgccgtggtgcgagggggccttttggttgaaagagcgcccgctctttacgcgcgacccacgctttcacgccggggtgtattatgtgcaagaggcaggctctctgtttttggaccacgccttgcggcattgggttacggggcctgtcagcgcgcttgatttgtgcgccgctccggggggaaaatctacccttatgcgggccgctttacccgccggttctgtgcttgtcagtaacgaaattgaccgccgccgtgccaatattctcttggaaaatatcctcaaacaaggccacccgggtgtattggttacgcataatgcgccaaaggattttgccaaaacaaatctgctgtttgatgttattttgacggacgtgccttgttcgggagagggccttttccgtcgggacccggccgctatcagcgagtggagcgcgcaaaatgtatatttttgtgcagagcggcaacggcaaattttgcgtgatatttggccttgcctcaaagacggcggcctgttgatttacagcacctgtacctttaatacgcacgaaaatgaagaaaatgtccgctggattgccgaggaactgggcgcggaacttttggcagtacccgtccgcccggagtggcaaattacgggaagtttgcttggcggctggacggaacccgtatatcgttttatcccgggtacaacgcgcagtgagggcctttttatggcgttgcttcgtaaaaaggggggaaacagagcctttgccacattacccgcctctttgcgcacacaagttaaaaaatatccgcttttgcatttgctttatgacggtcagcccgcatttgaagccaaggggcgggagcaaattccgtctattgcacaggccctttctcttactacggaggaaacctcctttccccatgccgaattgcctttggacgcggccttgcgctatctccaccgggaagccttagttttgcctgcgggcacaccgcgcggctttgtgttggtaacgtatcaaggatatccgctcggttttgtaaagaacttgggcgaccgcgccaacaacctctatcccaaaccttgggccatccgcagtttgtaaaaattaatcccttatactatgcctcgcaaccttttggcgatgactctatttgttgagaaacatctttttagaccagtatggtttaattgggagcccagtctctgacccttgactttcattttcgtttttaataccatttccctatcagaggagaggactggtcctgatctgtaatcacttcctcgggacggtaaaacaaaatggatacgtcggaggtgatatcttgattattttgtatcaccgcccagtgcgtctgataggtctttggcttgccgtttacccataattcaaatttaaaatcatgcgcctcatcgcctaaatattcttctacagcaggcatatccggcagcgggaaaaatatctgtgtagtaatatctttatccgttgtatttccaaacaagtaattcacttctatttgccccgggcggatatataatgcttccgtttgcattttgataccgtcttgcttttcaaagacaactcctccggtaggaagtatcgtgccggccgtatcgttggaaaaaagggccagcggcaatgatattaaacagcaaacacataaaaaatttttcagcatattcttttccacaggcagctggaaaatatccggctgcctgataagtttatataggtcttttgtatctgtatactttgtattgtatcttattttgctcttttgcccgccaatgattgctgatgccttcgggtttggcggcttttccgttgacgctgccatacactcccggtacgcgtcctttccaagtgccggaatcacgctctctccctgttaatatggcggcataacgatattcgtatacatcagtgccatcccattgatatgtgtttgcactattttcagccggatcggacattttacgtactatcgccggactgctgccttcattttccgtgtaataatgcaactgagaaccatcttctttcgtttcactccaacgataattccaaactacggcatctgcatcctgatcatatccccatttcgctccggagaaagtaaacgtgtaatagaaacgcggatcacgattcttgaagaataaagaacggtcgtacccgtttatcgcctcaccatcatcatttacagctttggaaccatccgccatcgggaaaatatccaacatacccataggaacatgataaccggaaccactgccacccattgttttcaagcggattgttttctgccatccactatgttcatcatttttagaggtagagctagccaacagtttgaccataatcacctccttacattcctgattgtcaaacttgtagaacatttcattccagtctttggcggaattgccatacaaaccataaccttcgctgctcaagaaagcctgtgcttctagagtaatatccaacgcatctttccagcgtttactgcctgtattattccaagctgcattaaagatagggcttgcaaataccagcgccacgcggcttctgtatgccaatgcagcttccttggtcaaccgtccatactggtcacttccccattctttacgagtgggaagcagattcgcagcctcttttaaatcactcaagatctggttgacacatgtttccacactttcacgattataatctttagctccctcacggtcggccgccataagcactttatttaccacaggaacagctccgtatacacgtaccaaatcaaacaactgcatggcacggaagaaataagcctgtcctttcgctttttttatggcagcttccgacaagtcctgaccatatttatcaactccttccagaatttcattgcaactgcggatacggctatatggatcattctttatattcgtagccagattactgccaaaataagtttcacagtccgtagcttttttcaaacttctggaagcgtcaaatttcttctcgataccccatttctcctccgtataagttgaatagtcattccagttaccggacaagccgtatgactgtggaggggtcatacccgacttataaaaatagttataatacacattctgaatat

SEQ ID NO: 4394 - DNA, 10828 bp, synthetic construct
  source 1..10828: mol_type = other DNA
  misc_feature 1..10828: note = Synthetic
gggttatccgtaaaaccttttacttcttttctgtacacccatacgcccggggaatgaatggtgtaaatctgcgcggcggcgttatagcttaaatcctgtatgcgccggtagagttttattctgcgggctggatcggttgaacggacggcttcatctattaaagcgtcaagcgcggggtctttaaaagactgcgccaccgcgtaacgcccttttgaatgcaggaaaggaaagacaaagttatgttcgtcggggtaatcggctatccagccgcgcgcccacaaaggcattttggaagcttgcgtcttttccaggaaggaagcccagggcactccgcgcagttcaatattaaatttggggtttaagctttctatattcctttttaatatttcgcaggctgtctgccgcatttgcgagccggtattgtaagtcagcgtaaaagtaaatccgttttcccaaacttttccgttataggcttttttaaaatattcttccgccttttttaaatcaaagctatagcatggagcggatttctcgtaagaagccagcccgggcggcacgggcccgcaggcgcgcggggctttcccgcccattgaatcattgacgaaagcgtcataatcaaacgcgtgggcaaacgcctttcttatattaatatcctgaaagaaatccggcggtatgccttttccgtccagcctgccgctgccgatatccgggttcgcttcgggattgatgttaaaggtaaaaaatatcacggggtcggttttaagcctgggcaggcggtcctgcaccaccaaatccgggttatcggctatttggtccgtgaaagcgggggctatttccgcgatgtcaatgtcgcccgattccagcataaggcgcattgtgctttgttctggcacggttatcagctgcactccgtcaagcttgggcgcacccaaaatataatctttattggccgtcagataaattcttttggctgcgttatcccagcgttgaagcataaaaggcccgctgccgttggctttatcgaataaataagattctcctttgcctttattgttgtagtttttccaagtcgcttccgtgccgtcccattctccgttttttacggcccagtctttgcttattacgtaagaccacctcgccaatatcgaaagcagaggcgcaaacggacgtttcagttttattataagtttatcgccctgcacctgtacggcttcttccacggttttataatcaagcgttattgcgcctttggcgtcgcgggtggaagttactcccaaaatcggttccaaaagcagggtggaagggccgcttaccgcgtccgaaataagaaaacgttttaaggagtatgctgcgtcttccgccgttaacggcgaaccgtcgtggaatttaatatctttcctgatattaaaaacataagttttgccgtcgggggatataagtccgttttcgcgcgtgggcacttcttgcgctataagcggttcaaactcggtaagagatgatcctttaaatttaattaaagtgtcataaatgttcagcagtactccgtgcgtaaaaccgtcgtaggaaaacaccgggtcgaaagattccgcttccccgactatggccactgtaagtatattgttttgctgcttgggtgcgcaggatatcaaagaaaaaatgcaaaaaacacaaagaagcgaaagtatctttttcatttattcacctatggcgtaagccaagccttttttattttttatccaggctgacgcaaattgttttctgtcgtaaacgcggcgcacctctttttcggttttggcggccggatccataactactacgtttccttccgcatcaaaaccgcatattacgaccaaatgccccggggtagcttttgccgcggcgtttttaagagagccttctttataagctatggaggctataatcggtctgcctttgtaaagttctccttccgcctgcgccaaagaactgcaccttacgactgcggcgccaagcccttgctgcgcggcgaaagccgtattaagcggccaagtcccgtaaacgccggattcttcgtcgtaaacgcctttaagcgtattttccaaagaaactttctttccgtaataatttaaaaccatgcttaagcagactggggagcaaatcctcccgcgcagttttttatcggcatactgcatttggcttacgggttttaaaggtatttcaaaatcttttaaatccaaggtttccaatgccagggaagaatcgtatttggccccggttttagtaaaagccgccgtaagaaaatctattttcgctttgcccagaaccgtaagctggtatttaaacgccgacgcgcttttcttggggaagaggatatcgctttccacggaagcgaaagaatctttttggggtttaaacgtctttttataatccgcgctgacgtaaaaaagtttataaagtccgctccagccttcttccgtctttacggaaacttcaaccaaaacggctgaatttttgtttaattttgcgcttaaagagagcgttaaagaattaaaatcaaaaggggcttttatcgtttttgaagctattacgtaaaaacctttaaattgtgcgctgacagctaattgctctttggtaaaaatcgtattgtaaacgggcagaagggctatttgttttttgctgaggtggtgcatggttcggcctccagataaaaatcggggcacccgggctcgaaccgggaacctcccgctcccaaagcgggcgctctaccattgagccatgccccgaataatcaaattatacaaaaattagccccgctccgcccgtttgcaagggtttattggcgcggcgtaaaatatgctttaataaaaataaggagataacaaagaacaaaatgaatataaaaattataatcaaagccggtgttataggagtgcttatactgcttatgcttataccgctggctttcgtaaaaggcacggttgcgggccgtcttaattataaaaacgaggccgaacttaaaataacgtcggcctggggttcggaactttatatagccgcgccgatactgaatgtgccttatgtttatgccgtaaataaaaaagtggaaggacggcagattacggaatatgaaacttctttttataaatatacgccatcctctttggatgccgatgttgaaatactcccgcaaatacggcaaataggtatttttaaagtgccggtgtttacggccaaagtaaaaatgaaaggctcctttaccaagccggaagtgccgtcggaattatccgccggcgcggcgcaatcgggtaaggcctttgtttcgctggaggtaaacagccttaaaggaattaccgatactcccgttataaaatggaacggcgaaaccaaggaatttgaaaacgctcttgaaggcgaggccctcagggtttccgtccaaaaagtgcgcgaaggccaaggctattacagtgagaaaacttaccgccgctactcggacgattaccgccttaaaatgctttacgcgccagtcgcttcctcggaaaaagcggattttgagttggatttttccgtgcgcggcagcaattcaatatcttttatccctttggccaaagataatacttttaaaatggcttccgcttggccgcatcccaatttcctgggcggcttcctgcccgaaacgcgggaggtttccgccaaaggctttaatgctgaatggaaagtgaacaacctttcaagcggcataccggcttatcttaacggattcggggaggacttcccctttgtcagcgtgtctttgatgttccccgtggataattacagaaattccgaacgcgcggtaaaatacggcattctgtttgtagctttgactttcttggcatgttttgtttttgaaatcgtcaacaaaacgccggttcatccgttccagtatattttggtcggcacggccatggcggtgttttatctgctgcttttgtccatatcggaattttgcggattcggtttgtcttatataatttccgccgcggcgacaattgttttggtaagcgcatatatccgttacggcatacttaaaaaagccgataaaaaagtgtttggcgcggcggccggttttaccgcgctgtacgcctatctttacgtgcttttacagttggaggatttatcgctgttcttcggcacgctggggcttttcttcggcgtggcgttggtgatgtatgcgacaaggaacatcaactggtacgaataatttaacggttgatttaccaacgctttaatcttcaaacatttccttcaaacatccccggtttttacctccccggggatggtttttgttttaatgttaaataatctaaattatatatgtatttgtagtataatggagatatcgtttatactcgcctgatttatcttcgttttacaaaattttatttttagaggaatactatgaaggatattaaaactgatttttcttataggctgggagtggatttgggcacgtcttcaataggcgtggcaatatacggattggacaaagacggaaaaattaacaaacttgaacatttggacagttatattttcggagagcctataaaacctaaagacatggttacttccaatacggacagaaggacggcgcgtcttatccgcagacaaatggaaaggaaagccgcgcgttttagaaaaatagcctatatcgcaaaaactttaggcgttacccaaaaagacttatacgccataagaaaccaagacgtccataaattaagagccgaagctctgtttgcgcctcttacgctgacgcaactgataaaagtcctgtgccatttggtaaaaaacaggggttataaaggcggtataaaagacggaaccgttgataaaaagcttaaacaaacggaagcaatgctttgcgaaggtaaaaccttgggtgaacttttgtacgagcgcaaattgaacgcaaaaggcgcaccttggcgcaaggtggaagaagacggcacttttatttacagaaaagaagtggagcgggaatttgaattgatatgggaagagcaatcaaaacatcatcctcagctttctggaatatataaagtaacttatgaaaatatgtttcccgattttccaaatcagaaagaaatatctcttaaagacgctttccgttcggctttattttatcaacgtccgattaaatgggctttagaaagcgtaggctcctgcggaatatatccggaagaaaaacgcgcttgtaccagccaaacggcatatcaagactatcgattggcgaaagccgtcgccgatttgcgcctttttaactgttttaccggggaaacccgtcttttaaaccaagaacaaaaagattttatttttaattatgtttcaacttcttttaaagattacgccaaagaaactgtaatggttccttttaaaacgatttatgagaaactcggtctttccgatgctgagatgttcaccgttgaccgccgcggaggaataaaaggcggccttaaaggaaatactactttatacgctttttactcggttggagcgctgggagaatgggaatctttaaatgagaaatctcaggaactggttttggagtttctgaacaatatcacggattttgaagatattgaggagtgtgaggaaggatatataaagcaagaacttccaagactgacgaaaaatattaaatcttcagatgaaaatcaaaaacaagctgccgactttgttttatgtcttaaagaaaagggtgtttttttaaatcaaaatttcagattggaaaacgaccgcgcgtcttacggaataacggctttgaaaactctcgccggggaaataaaatccgggcgaaaagaggaagacgtcatagcggaaattaaacccgttgaagatgaaattaaagataaaatgcgttccgcagaaaaaataaaaagacaagaggccattaatgatccagtcatcggcaaagcccttaatgagtttcatcgagttatgcgatatattatctcccgttacggaaatccgtcggagattgtcgttgaactttcaagagaaattaaaaattcgttaaaaaggcgtgaatttttggaaaagcaaaataatgcagccgccaaagaaaggcaaaacgccatttccgttttgcaggaaaacgaggcacatgtcagcccgcgtaatattgaaaaataccttttgtgggaggaacaaaaacatatatgcccttacagcggggcggagatatcattattccaagcgttggatgaaaaacaaacccaaattgatcatatcatcccgcagaattggagcggcggttccggcgggccgaacacttttgataataaagttttagttcttacccaggaaaataaagataagaacaaccgcttgccgtatgagtggaaatttaaggaagatatatctcaatatctttcttggcgtagcgaaaataaaaataagaagaaaaagggagaacagactgaaaagtttggcagccacagcccgcttataaactttgtccagcatttgtggggtatgtacgccaaagaacaacaagggtttaagtcggaacgtacacgaaagtggacccctactcaaaaaggtgcgcgcattttacgcaaaataaataatttgcttattttgccggaacaggtaaaaagcgatttctcaaatcgtcaaaatcaggaaactgcgtggataggtaaaatagtgcttggatggtgcaaagacatctgccctagagttactccgtcttacggcgggttgaccgcttatttaagggaagctttccgttttgacggagttctgcccgcagttcgcatagcagagggcaagcccctatttgataaagacgataaagaaatagattctaaaaagtggcaggaactttttaataaagaggaattatcttatgataaagccgaggctttgaaaaatgattttgaagcataccttaaacaacaaagtgtgccttgcaatacggaagaagacaaacgaaagatgtttaaggctttttgtgccgaacaacgcgttttgcttaagtttaataaacgctgtgatcacaggcaccatgccgtagacgccgcggttataggtttatgcgatttatctatgataaaaagagcttccgatcacaacgctaagcacggaactttgtatacaataaaatgttttgatgaaaacggaactagaatacgggagaaagacattccgggttttaaagttgataatattccccaatatgatgttttaaaagaaagcgtcaaaaaatatcttacaaattatattgtatggcataagccggatcattatcccagcggaaagttctttgaagagacggcctataacgtcaaggaagttgaaggcgtaaaaagatatgttaaaagaaaagaacttaaagatatattaggagaagaaaaagacgttgataaactaattaaaatagtatgtgaactccttgcatgcgaaagcgtcaaaaaagaaatagtttcccaactgcgacagggaaaattagataatttcgtttttaggggaaataaaatcaacaaagttaaagtgtttttcaaaaggaaaggcttttataagtttaatccaaatgcggataaatcaataggcggttttaaatattatatgaataacccgcaaggcggatatgcttgtatggattttgataaagaaagaggggcacttatttgcggcgttcctttgtggaaatatgacgtcaataaacctgtaaaagataatatcgtacgtttttttattaatgacatggtttttgataaagaaacaaaatctttttacgtcatcaacaatttccaagtggttaatgggtggatgggcattgtgccggcgtcggaagccgttaaaaaagcaaaatccgtaagaaatattaaaaatattattttatgtaaaacacgtcaggatattgcaaagataaaaaaagaatatggcaaataaccatataataaatattgaaagagaagcccgcctttccgtggatttggggagattaaagatatcttttccttcggaggagcgcgcccattatattgcatttattgacattgcagttgtaattgcggcgcatccccaaataagtttttcaacgggggctcaacgggaacttgcccgcgctggggcgatactcgttacagctgatgaaaagttcatgccctgcgcattaaatattcccgtggggataaatttagagggtgccaaaaggccacatttgcaagctaagttctttaatgcgcaggaaaggggaatatggtgggcccaaattgttaaagccaaaatattggggcaggcgaaatcggccgaattgtttaataaaactcttaaggaaaagctgacgcttatttccaaaaaagtaatgcctgccgataaagactgcatggaagcttatgcggcgcaaacatattggccggaatatttttccgggttgggatgttccgtttcgtatagagaaaaacaaggcgctgcggatcctgtgaatatctcattaaattatgcttatgcaattttaagagcgattgtagcaagagcattggtatctgccggattgtgtctgaatttcggcgttggacattgccgtaaagataatccgtttaatttagcagatgactttattgagcctttccgttttttagccgatattacagtgtttgatatttttaacagtggtcattatcaagaatttaattctgaagtaaaaaaactgattttatccgggttgttaaaagcaagcgtaaatatttcaggtagggagtatcgattatttcaggcggttgatttttccgtaaatagtttttgcgtcagtttagaagatcctcgcagaaaactgcttttgccaaatcagccggaaagccccggcaaaaagccggcagagattactcctccgattcaatttaaatatgaaacctaacagttggcgtattatgtggataatggccgtatttgatttgcctacacaaaccaaaatccagcgtaaaaaatatgccggatttaggaaacttcttttgcataacggcttttcaatgatgcaatattcagtttatatacgccatacacctacaatacagtctgcccaagctttgataaagcggttgggcccgcatacgccggtccaaggcaaatgcgcttttgttttgattaccgataaacaatatggattaactcaaaatttttatgggtcggccccggcacaacaaaaaatccccaagaagcaagaacaactcctgctgtttgaggatttataaaaataatttaagtggagatgaaactcctttgcgggtttttaaacccattgttacctaagatgaggcactaaaaagtaaggtttctgtaattatcttacaaaaaatgtccgtttaattgcaactttttttaatcttacaaatcttaccttacttctcggtgcctaataggaacttgctgccgccgtatatgctggcgttgcggcaaatcttaccttacttctcggtgcctaataggaaccgatgcaggcttgttcaaagtttctgagtgcaaatcttaccttacttctcggtgcctaataggaacttggaaagcgaactccaccccaaataccttcaaatcttaccttatttctcggtgcctaataggaacaggtaacgggcgtgggcgcgccttgcaagtcaaatcttaccttacttctcggtgcctaataggaactatagacggcgtaaagcccggttctttcaacaaatcttaccttacttctcggtgcctaataggaacaataaaatacgtgcaatccgccgatgttttcaaatcttaccttacttctcggtgcctaataggaactcatactcgcactatcctcgttatcgggtacaaatcttaccttacttctcggtgcctaataggaactataaaaattgcatatagccttggcgtaatcaaatcttaccttacttctcggtgcctaataggaactgccgatatgctggtatatgcgaccggcttcaaatcttaccttacttctcggtgcctaataggaacccgtttcgtgctcatttaacaaagcctcgtcaaatcttaccttacttctcggtgcctaataggaacttgagcacttccgggaatatgattttattcaaatcttaccttacttctcggtgcctaataggaacgcaacttcccagtgggcgttatagaggggtcaaatcttaccttacttctcggtgcctaataggaacgctctgctcgtccgcgtcaaaggcgcgcgccaaatcttaccttacttctcggtgcctaataggaacggattataagctccgccacctgcccgtcgtcaaatcttaccttacttctcggtgcctaataggaacttcattagcaaaaatacgcgcgcaagttgtcaaatcttaccttacttctcggtgcctaataggaaccgatattccggccgaagaattgcgcagaaccaaatcttaccttacttctcggtgcctaataggaacagcatcaaccactttataaagcacaaggcccaaatctcaccttacttcttggcgcttaatagaccctaatagagcatagatagtgacagtcctaaattaaattgtcaaatagctgggtaaaaagcctatgcatttataaatccgccaaactttaaattaggcaaacttataacttatattattaatttgtattagaatgtgtcaagagcgtgtttggcatctacagatattgaacttttgaccagacagccctaaagcctttaatgtgtaatccattggggcatccaatgaatgcgttgatgcgatctttgtgtattacaccagactaagtacctcattagcttgcggcttactttttctctatcataaacattttcccggtttacatt

SEQ ID NO: 4395 - DNA, 7382 bp, synthetic construct
  source 1..7382: mol_type = other DNA
  misc_feature 1..7382: note = Synthetic
acgagataggagtccgtctcgtgggctcggagatgtgtataagagacagtttcacaacattccaattgggaaaaagtggtcccaaattgggatataaaatcccatttataactttcttggtactcatcactaaaaacccaatgaatatattttgagcaaatttctttaaatgacgtgtttttcatatttaaatatcacttgtaaggtattatgatatagtatctggaaatcacactttctattcttctaattatattaatatcatattattgtaataaaggatagcaaacagttctatgaatgtacatcaagaaacttattttaacctggtctggaaataatattaaaatatctagcgcttttgcgcgctttattgcgccatcatcccacgactccttgtgcttgcataaaaaaacggctttttgtatcttatgggtatatacttgtttttcttcccagttaaatttttctattggagcatactatggcaaattaccgttggggtattgatttgggcacatcttctattggggtggccgtttacgagacggacaataacggaaagattatttccttaaaacatttggacagttatatctttggcgaacctgtggcacccaaagaaatggtaactttaaacaccgcccgccgttcggcgcgtttgattcgccgtcaggtggagcgcaaggctgcccgccttaaaaaaatgtcctacatcgctaaatccttgggggttacgccggaagttttgcgcgccacgccagaggacgttgtcgccttgcgtgccaaagcggtgcgggaggaaatttctatcccgcaacttatcaaggtgctgagccatatagtcaaaaaccgcggctacaaaggtaccttgtccgcagacgacaaaggcaccgtaggtaaaaaattatcccaaacggcgcaagcccttaccgggggtaaaaccttgggcgaactcttgtatgagcgcaaaacgcaggctaacgggcagccgtggcggaaggtggaagaagacggcacctttatttaccgccaattagtagaggatgaatttgcccgaatttgggatacgcaagccaaatttcaccccgagttaaacggctcctacgctgtgtggggagataaaatgttccccgatttcccgggcaaaacggaaatttcgcttaaagatgcattccactcggcagtgttttaccaacgtccgataaaatgggagttggaaacggttggaaactgcgaaatttatcccacggaaaagcgtgccgcggcggcccaaattgcctatcagcattaccgtatggcaaagactctggccgatttgcgcgtacgcaataaaaacacgcgcgaaagtgtcccgcttaccttggcgcaaaagtcgcaactttttgagtttttgggcgcgcatacagcggaatattcgccggaaaccaaggccgttccgtttaccgtgttatataaggtgttgggcctgccggaagactgcacctttaccttggaccgcacttatcacgccagaggcgggctgaaaggcaatatcaccttgtacacctttgaaaaggcgggtgttttaaacgagtggtccaatttaacggacacggtgcaagaattggtattggagttttttgccaatgttgccaacttgtcggacattgaggacaattcagatgcgtacataaaagagcgtgtgcccgaactaactaaaaacttaaaacccaccccgcaggcttgcgaagcgtgctgccggtttattttgctgttaaaggcgcacggtgtactgggtgaactagtattggagcaagggcgcagttcgtacagcattaaagcgcttaaaatgctgacggagcgcattatgcagggcgaacaggaagcggatattttggcggacatagaagcgcaaaaaacgcatccgcaaggcaaattccgctctaccgaggctattttgaaagagcaagccattaacgacccggttatttcgcgcgccttggcagagtttcgccgcgtgatttcatatacgctgcataaattcggacagccgtccgaagtggtggtggaactttcccgcgatattaaaaattctttgcgtcgccgtgattttttggaaaaacaaaataaaatccaagcggacacgcgcaaagaggccattacggccctgcaagcaaatcatacattagtcagcccccgcaatatagaaaaatatttgctatgggaagaacaggagcattattgtccatatagcggacggcctatttcctttgggcaggcatttgacgaaaagcaaacccaggtggaccatattatcccgcaacgcggagaaattgctgggccgaacgtgtttgaaaataaagtattggcatttacggaccaaaataaagataaaagtaaccgcttgccctacgagtggaaattccaagcggatatagacgattacttggccttgcaagccaccaacaagcagaaaaagaagaataaagaaacggttaattatgatttcggacggcatagcccgctgattaattttgtgcagcatttgtggactctctattccaaagagaaaaaggggcattactccgcacgcgaccgcaaatggaaacccacccaaaagggcgcgcgtattttgcgcaaaattaataacttactggctacgccggatgaagtaaagcaagattttgtggcccgccaaaaccaagaaaccgcctggataggcaaaattgtattggattggtgcaaggatttttgtcccaaggtaacgccctcttatggggccttaaccgcctatttgcgctggcagttacattttgaggatgttttgcctttaatccggttgcaggagggcaaacctctctatgacaaagatgataaagaaatagacggaaataagtggagagaattgtatgcccctcaacaagactaccgtcaggctaaggctttacaggcagattttgagcaatattgccagggaaaagacttggctacggaaagtgataaacaaaaggcttttgtagattttgtgcgggagcaacgtacccaattgcaatttaacaaacggtgcgaccaccgtcatcacgcggtggatgcggctgtaatcgggttgtgcgatttgtctttggtacaaaaggcctcccgccaccatgggaaatacggtaccttgtataaaattgagtggatagatgagaatggaacgcggaatcgggacaaagatatcccgggttttacgctggataatatcccgcaatacgccacattgcgagcggaggtgcaagcgcgcctcaccaattatgtggtatggcacaagccggaccattttcctagcggcgcgctgtttgaccaaacggcttataatatacttcccaaagacggcgaaaaacgctttgtaaagcgcgccccgctcgttagtttcttaaagtcaaacgaaaagaaaaccttggaaaacttggagaaattgctgttttgcgacgcggtaaagaacgaaattattacccagtttaaagagcgcctggcgcaagggatgacgcaagaggaagccttgtgcggaaagaaagacgacccgtccgacgggatttattaccggggcaataaagtaaagcaagtaaaatatatgtatttaaccggccgcggtatccgcgtgtttgacgaaaacgcggataaagagatttctagcacagataaagttggtgtccagcacaaaaaagcctatcaaaacggcgggtatgcctgtatggactttgacgccaaaacaggcaaaaggttggcgcttatccctttgtggcaatatccaagcaagaaacaagtaccttccggtgtggtgcgcgtgtttattggggatatgttgtttgatagagagaatagaaaattttataaaatcaaacagtttaatgctggtaaaggtgttggatttttagaagcaagcgaagtaaaaggcgaccttgcctttacttccaatcttaaaaattacagtgtggtatccactcgtcaggatatcgccaaattaaaagataatgagcatacaacatctgattagtattgatagggaagccaaactgtctattgatacgggtcggctcaaaataaccttccaaaacgcaggcgaaacgcattttatcgctgcgtgcgatatcgcagtgctgattttggctaacccgtgtatcagcctgtctttgtctgtttatcaggaactggcaaaaaatggggcggtaatcattgcggcgggggaaaaatatatgccttgtgctatgagtgtgcccgtcggtgtgaatatagacggttcccgccgaccgtttttgcaagccaaacagttgcatagcgaggccgccggacaatgctgggcgcagttgctctcgtccaaggtgtcgggccaagccttggtggcaagtgcgtttgctccggaacttgcggagcggcttaaattaattgccaaacatattgagccaggtgataaagagtgccgcgaggcacaggccgcgcaactgtattggccggaattttttaaatcgcttgataatcccattgattttagggataagcaaggggccacggacccggtaaacattgcgctaaattatggttatgccgttctgcgggcgattgtggcgcggggactcgccggggcggggctgtgtctgaattttggtgtggggcattgccggaaggataatccttttaacttggccgacgattttatagagccttttcgttttttggcagaccgggccgtatatcagatttttagggataatcagcccgcctgttttgataaagaggttaaaaagcaactgctttccgcgttgcttgcaagcacaattactattacagggaagacgtaccgcttattccaaggtgtagattttgccgtcaatagttattgtttaagtttgcaagatacgcgccgcaaattgttgttgcccaatttgcccgcgcgtcccggaaaggctcctgatgccctcctgtggcaagccacgcagttcccttatgaaacccaatagttggcgcattatgtgggtggtggcggtgtttgacttaccgacgcaaaccaaaatccagcgcaagcggtacgcggggtttcgcaagttgttgttgcataacgggtttagtatgatgcagtattccgtatatgtgcgcaatatgcccacaatgcaccaggctcaggcgttaatcaagcagttgggcccgcaaacgccgccgcaaggccaatgtgcttttttgatgattacagacaaacaatttggtctgacgagaaacttctatgggccgtctttacggcaagaaaaaatccccaaaaagcacgagcaactcatactttttgaggatttttaattatttacagtcaaatcaaaactaatttaagtgggaataaatccctttgtgggctttaatgcccttgttacctaagttgaggcacaaataagaataaggttcctgaaattattttaccaaaaaggtttattttttaacaactttttatagtttatcaaatcttaccttattcttcggtgcctaataggaactaggcaatttttacccaacttacaagtaagatttctatttttttcaaagaactacttatattttaataagcgcgcggcgcaaagtcaaggagtagtattttaatttcgccgcgcaccttgtccgctccgccgctaggtgtccgggggaaaataagcccctgtactgtgcaaataattgtacaataaaataagttatgaacttgccgcaagaatttatccaatataccgctaatttatttggctcccggcgttgggagcggtttgagcagtcttttgtgcaggaagcggcggtaagtgtgcgcttcaatccgtggaaagccaagggcgaagccatttttccacaggctgagccggtgccgtggtgcgagggggccttttggttgaaagagcgcccgctctttacgcgcgacccgcgctttcacgccggggtgtattatgtgcaggaggccggttccctatttttggaccacgccttgcggcattgggttacggggcctgtcagcgcgcttgatttgtgcgccgctccggggggaaaatctacccttatgcgggccgctttacctgccggttctgtgcttgtcagtaacgaaattgaccgccgccgtgccaatattctcttggaaaatatcctcaaacaaggccacccgggtgtattggttacgcataatgcgccaaaagattttgccaaaacgaatctgctgtttgatgttattttgacggacgtgccttgttcgggagagggccttttccgtcgggacccggccgctatcagcgagtggagccctcaaaatgtatatttttgtgcagagaggcaacggcaaattttgcgtgatatttggccttgcctcaaagacggcgggcttctgatttacagcacctgtacctttaatacgcacgaaaatgaagaaaatgtccgctggattgccgaggaactgggcgcggaccttttggcagttcccgtccgcccggagtggcaaattacggaaagtttgcttgcggggtggaaacaacctgtgtatcgtttcatcccgggtacaacgcgcagtgagggcctttttatggcggtgcttcgtaaaaaagggggaaacagagcctttgccacgttacccgcctctttgcggacgcaggtaaaaaaatacccgcttttgcatttgctttatgacgggcagcccacctttgaagccaaggggcgggagcaaatcccgtctattgcacaggccctttctcttactacggaggaaacctcctttccccgtgccgagttgtctttggacgcggccttgcgctatctccaccgggaggccttagttttgcctgcgggcacaccgcgcggctttgtgttggtaacgtatcaaggatatccgctcggttttgtaaagaacttgggcgaccgcgccaacaacctctatcccaaaccttgggccatccgcagtttgtaaaaattaatcccttatactatgcctcgcaaccttgtggcgatgactctatttgttgagaaacatctttttagaccagtatggtttaattgggagcccagtctctgacccttgactttcattttcgtttttaataccatttccctatcagaggagaggactgactatatgcaacacatattgaggcttgcctaactgtccatatagcgaattgaacggtttatctctcctcaatgatgtcggaaatgagaaggatgctgtaatcctttctttccaaaaaattatgaggagggatttatgagaagagggaaaaagaaggctttcactctgacagagttgcttgtcgtcgtcattgtgatcggcgtattatccgcggttgttttgccgaaattcagcaaagtaattgaaacgcgcaaaacgacggaagccgaagaaatgatggcaa

SEQ ID NO: 4396 - DNA, 5440 bp, synthetic construct
  variation 4941..5111: note = note, n is a, c, g, or t
  misc_feature 1..5440: note = Synthetic
  source 1..5440: mol_type = other DNA
cccagaaaacctttgcctcataagactgcgccaaccttaaataatggactttatgacttttacataaataatttacttcaataagaaaattaatagaccagaaaagcacactccaataccgaattatacaaaacacaccttgcgtcattagaaacccaactcatagtcgcagcggtccgcctttcttacgcccgcaccacaaaatgaaaaccacctgcctaatctctacacaccttattggtactgttggtggcaatgggtcccctgcattagttgggcacgaacaggttgaagacgaggcatataggatagcccttgcatcttgccataactccaccatagattagtttgcgtatcttaaaaaagttattaccttatattttaaatggacttccttcataggtcgcctttacgactgggaaattttaccacatacttggtagccccccggctgaaatccttttatcttttttctattgttttgccgttccattgggttaaattgggcgtgtggattaaataccactttgtaaaataatcatcaatttggaaaatttccgcttttacagccctgcgcagtcttttaacttgttttaaatagccactcttggtaaagtaatgtcctaatttacaaggtccctgccaaaatttcttggataatatcggtgcgcgctcaaaaaaatcagtatccaggcgcatttccttttcgttattgggacggattttataggctagtccatctatatttttaagcagcgaaagcgatttaagccgcggggtaagttcaaaagccattatacgtatttgtatataattatctttcctgcatatagtagtagttagcaactccaaaaatttgccctcacgcaggcggcacatatcgtacatataccccaatcccgcgtaatatccaaaccaagcgtccttgaaaggtgcgctaacaaaatttttctccttcaaaatagggagaatatcgcgcaggaaaacagtattcctcgctagtagtatttccttgcttgttgccttataccaaaacatttttcaaatccttggggctatcccgtccacatcttgccaaagtatagcatttttagcgcccaaacttacctgccgcccgcctaaaaaaatatcaggcgacaaaaggttgtcgccggagcgtgctatgataaatgtatggaacccttaatagaagcatacttgtctggtaacgagaagcgcctccgccaactggtgttgtccggggcggatgtcaatcggccaatgcgtgagtacccgggcgatattttgttggagccttgtttggctaaaaatactcgcttggtaaagtttttgctaagccacggtgcccagcccacggggaaactcctatcagacctgattgggtatagcggagttttgtccgtgcgatatctagccagacttttgcggcggttgttaaaggccggggcagcccccaatgcacaagagcgcgggcacacgctcttgtggtgggccgcggagagcggcgagccgcgtacgcgcgacaatgcgcggctggcgtctgtattactacaattcggggcggaccctaatcttcgggcggacccgtgcaagggggactacaacccacaagaaacgccccttttgcgggcggcgtattgcaaccaaacggctatgctcattaaactgcttaaatatggggcagatataaatactgtggataattatgggcgaaatgcgcttttttacgcggcaatgggtatggggcggttacccgtctataagtgcttggtacggcaccatattgatttgcagcaccgcctgccggacaggacaagcattacggattatatgcggagtttgtccccgtttgtaagcggacaggccgaggcgtatttaatcggttgcggggctccgcgtcctactatcccgcgtgccaaacttcgccctaacctataatccaagcccctatacttttgtgcactttattactatccgccagcccacccgtcttttgcttgcataaaaaacctgctttttgtattgtatggatatatacttgcttttcttcctcgttaaatttttctattggagcatactatggcaaattaccgttggggtattgatttgggcacatcttctattggcgtagccgtttacgagacggacgataacggcaaaatcctttctttaaaacatttggacagttatatctttggcgagcccgtggcgcccaaggaaatgaaaaccttaaacaccgcccgccgcgcggcgcgtttgattcgccgccaagtggagcgcaaggcggcccgcctgaaaaaaatgtcctacattgctaaatccttgggtgttacgccggaagtcctgcgcgccacgccggaggacgttatcgccttgcgtgcccaagcggtgcgggaggaaatttctatcccgcaactgatcaaggtgcttagccacattgtcaaaaaccgcggctacaagggtaccttgtccgcagaggacaaaggcaccgtcggcaaaaaattatcccaaacagcgcaagcccttaccgggggtaaaaccttgggcgaactcttgtacgagcgcaaaacgcaggccaacggccagccgtggcggaaggtggaagaagacggcacctttatttaccgccaattagtagaggacgaatttgcccgcatttgggatacgcaagccaagttccacccggagttaaacggctcctacgccgtgtggggggataaaatgttccccgatttcccgggcaaaacggaaatttcgctgaaagacgccttccactcggcaatgttttaccaacgcccgataaaatgggaattggaaacggtcggaaactgcgaaatttatcccacggaaaagcgcgccgccacggcccaaattgcctaccagcattaccgtatggcaaaggtactttccgatttgcgcgtgcgcactaaaaacacgcgcgaaagcgtcccgcttacattggcgcaaaagtcgcaactttttgaatttttggacgcgcacaccgcggaatattcgccggaaacaaaggccgttccgtttgccacgctatataaggagttgggactgccggaagggtgcacctttaccttggaccgcacctatcacgccagaggcggcttaaaaggcaataccaccttgtacgcgtttgaaaaggcgggcgttttaaacgagtgggccaatttaacggatacggtgcaagaattggtcttggaatttttagccaatgtttccaacctgtcggacattatggacaattcggacgcgtacataaaagaccgtgtgcccgaactaaccaaaaacttaaagcccacacagcaggattgcgaagcgtgctatcagtttattttgaagttaaaagagcgcaatgtattgccggagttgtcgttggagcaaggacgcagttcgtacagcattaaagcgcttaaaatgcttacagagcgcattatgcagggcgagcaggaggcggatgtcttggcggaaatagaagcgcaaaaaacgcacccgcagggcaaattccgctcaaccgaggctattttgaacgagcaagccattaacgacccggttgtttcccgcgcgcttgcggagtttaggcgggtaatggcttataccttgcacaagtttggccagccggccgaagtggtggtggaactttcccgcgacattaaaaactccttgcgccgccgccaatttttggaaggccaaaataaaatccaggcggacgcgcgcaaagaggctattgcagaattgcaggcgcatcatacgttagtcagcccccgcaatatagaaaaatatttgctgtgggaagaacaggataaaatgtgcccatatagcggacgatctatttcctttgggcaggcgtttgacgaaaaacaaacgcaggtggaccatattatcccgcagcgcggggaaattggcgggccaaacgtgtttgaaaataaggtattggcgtttacggaccaaaataaagaaaaaagtaaccgcctgccttacgagtggaaattccaagcggacatagacgattacttggctttgcaagccaccaacaagcagaaaaagaagaataaagaggcggttaattacgattttggccgtcatagtacgctgattaactttgtacagcatttgtgggccctctattccaaagagaaaaaggggtattcctccgcccgcgaccacaaatataaacccacgcaaaagggagcgcgtattttgcgcaaaattaataacttgctggctacgcccgatgaggtaaagcaagattttgtggcacgccagaaccaagaaaccgcttggataggcaaaattgtgctggactggtgcaaggacttttgccccaaggttacgccctcttacggggccttaaccgcctatttgcgcggacagttgcattttgaggatgttctgcccttaatccgcttgcaggaagggaaaactctctatgataaagacgataaagaaatagaccccgccaaatggcaggaactttacaccaaacatcagttaaattacaaagaagccgggacgttgcaggaggattttgagaagtattgtaaggataaggacttactgacggaaagcgataaacaaaaggcgtattttaattttgtgcgggaacagcgtacccaattgcaatttaacaaacggtgcgaccaccgccaccacgcggtggatgcggccgtaatcgggttgtgcgatttgtccttggtgcaaaaggcttccgttcataatagaaaatacggaaccttacataaaatagaagggataaatccggacggctcccgcaataaagataaagacatcccgggccttatgctggataatatcccacagtatgccgcgttgcgcgaagccgtgcaagcgcgtttaaccaattatgtggtatggcataagccggaccactttccaagcggcgcgctgtttgaccaaacagcgtataatgtnnnnnnnnnnnnnnnnnnnnnnnnnnnnnnnnnnnnnnnnnnnnnnnnnnnnnnnnnnnnnnnnnnnnnnnnnnnnnnnnnnnnnnnnnnnnnnnnnnnnnnnnnnnnnnnnnnnnnnnnnnnnnnnnnnnnnnnnnnnnnnnnnnnnnnnnnnnnnnnnnnnnnnnnnnngcgcaggggatgacgcaagaggaagccttgtgcggaaagaaagacgacccgtccgacgggatttattaccggggcaataaagtaaagcaagtaaaatatatgtatttagttggccgcggtatccgcgtgtttgacgaaaacgcggataaagaaatttttagcacggataaagtcggcactcagcacaaaaaagcctatcaaaacggtggatacgcctgtatggactttgacgccaaaacaggcaaaaagttggcgcttatccccttgtggcaatatcaaagcaagaagcaagtgccgcccggagtggtgcgtgtgtttattggggatat

SEQ ID NO: 4397 - DNA, 6520 bp, synthetic construct
  misc_feature 1..6520: note = Synthetic
  source 1..6520: mol_type = other DNA
actgctctttaatgcgatttattattgataggataatatcgggaaattctaaaaaatttaagttaatccggcttatgcatgcctgtggtcaatcccgctcagcgggatcatggttatcagcggttcagacatgttctttggtttttttgttacgtaaggttttgataaattcaataaaagtacttttatgaaatcctgttaataatttataactatttattaccactcaaaactattgaacgcggtcgtttgatgaaccgtgtcgtgaatattcagcgaataattgcccggcttcacgacaaaagctgcatatacaggcacaataaaaaaacagcctgttcatcttcagattacttttcggtctcgggcgtctcatttttttcaccgctgggtgtagaatattttgagctgaccggcgcctccgtatcatccgtgggcttttccattaatatccacaaaagtatatataaaaacaatccgaaaccatagataacggtagtgattgtgaagaaaagtctcaaaggcaaaattaatgtgggtacattgaattttttcgcaattcctgtgcaaatcccggcaattttctttcctttgtcgaccctttgccagtcttcagcgtttttatttgattccttagttgacaaattagtgcagcagtaacggcacttgatcgcttcaaatttgatcatttccgcacagtacgggcatttcttcatagtagaattttccatgatatatcatctccttttagtacaattattttcaattctatggaaaagttatttttcccgccgttttttctctttatctatcgttgaatattcctcttgttttcatttaacttatctccgcccgggcagattcaaattgtttaaaaaagaatacaataatcagtcccgttagaaaacacgctcctattccggtgaaagcaagtatagaatgacgaatgagtacaaacatgtaaggcggcagtgtaagtcttaaaatcgttccgactgtcaataaatagaaaatacacatgctcataatgagagacacgcttaccagtaagaacagccagccgccctgccatgttggagccgaaaaagtcttcgccatctcttcgcgcataaggttcttggttctgttcactatctctgcgccgggtgcgttcaccttataaagctgtaaaaacgcacgaagttcgttttcattatattgttccatattcatcccacgtttattaatttaattgttccagtaaattccattttttacggataatcgccgagccgcgggatatacggctttttaccgttcccgccgaacaaccgagtatctcggatatttctttgatcttcaagtcgtgatagtatcgaagcacgaccgcttctttcattttaatcggcattcctgctacgatttttcgcacgtgttccatcttgttgatatttgccgcatctactgtaggctcacaggtcaactcgtccgcctcctctaaggaaacataacatagatatttcttttttctcagtgtatctttatatgcatttctggcaatctggaatagccatgtcgaaaactttgcctccccgcgaaaactattaatatgccttatcactcttatccatgtttcctggaaaatatcttccgcagcgtcataattattgaccatgcgcacaataaacgcaaacaacggttccttatactgatccactacgtcatcgatgactcccggatcacgggctttcaagcgctctgcaaagtcttgtccgtgctccctgctttcttttattgccgttctattactgtattcctcagggtgaatcaacttattttaccttccgcatgaatccgtttgctgcatcggaatagttctaattttgcatcttcaccagcgcgatgccgtttgccttataaggtaatataatatgtttttacattaaatgagacgtaaaaaaatccgttaaggttcattttttctgaaaaaacttttattcgctccggattatacctaaagaagagttcagaaatgttctaagtgttcagttcaatgatatattttaatttcgggtgggaaaatacttgcataatttaatgtattttgcaatattcaaattgaaatatgataaataatcaaaattttgtaaaaatatttttatataattaatatggagattgataaaataataacctcttgatttttaaaaaattatttataatattaaaaaataatttgttacaaaaaaaatccccgacagaagccggggaataggcaaaagcctttcacccttattgccgaagcaataagtcttattgtgataagctttaaggaaaaaatttactttctgaacgtaaagtatataaattattaaaaaaatgcaagaaaaaaatgtaatattttgaggagattaatcatgtcaaaggtattgggactcgatataggagcaaattcaataggatgggctctaattgatgatgaagaaaatgatattattggtgccggagttcgcgtttttaaagaaggggtaaacctaaaaggagtaaaagaagaatcgaagaatgttgaacgaagagctgctcggctggcgagacgccagcataaaaggagaagccagagaagaaatagacttgttgctttattaaaaactcttgaaatgtttcctgaaaataatgaggatatttcggattattatgcacaggacccgtatgaactgcgcaagaaaggactgtatgagaaacttacaatgtatgagttcggaagggttcttttgcatatatgcaggcgtaggggtttcaaatctagcagaaaaacagatatttcagaagaagggaaaatatttgagggtaaggacggaatagtaggtataaatcagacacgtgattcaattagagaaggaggatttaaaactattggtgagtatcttgcaagtcttgatcctcatgtaatacgcagaagaaacaggttcactctccgcgatatgtatgaagaagaatttaatctgatgtgggaaaaacagcagagtttttatccacttcaattaagcaacgaatttaaagaagcaatcgcagaggtaatcctcagccagcgaaagttaaaatcacagaaagcgctcgttggaaactgcgggcttgaaccaaataaaaagaccgctcctaaaagctcgcctgcatttcaatacttcaggatacttgaacagctttcacgcattttaatttcaattccgcataccggacgctataatgatccactcaacgaagaagagcggcggatgctcattgataaactttcggttacagaaaaattaaaattctccgatatgaggaaaatgcttaatcttccgggagaatcggacattaacattgaagaagagggcggaagacttttaggcaacacaacttatgccaggcttatcaaggttttcgggaaaaaacggtgggcaggatttagtgaagaagaaaaagaacaaatatggcatactttccattttgccgacaaccatgaatggctgaaagaatacgctttaaaaaaatggagcataacacctgacgaaataaaagaacttggtaaagttgcgcttgaaaaggagtacgcaagattcagtaaaaaatcgctgaaaaagattattccccagcttgaagaaggattaactcttgacaaagcgaaaattgaagcaggctatactccggagtatgaaattgaaaagtcactatcagcttatctgccattacccgaaaatatcagaaatccgatagtacagcaggcgctatatgaattgcgtcatgttgtaaatgccgtaatcagaacctacggaaagcccgacatcgcacgggtcgagcttgcacgtgaaatgaaaaagccaaagcaaaaacgagaaaaaatgcgaagtgaactacgtaaacgtcaaatgaaatttgaagaaataaaatcaatacttaaagaaagattaggtttcattgatccaaaaagggatgaaatccataaatatatgctgtgggaagaatgcagagaaacatgcccctataccggaagaaaaatttctctttctgccctttatgggggcgattttgaggtcgagcatattattccatataaacgaagcctcgatgattcacttttcaataagacggtctgtttacgggaagaaaatcagattaaaggcgaccgcaccccttatgaagcatattccggcgacagacagaaatacgaagaaataatcctgagggttcaaaaaacatctatgccgagaggtaaaaagaacctgtttgcgattaaggaactgaaagatgattttgcacaccgccagcttagcgatactgcatatataagccgagaaacaagaaaatatctgggaagtacaataaaaaaagtacaggctgttaaaggaggttcaactgcgaaactgcgatattactggggactaaacagcatattaggagtgagagacattaaaatgcgggatgaccaccgtcaccatgccgttgatgctcttgttatagcaaacacaacttatgcatttgtaaacacacttagcagataccattctatggatgttgagccgcacgaatcacgttttcctttaccttgggaacaattcagaaacgatgcagaatcagtagtaaggaatatattcgtatctcaccgtttgggaaaaaaagctaccggtcaactgcatgaagaaacatattacggaaaaatccgtaataccgatggagagccatactttgtcgtacgtaaaaaacttggaacacttactgcaaaacagattgccaatatcgttgatcccgtcgtaaaaacgcaggttttcgagcgacttgaggaaaagggtatcgatatagaaagctcaaataaaattccggcagacgcattcgttgaaacgctctatatgcctgacagaaaaactccgattaaatcggtccgtgttaaagtgccatctactacgatgattcaactatacaaagataaagaattatatgttgatccgggtagcaatcaccacatagtaatttttgaaaatgaagaaggaaagcgcgacgggatcgttgtatcactgtttgaagcagcacagcggcttcgccggaatgaaccggtcattcaaaaaacttggaaacctgaatggcactttgtaatgtccctatcaatcgatgaattaatattgcttgatgttgatgaaaaaaatatagattggggagatactggcctcgctttacggtattcaaaagctctttatagagtacagaaaatggatgttaataaaataattacattaagacatcatctagttgcaagattaaaagatgacgaaggaaaagaatttggtagggaacatagaattcctagtacattacggggattaaaagtcaaaatcgaccacattgggaggcttagaagagcttatgattaaaagaacattgtatttcggaactcctgcatttctccataccaagtacgaacagcttataattgaaaaagaaggtgaagataaacgttcaattcctattgaagacatcggtttcatcattattgacaatgaacgcataagccttagcaaaaccgtaatggctaaactgctggataataatgccgcagtcgttatcactaacagtaagcatatacccgcaggtttgatgcttccactcgaagcaaatacccttcagcaggaacgattttcaactcagattgatgcggctttaccgcttaaaaaacggctctggcagcaaacggttcgggcgaaaatacgtaaccagtcgcttgttctgcagaaaaagggcgcagacaccgccaatatagaagctcttgcagctcgaaggtactggaaactgctttttacatctattgaatttaaacgaagaccttcgggcgatccccctaacaatcttctgaactacggatatgccgttatgcgcgctgtcatcgcaagaagcttgataggcgccggacttctcccgctcatcggtattcatcacaaaaaccgttataatgcatatcccctggctgacgatataatggaacctttcagaccatttgtggacgagctcgtgcatgaacttgtttctgaaggtgaacattatgaaatcggtactgaagagaaacaggatttgcttgaacttccgcagaaaacagtaaacatgaatggcgaacgctcaccgcttatgatcgccgcttcacatacagccgtaagtctttataaatgtttttcacaagaaaacgatacaatacaattcccggaaccatggacctaaacaaataccgtataatgtggatttttgtattttttgaccttccgaccaacacaaaaaaagagcggaaatctgccgctcatttcagaaaaaaccttataaaagacggttttaacatgatgcagtattcggtttacatgcgtcactgcccgagcagagagaatgcagaaacacatattaggagggtaaaatcctttctcccgccaaaaggtatggtgagtattctgcgggttacggacatgcaattcgggatgatggaatcgtatgtcgggaaagttgaaacggggataccggaggtgtc

SEQ ID NO: 4398 - DNA, 24551 bp, synthetic construct
  misc_feature 1..24551: note = Synthetic
  source 1..24551: mol_type = other DNA
cgcgcgagctgccacaaatgctgcggatgccgctggggcaagggcagcgcattgagcaggtcgaggtgaagcgactcgatgcggtggcccataaaccagaaaggcgggtcctgatagccgagattgtaggccacgctccacgaagccaccggctgcggcgaaacgatgcccagcatcttgcccgccggtgtctgcaaatagccgtagaaatgggttttctcactacgcatcagcgtgggaaaatacttgccaaaccaggcaggatacttgtccatataggtgtcgatacccaatttcagccccgccttttcaggctgaaaaggcacaaagccctcgttgcgcaacaccacctcaagggccggctgcccgtgccattcgcggtaggtgagccggcattccacgccatcaatgcgggcacgataggcccggcggccgtcgggaatccacgccgcagtctgctccttgcctccggtcacggcataaaacgaaggaccacggtggtctccctcgcggaaaaagggtacggtgtcattgccttcccgatgtttgaataccaagtgttccaggcaaccgtcggccgaaatgcttccttcccagttgccgtgcttccatagctggctctgcgccacggcgcctccactggcacccagcaacagcgctgccatccaaatgttcagttttctcatgattacgttgacgcttgctgtgcttctcttccacaccctctcctctcatggcctgtcttctgcgttgcgcgtctgccccgccggcaagccatcaggtatgggatgaataaaaaaagataaacagggttattgtctgcaaaattctgaaaaaataacgaaatccgcaaccccggacaccggaaaaacggtctgccgcaatgcagccgccacatcgggagaaacaggcccgggcctcaacgaatcatcctgccgtgcgcacactcctgccttctctcattccaggaaacggaaccactccaggttcatcagcgtttcctgtttcccggtatctcctttggcccggaagaccagcaccaaggcgtgcttcccctccaccggctccaccgtagccgtgtgaatggcataagccgtttctccctgcatgggctccagttcgcaacgcccgatgagacggccgtcggggctgtccagacggatttcaatagccgaagccttgttgtccccccaggtcttgcactggaagcggcggaccttcgcctggtcgaaatcataatatttccagtaggcgcaatcgccgtcgcgtatctccgaaagatattctacgggcacatcgtgcaccggccggcgcaccgtcaccatcagatggcccgacatcaggcaggcccgcgacgcgtccatccgcaacagcggggacatggggccgcccacgccctgtgtcgtcatttccacctcctgtatcgtaccgtcggcattgaaggtaatgggttcaaggcaggccttgcgcatcgacgacgtgccatgcgtagggcgatgataggccacataccagttgccgtctatctcgacgatgcagccgtgattgttcaccagattctttccgctgccccaattgtcgataatgactccccggtacgtataagggcccagaggcgacgtggcggtggcatagttcagtgtagcgcagttggattccccgtggcgctgatggccgccatagatgtaataataaatgccgttgcgtttcctgacagaactggcctcattgaacgcatgggtttcataagtcagcaggctgtcgtgcacttcgccctcaatcgaaagcaggtccttgctcagccgggcccctttggcataggcctgcccccagaacagataagcctgtccgtcgtcatcaatgaagacggaggggtcgatgccccagatgcccttgatttcccgcccgtccttgaaagggccgtaaggcgatgaagcgacggccaccccttcaccgcctgaagccagacagtaatacagataatatttcccattatggtgaatacagtcgggagcatacagaatgtcgtcggtataggaagcctgcttgccggccccgcgggtggcaaaggacatctgttccatatcccagtgcaccaggtcggaggtggaaagcacattataggaatgggaacaccaggcgttcatcggttcgtcgcgggaaccatacacataaatgcgaccgtcgggcatctggcgcacttccgggtcggcgataaagacaccctgtggtacaatcggattcaaaggacgggcagcacatgctgcgacttgtccgttacctactgatgcatgcttctcctttaaggcggaacaggatgtcaggcccaaaagggccagcccaatcattccgcagacaatttcattttttttcatagttcagatgtttattttttttagattccgttcaccctctctcatgcagggtggctggcctgcaattcccgcaaaggaacccgtccggcacggtttccccgcaggcccgacaggaatgccgctgccccctgccgcccggcaagcagcggcaatttagagaaaaaatcacggttacgcaagaaagaccgtaaaaattaaatgcaacccgccacaacgctccatccggtgcccgtcccgttttttgccggtccgccccctcttccgctaagggattttgagtaaatttgtattccaaattacgtaaaacgtcatggaaaaaatacgcgcggaaagaaaccgcacccttgtactgactgagaccgaccggcaaacactcccgcaatacctgagccgcatcaccgccggctgcacggccgtcgacctgctcgggaaaatcatccgccaggacctcttcgaggtgttggaactgctgccggagggctttgccgacctgctcgtcatcgatccgccctataatctttccaaggactttgccggcctcaagttcaaggcctcaagcgatgacggataccaggactacgtgcgcagctggctgccgcaagtattgcgctgcctcaagcccgacggcagcgtctacgtctgctgcgactggaaatcttccagcgccatcttccaggtgctcggcgagcacgccgtcatcaagaaccgcatcacctggcagcgcgaaaagggccgcggagccaaaaccaactggaaaaatgccatggaggacatctggtttgccgtcagggacgaccgccactattatttcaacgtggaagcggtcaagcagaagcgccgcgtgctggccccctatcgcgaaaacgggaagcccaaggactgggaggaaacggaaaacggcaacttccggctgacgcatccctccaatttctgggacgacatcagcatcccctactggtcgatgcccgaaaacaccgaccaccccacccaaaagcccgagaagctggtggccaaactcattctggcctcctgccccgaaggcggcgtcgtgttcgaccccttcctgggcagcggcacgacggccgtcgtggccaaaaagctcggccggcaattctgcggcgtagaaatcagcgaagaatatgccctgctggccgccaagcgactgctgctggccgaacacgaccgccacatacagggctacagcgacggggtgttctgggaaaggaacacacagcagctaaatgcaaaaggaaccacaaggataactccaaaagcaatgccatgaaactcaccatcattccggccgacaccgagagcgagctttcgctgcctctggccgaacagggcgtcaaggccggtttcccatcgcctgcccacgacgaccccgccgagcgcatcgacctcaaccgcgaacttatccgtcacccgtccagcacgttctacgtccgcgtgtcgggcaattccatgcagggctgcggcatcgacaacggcgaccttctcatcgtcgaccgttccctctcgccccgcagcggcgacatcgtggtggcgctcatcgacggcgagttcaccctcaagcgtctccgcatcgacaaggcgcagcgcagcgtgtggctccttcccgccaacgacgagtatccgcccatccacgtcgggcccgacaacgatttcgtcatctggggcgtggtgacctacaacatcaagccgcaactgcactcccggcgctgatgctccatctgtcgtgggaaaagcagcagctttctccccatctgtggcgcacggccgttcattcagcatgccggccggaaccggccggcaaccgcatcttcaacaccagtcccggtgcagacttgtcgcccggtgtggcgttcatcaatcccacccgggtaatgacagtccccggcaccgtcagccggttgccctccaccttcacttccgacgtaatgttgaccggactgtcaccagccaggtcctgcgcccacacttccatgcccgccatctccgccggcactgaaggatagaccagcgtcaccgcgccaaaacgtccgaacagccccacgggagcctgccagtcgctgcccgccaccgtgacggccgcctcacgttccacatattcacgcccggcagcccgcccgatggccgccactgccaccgcaccgttgggatagcgcgaagccagcacatacggccgcagggccgacgtgtcggccacctccggcaacggcatgccgcggctcacccgggccggcgcacgctcacacagcaccgtgcccaccggccggcccttgttccaggtttcgttttcccgcagttcccaggtatccgtcagccacacggaatcaacggcatagcggccgtcgacggcaaaaggttccgccagacggtgccagcgcacggctcgcaccacttcatccaggcatttcttgtaattatgccccaccggcggaaaagcctcgtcctgccgtccgtcgggcaaactgccggcaaacggatgccgcatgatgccgatggcgcagcccagccccgcagcaatatacggttcatcctcgcagttgacaatgcccttcgcaccgtccgccgcccggcggggcagcagctgcaccacccgttgaatggtcaccggctgcgcaatgacgttttccacgtcatacgtacggaaaacgtcactgaactcgacatactcatacttcatggcatgctcaatccagagctgcggcgcgtgtttccggcccagttccgtcagcatgcggcgccagctgtcatttcccgcctcacgtccccagtccaccttccagtaggaaaaaccggcttcatgggtggcccgcagccgctccgtccagtagtcctcttccggcacagcagccagccgcggcgcccgctgcgcacaaatccatccgccggcccccttccagcccagttttttcagcctttgcgtcagctgcttcagccgtttggccggcgtacccttaaaggaagaaaaacgctcctcgttcagttccacggtgcccagataaggattgtcgcccgccgcattttcttccagcggaatatcccacgaatcgtccatcacgaaataaaggtcggcgcggatggcgggaaacagttccgcccagttctgatatgcccctttgccaaacagattttcctcgttcatcgcccgccgcatctgctcattgccggcataactcgtcacatacccctgcagattccaggtacacatataatccggcgcgcccgaaggctccttgggcaccaggctctccatcgccggctgccgcgcacaccccagcagcaagagactgcaaagaagggttcccattccattgtgtttcatagttgtcccgtttttcttattttgacgtgagttcggtataattatttatccccagcagagagccattgtatgctgttgccgcatcacggtttcacaatcctactgacaggaatttctaaagtactgatagaaatttctgtcagtactttagtttttacgaaagtactgactgtttttctcctgaaattccggtaatatctccttggagtagttataccgacctcacgttattttgcgtttttcataaccgtgctttcgtttcctgttccggatgcagccccgccggcccagcccgccgaagtccccccgaccataacgaaagcggcacgtttttcccctgccgcaaggtatttgaagaccaaaacctgtaacaaagagatggtaggataaaacctgcaacgattatctgaaagaagatacccgaaaagttccaccttctaacagaaaatatcagcacattttaatcccgccaaagagttctttattgtttgcccaacatccccctgacctctttgtcaaagtcagaatctatccgttgggttttattaaaaatatcatattctttctcggccttggccttggcttgcgcagatgaaacgctacctttgtccggtagaatctgataatcgttaaaggaaaggaacttgtcgacactggcggcaaactgctccatggtgaaagtgttatgccgttcaatctgattttcaatataatcaaaatatgatgttacagtcctttccaatagcctgatctctttttctgtcagatagttcttggctaccgttacatccgatttgagtatgcggccgtctggagcgtttttccaggtcgtcagccccatatgctctttagtatgatcggttttcgaatagataatttctgctgcagtctgccctgtaatcgcataatgaaaacgattctgaaccatagcatagaagtcatgcgtggtcggcgagttcttatcatagtccgtactgcattcagcatatatatcggtaatctgttgccagatgcggcgttcgctggcacggatagaacgtaccctttcgagcaattcgcggaaataatccttgccaaacacagccgttccttgtttcagccgctcatcatcaagtacgaagcctttgcggatatactcgttcagaatcctggttgcccactgacggaacctggtggctttgggcgaagaaacacgatagccaacagaaattatggcatcaagattgtaaaaatcgacatcgtgtctttgtgatttctcttccatggcaccatgttgagtggttatttccattttggaaacaaccacttctttctgcaattctccttcatcaaaaatattcttcagatgtttgcttatggcaggaacaccaacaccaaacaactgtgccatagccttttgggtacaccagatggtttcgtcttttatgacaacctgcacctttccctcttcatcgggaaggctgtataacaagaattgtatttctttactcattgctacctacatttgcgttgaactgcaaagcgtccaactgtttcatgatttcttcttccggacggtgtctttccgtacataggagtcctgcaagactccgcttacaattgcctatacggctatccggcccctctccgtaatatcccaactatccatacagattgccgatgtttcccgaaggagaggcacgccctccggctgtgatttcatcgtatgcaacagcggcagaaaccgtcaatagcccccggacggacagacacgccatatccataaacccggaaaaagaatctgcttttttgcaatcgaaagttacgaaaacttttcgcaggaatcagcctttggccgggattttcccgggcagaccatgatatttcccggtaaccgtccagcgggccccgtgaacgcatggccggataccactcacaccaattgccgcgaagatatacccatcggaaccggcagacagccttcagggccctgtcattgctccagcaataccgtaccctcctgccttatcgacttcctgctcatatttttaatcacagtttgaggctgttcggaccatccgctccattgattgtccttgatggtgacgcgatggcagccgttgaaatagaacgtatttttattcccgcataatgaagaagtggtgtgagtccgttcgatggaatttcccgagaacaaaagatggtgggtactcttcgcaaacagaacgggataatcgaaggtaagaaagcggttattgacaatccggatgttctgatgcaccggctgacgggaatcaaccaccgtattggaagggttcaacgcgataacggcatttccgggtccgccctgataggcacagtcgatgaaggtattattgcggataagcacatctttcaccggtcccgactcaaaccatccttccgcgtcactttctatcaggatggcactcatccccgtcttctcaaacacattgtcctcgatgaccacctttctgggcgtagtcaccagaagtccgcgcgtactggttctcgtgaaataattatgatggatatgcacctcgggcgtatagctgaggttttctacacagtcatgcccgatttcaaaatcatccgttacgggagcagtaaaggaaacgagtatttccctgtccgacaattttctggcccatctgacccgatagggcgttttgcaccgcatcatcgtctttgcctgcacgaggaccaccgtgtcgcccgcatgaaaggccgtgaaaccatagctctgcgcatgcataaagcgcaaccgtagggtatggctgtccgtcttttccataattctcaggttcgtcccgtgaatgttaatcgggtcgtcgtgcgcaccttccagccggcagttccgtatggtgattttaccccggcagccggaaaaatgcatgaaatcggccgacgaagccaatatccgtcccctttcctcattcggagtgcagcgcacccggtccatcgtaatgtccgtgctgtattggctgacaattcccagtccgtgcatataagcgatgtgtaaatcctgcaaagtgatttggctggtttccttaataaacatgcccacctggtcgcgtatgatgtctctgaccgtaaggatattgccgattttgggctgaaaggatgcgggcgtatcgaaatgaatgataccgggtgatacctccctggccctggccttgtgcagggtgttccagccgctgctgtaggtaaagaaatgggtgtccttgtcccattctatgcaatggaaacgctccgactcccatccttcgccaatcagatgcagccggccgtcggcaaggtcatatctcgtgtcgcggtgcaaagccacttccactccgtcgccggttttcttgacatatttgatttctgaagcggtaggccgttcaaaatccgtacgcaatgaacggaccttgatctgccggcattggtcgaataccatcataatcatcttcccgtgaaacatcagcagtgcatcctgcccgatgacctccaggccgttgattctttcaaaaaggagacccacggtcttgaccttcgaggggcattcctgctcgctggaagtgttggatatgaaatactcgcgccgttgcgccttttccggccagatgtcataccgccccttttcgaagagcagcactttcgctcccctttccttgcaggcatcaatggccttttgtatttcctccacacagttccgatacgtgcccggttgtacaaagtccctgacatagaccgtatcctgagattgtgaaaacacttttgtggaaagaaggaagaatagcgtaaataacagttggtgacgtttcatagtatttttttcttttcatacagttggtttcatggaaatgccgtgagcgaatacagcccgatgcggcccgggcggcatccacaaccgaaagttacgaaaacttttcacagcaacctgtctttgggcgggattttcccgcgcggaccatgatattttccggcaaccgtccggacgacaccgcgaacgcagggcaacatgaaagcccacaatgctgtggtgcaagatgactgcgcaaagatggcgcctcatattccggtgccggaccgtctcccccaaaaagaacaggcacaaaaaagcccccgttaaaggacgagggcaatcctgatagttttcacaacggaatcatccttattgtgaatagctttcaattagtatcggcaaagtaaacgcttttttccgtttccggcaaattttccgcaagttttttctaaaaaactgcaatcctcaaaaattcaattaattttgtatgcagaacttacatatttcctcatgaaaaacaaatttggattagatttgggcaccaacagcataggatgggccgttgttgccaccggacaggaagaagacgcagaaaactccggaaagattctcctggccggcagccgcatccttcccatggatgccgccaccctgtccgacttcgccaagggaaacacacagtcgcaagcccgtgagcgtacccgtctgcgcctgacccgccgcatcatcgaacggtcccgtctgcgccgccaccgcctcaaccgcgtgctccgtgtgctcggctggttgccggaacactatgccggacaactcgaccgctacggaaaatttctgaacgacagcgagccacaactggcctgggagcccgatgccaacggcgccggtccccgtttcctcttccgcgaagcctttgaggaaatgctcgccgacttccgcagccgccacggcgacgggcagcgcatcccctacgactggacgctctactacctgcggcagaaagccctcacccggaaaatcagcgcctgtgaactggcctgggtgcttcacagtttcaaccagaagcgcggctatttccagctgcgcagcgaaacggaagtcaaggacgaggacaacagcaagaaggaagaatactacagcctcacagtaacgaaggtggaaaacaccggtgagatgagccgcggcaaggccgcctacaatgtccattttgaaaacggaatggtctaccccaactgtacggccagggaagccccgctctgggaaggaaaggtgaaggaattcatcgtaaccaccaaagtcgatgccgaaggccgccccgtctgcgacaaagaaggcaacgtcagccgcacattccgcgtccccaaggaagacgactggggactggtcaaggtgcgcaccgaagagctcatccgacagtcggagaaaaccgtgggacaatacatctacgattcgctcatggaagcgccgcaacgcaagatacgcggagcctatctccgcaccgtcgaccgcaagttctaccttgaggaaatccggcgcatcctcgagtgccagaagcagttccatcccgagttgcagagtccccgttgccttcaggagtgcatcgccgaactctatccgcacaatctgccgcatgcccgcaacctgtcccggcgcgacctctgcgccctccttgtcgacgacgtgctcttctatcagcgcccgctcaggagccagaaagggctggtcagcgaatgcccctatgaattccgcgaatacgttgaccgcacaacgggcgaaatccggaaaagtcccatcaagtgcatcccctgctcgcatcccctgttccaggagttccgcctctggcagttcatcggcaatctgcgcatctaccgccgcatcgacgagagcgaaggcaaagtgagcgtcaaccacgacatcaccgcccaatgcctccccgaccacgaagcctacgtgcgcctgttcgatgacctcagccagcacaaaagcatcaagcaggcccaggtgctccgccacttcaagctcagcgaaaagtactgccgctggaactacgtggaggacaaggaatatcccgcctataccacccgcgcccagttgcagtcgcggctcaagaaggccggtgcccccaaggatttcctccaggggctgacccccggcggcaagaccaaccgcgaaacggcgctctggcatctgctctattccatcagcaacatggaggaactcgaaaaggcgctccgcaaattcgccgcacaaaacggcctcgacgccgacgccttcgtcagcgccttccgcagctgtccgcccttcaacgacggctatgccgcctattccgcccgggccatcggccggctgctgcccctcatgcgccggggcagccgctggagtgccgaagccatcgacgccgccacccgccagcgcatcgagcgcatccttaacggcgaagtgggcgacggcctctccgaacgcacctgccgcctggccatcggcgagccgccggcccgcaccgccctcaccgatttccagggactttccccctggctcgtctgctacgtggtctacgaccgccacagcgaagccggccaggtcgaaaagtgggaaacgcccgacgacatcgaccgcttcctgcgccagttccgccaccactctctgcgcaatcccatcgtcgaacaggtggtgctcgaaaccctccgcgtagtgcgcgacgtctggaaagacagccgcgtgggccacatcgacgaaatccacgtcgaaatcggccgcgacatgaaaaaccccgccgacaagcgccagaaaatgaccgaaaccatcaaccggaacgaacagaacaatctgcgcatcaaggccctgctggaggaactgtcccatccggaatacgaggtggaaaacgtgcggccctattctcccatacagcaggaaaagctccgcatctacgaagaaaccgtcctcgacgaggcccggaagaaaaaccagctggatgatgatatcgcacagattgtcaggaagttcaacgaaagcgacgagaaaaagcgtcccacgccggccgacatccgccgctacaagctctggctcgaacagcgctaccgctcgccctacacgggccgcttcatccccctggcacgtctcttcacccgcgactacgaaatcgaacacatcgttccgcaaaagctctattacgacgactccttccagaacaaggtcatctgcgaggccgccgtcaacaagctgaaggactgcaccctggcccgcaacttcattgaggagcagggcggcagcaccatcgaatgcggcggacagacggtggccatcctgaaggccgaagcctatgagctgctggtcaaggacacctatgcccacaacccccggaaactcaacaacctgctgcgcaccgaagtgcccgaagagttctccagccgccagctcaacgacagccgctacatcagccgctacatcgtgcagctgctctccaatatcgtccgcacccgcgacgaaaacggaaactgcgaagacgcggccaactccagaaacctcatcgtctgcagcggtgccgtgaccgaccgtgtcaagaaggactggggtctcaacgacgtgtggaacaaactcatcgccccccgcttcgagcgactcaaccacaaaatgggcagccagtgcttcggccagtgggaaaacaaggaaggcaaacgcgtcttccagattaacctgccccttgaatatcagaagggattcagccgcaagcgcatcgaccaccgccaccacgccctcgatgccatcgccattgcctgcatttcccgcaatgtggtgaactatctgaacaacgtcagcgccatcgacggtgtgcataccacccgcgaggacctccgccggcgcctctgcgaaaaacaccgcaccgacagcaacggcaactacgagtatctgctccgcaagccctggcccaccttcacacaggaaactgccgacgcgctcgaccgcatcgtggtcagcttcaagcagaacctgcgcgtgctcacccggacagccaaccaataccaatgctacgacgccgaaaccggaaagaaggtgtggaaacggcaggaaaagggcgaccgctttgccatccgaagatcactccatcgatccagtttttacggccacgtgaacattcacagtaaaaagcctgtcagtctcaaagatgccttgaagtttccacaacgaattgttgataaatccatcagaaaaaaagtgttcgaactgctccagctcaactatacgcccaaagcagtggaagaatatttccgcgagaaccagtccattcttttccccgaactcgaccttaagaatatatccgtctactatttcacagatgagatgcccaccaaagattggaaggtagcaagtcggaaacctctcgaacctggtacccaaatagagaacatcaccgacagcggcatacgcaacatcctcacacgccacctcgaacgctacggcggaaaacgcagagaagccttctcgcccgaaggactggaatacctgaacagccacctccgcgaactgaacaacggacggcctcaccagcccatccggcgtgtcagaattatgaaaaccaaaggaaccaaatttatagtaggaaacagaggtagtaaaaagaaaaaatatgtagaaacagcagaagataccaatctttacttcgccgtctatctggacaaaaacggtaaacggacgtatgatactcctccactcaatattgttatagagagattaaagcagggattgccacccgtgcccgaaagaaacgacaacggcgcccgcctgctctttaccctatcgcctaacgacttggtgtacgttcctacacccgatgaaatcggtactccgctggatgtacaacaactgcagcgagacagaatttacaagatggtatcagcatttgggccacaatgtttctttatcccagcttttgtcgcaaatccaattattcaaaatacagaattgggaagtaaaaataaagcagaacgatgctggaccggtgaaatgattaagaaaatctgcctgcctctccgcgtagaccggacagggcaactgcacttccgatagtaacccctaagcaaaggcgcaagcgaccccacggccgctttgcgcctttgctgtttttctccatccttgaaaaccttatccgccatgatcaaacgcacactctatttcggtaaccccgcctacctttccctacgcaacggacaactcgtgttccaactgcccgaagtggccaagaacgaaaacgccgacgagtggatgcgccgcgaatcggtgcgcacctttccggtggaagacctcggactcgtggtgctcgaccaccgccaaatcaccatcacccaggcactgctggccgccctcctcgacaaccagaccgccgtcatcacctgcgatgcccgcagcatgccggccggtctcctgctcccgctcgacggccacaccctgcaaagcgaacgcttccgccaccagctggaatcgtcgctcccgctgcgcaaacagctgtggcagcaaactgtccgtgccaaaatccggaaccaggccgccgtgctccaggcccacaccccggccgaagtccgctgcctgcaagcctgggcggccgacgtgcgcagcggcgatgccgacaatctggaaggccgggcagcggcctattactggaaaaacctcttcgccgccgaaattccccgcttcgtccgcggacgcgacgaagccccgcccaaccagctcctcaactacggctatgccatcgtgagagccatcatcgcccgtgccctcgtgggcagcggcctgctccccaccctgggcatccaccaccacaaccgctacaacgcctactgtctggccgacgacatcatggagccttaccgcccctatgtcgacgaaatggtgctgggcattgtgcgcgaaggccagcccttcgatacgctccaccgcgagctcaaagcccgtctgctgtcactccccaccacggaagtctgcatcaacggccgccgcagtccactcatggtggccgccgccaccactgccgcctcactcgtacgctgtttcagcggcgaaagccgactgctggtgtttccggaacgctaacccctcccttcctccatggaccgcttcagcgaataccgaattatgtgggtacttgtatttttcgaccttcccaccgaaaccaagcgcgaacggaaatcggcagccgacttccgccaaaacctcttgcgcgacggtttcaccatgttccagttctccatctacgtgcgccactgtgccagcagcgaaaatgccgaagtacacgtacgccgtgtgaaaaacctactgcccccgcacggaaaagtagggattctcaccatcaccgacaaacagttttcctccatgcaacttttttatggagccaaaagccatccttcccccggcaaccccatccagctggaactgttctgaaaaagaagaaggagactccgctttttttacgctgcaggaatctcctttctttatgaagacaatcttttttattttctaagttcgcacctatttatctatcaaacaactacttgctaagattaagttgtcttcaatgtacgaagatactaatttgaaagctattcacaacagccggcgctgcaggtattgcgtctgcagcgttgtcttcaatgtacgaagatactaatttgaaagctattcacaacgacagttccgtggaggtcatggcggcgatggttgtcttcaatgtacgaagatactaatttgaaagctattcacaacgcggtgcagtcgttggtcgaaatccagatggttgtcttcaatgtacgaagatactaatttgaaagctattcacaacccgaattcgacgaggaaggcgacgaggtctgttgtcttcaatgtgcgaagatactaatttgaaagctattcacaacggaaagccggattttttacgttatcgaaagttgtcttcaatgtgcgaagatactaatttgaaagctattcacaacccggcgggccgaaaggatttgcgcacggaccatcggcaacaggcacaaagacgggaaaaacaaaactaggaacagaaaaaactgtccttactttagaaaaaactgtcggctgaattgtttttcctaaagtaaggattgttttcggggcatctccgatgaatggtggcgggcaaacagggcgcgatgtagggggacgtaccgatgaggtgcgtccgacgtgtcaattcaccggcggatgcgtcaacaaaggaccagatacaacaaattaacggccgtcgttgaataaacaccggcacgagatgggaaacaacggcacgctgaataaacgtcggacgcacctcatcggtacgtccctacaccgcaatcattttcgcacgttcatcgggatacatacaaaaaacacacgcaacgcttcccgcatgtttccaggcacaccgatgctcctgcaatgcacggacgcaccgccgataaacggcggcaaaacagaaccctgccgggcacaccggctgggtgcgtccgacagggttatatgcgtgcggcaggtgattcccgacgctattttttcttccgcccgagaacagcctgacctgccggggcaaaagccttgccccgtccgcggtaggcgggaaggggttacagctggatttccgccttggcggggtcggccttgatgcctttgctgttgaagaaaccgaagaggtcctcgcccagggccagactcatgacggccaccgtgttgtggatgtcatagcgggtgattttcttgcgggaaatgaggaaacgcttcatctggaaataacgggccaggaaatcgggatgcttcacgcgcaggagttcgaagatgtagtaggtctttccccagtggatttcgcgcatgccggcagcttctaccttgttgccgttgcggtcggtgccgtcgaggtcatacttgtccatgttggggtcgaagcgccgggccgattcaatctgtgcgttgatgcgcttgaggccctcttcgggatagcccatgtcgcacatgacgaggtcgcccacgtaggtggcaatcggttcgttccacacctcgggcagggggagcacccaggagtgtaccgactcgtgggtgataaattcaatcatgctgtcctcccgcttggggaagtcgccccaccaaacggcgagcgcgatgacgtcgcccgaggagaatccgccgccaccggtggcaaggagcgcgattttcgagcccatgccgggcgccagaggcacacccatgcgccgctcgatgacgggcatgcagcgctcggcaatgtcggacatggcggaggcgtagggcttcatgtagtcgttatacatgagggtgaaggtggatttctgctccacgtgttccagctcgccgatgccgcgcgaaccgaaggggcggccgggcttgacggtcttgccggaagcgacggtgcggagcacgggcttccacacgttgacgttgatggagtcggaggcgtcggggttgctgccggccagcgaacgggaggccacgagcacatgtcccttgccatatttggaataggccatgagggggcgcgcctcggcgtcctcgataatggtgttccatttcttcgcctcatcgaagcggagcacctgatggccgccgccctccacctggctggcggtgatacctttgcccactaccttgagcggtgcagcggcattgccgtccatctgcgcgccgaacaccttgagcaggcggttctgcgactcggcacctgtggaggaaagaatgaccacgccgccgcccgacttcacgaacttcgtgatggcagccacatcgttctcgtcgtaaccgatgcggttgtcacaacccagaagcaccagaaggttggcgttggagaaatcgaagttggagaggttgcaccagttggtggcatagttctgatttttcagatactgcgagtggaagcggttgtcggcatagaaggaaaactcgtgggccaggtcggtcaccacattgattttctgtgcgccggccgtcagtcccgacagcagcgccattgacagtaacagtttgcggttcattgtttttcagtatatttttattaccttgttctacagtttcttcttcccgcccggaccggcggaaccagccggcattaaggtacgggtgggctaagttaatgaaaaaatccgtaccggcacgaatctgccggttgaaaacacaaagaaccgcgacacggaaactggacgacgccggcagcggaggcgcgctacgcatattcctccaccctatacatatcgggcacaaacgcactcggctccagggtttcgagctcgttgatgatgcggtattccgccgaattcgcccaggcccggaagtgctcgtccggcctgtaatgcccggcaaaccggagcagccggctcaggtcgaaatcgtcgtcgacaatgcctgccccgctcttcatggcgtcatgcgcattgcattcctgctcgatgtgtgccggcaccatcatcagcggcttgcccagatacatggcctcgcaaaccgactcgaagcccgccgtgctggcataggccttgcagcccgccatctggcgcaggaactccacatcgtccagctgataaaacgtcagcgacgcatcgacctccttgacggcaggctctccccatctgtcccagaaaaagcgcaggggggtctccggatgacggctgtgccacctcatcacacattccgaaaagcctgcattgaccatatagccgtgaatgtagtcgccggccgtcgttttctgcctgaacacttcctgccgcaacaggggaggcaccactctgattttcctcctggcgtcatccttcatcgcccggaaggacagcgccagatgctcgcacgcccccagggccgtcagccgtgaaaacagattcagcagtttcaggctccacctgtgcctgccgggcaagtcgaagtccttgtgcaggaagaggtattgatggccgatgcacacctgcggcacgcggggacggtggaagaaataggtcagccccgtgagcagttcataaaagttgatgaccacgtcggctccggtctgcctgatccgctcgtcaatgtagcgcatgctggctgcatattccggcagtttcctgacgttataccacacgctgcgcggaagattcacccgcttgttggcgggagtgggaagaaaattcggactcaggaactgccttacgggtgcctgcacgccgcgggtaaagaaagcgggcagacggcggcttccgcttttgccgacaagtatctcaaccacctcgtggccgttgcgaagaagggcgttttccagcgtcatggcctgcgtgagatgcccacgcccctcgccctgaacgataaacaggaatttcatgatgcagcagataacagggttaacttttccgacggatgcacagacgcacggatgtcggcataatacaccacttcccattggccgctttcgtcctcgatgagggcggaaaggctttccacccagtcgccggaattcaaataatgtatgccgtcaatcattctgttctccgggtggtggatatgaccgcatatcacgccgtcgcactcgcgcttgcgggcaaaatccaccagtacgcgctcaaagtcggaaatatacgaaacagccgacttcaccttctgcttgacggcctgcgacagggagtagtagggcttgccgtgctttgcgcgatacctgttatacatgccgttgagccagagcagcagcgtatagcccacgtctcccagttttgccagccatttcatttcggtggtaaccctgtcgaagacatcgccgtgggtaacaaaataatgacgcccgttgctctcaagaacgtagtcgcggacaatgctgatgttggaaaactgcaatggaaccagattgtccagaaaatcatcatggttgccgcggacgtaaatcacctctgtgccacatttttccatcattttcatgataatcttgaagaaacgggtgtgctcggctttccacttccttacgccggatttctgcaaatgccacccgtcgataatgtcgccgttcagaatgaggcgatcacaatccacggtactcaggaaatcgctgacttcatccacctttgaatgcgtcgttcccaaatgaatgtctgacaagacaattgttctgtaatgcggtcttagttccatttttctttccattttgtgtgatacaaaagaatggaaactatattacaaaagcatttaatattgatgaacataatgatacattttccatccgcacaccggcctgcgccggccagccaggaaaagggcacgcggattccatccccgcaggcacggaaaaggcacgcaaaaaggaagtgcaccccacagaagcgtttcctgctcctgttggagtgcaccatccaccaacaaaatacatttattaaacaatacgtgaccggcaaaaaccgttcacaagagcgttctgcatcaggtcaacagggctcagcggaagtccagacgggccgcaacggatggaaacatccgttcccgcaaccttcccgcgagaagccgcaaccggaaggacggtctcccatcttccccccccttttttattccgcgggcagcaaccggagggtcttcccgcgcgtcagcccattggcgttataggcatcgaccgccacacaatagccggcggcgcggttgagtgccgtgaggtcgtaacgggtactgtcggtcacctgaaagttcaggtgcatgcagtcaggactgatgcctgcccggacaatatatccctcggcgccctccaccggctcccattccaccaccgcccgacaggggtcggcctggcgaacggccgtcacgcggcctacccgctccggtgcctttccgcgacctttgccgaagacacgaagttcgcgcaacgaaacattttcggaaagcgtaaacgcctggttctgccacttgatgtaacgggcccggaaaggtatttcaaactccacatagtcgtggggcgtatcggtggtcttgtcccgcttgtcggcaatgacactccacgttttcccgtcgtgcgacgcatacagcacatagctctggtacacatcggtttgtaagccctggcgggtggcaccatattcatcgtagttcacctgtatggcatgtacggtagcttcctgccccaggtcgatttccacccattcgccgggtccgtttccttcggccacccaggccgtgcgggcgtcctcgtcaaccagccaggcagcctgcccttccttctgcgaagaggttttcacctgttttctgaaggaaagaagcatccagtcgggacgcaagggctgccccttctttccggtgggcagaaagagcggataatcgcccagataagtatcggtatagagatggccgtcggccgtgaaaccggaaggatagaaggaaagacggcgttcaaaccaatggcgcacggaaatggagttggtggccgccttccagtagttgtcacccacctggaacaggcagccgtggccggcaccgccgatgaagccggtgggcttataggacacggggctgttttcggcataggtgaaaggccccatcggcgaagcagacacatacacgccgtcggcataggtcttccactgtgtgccgggagcggcatattgcagatagtagcgcccgttgtggcgtgtcatccacgctccttccagataaggacgctgctgcagctcatgacgctcgccggaacgctcccagccatgcgctgccgtgtcgctgttcaggcaggccacccgcggccccgtttcctcgagcgtggacagacggaaagtctgtccgaagataggattgaccggcgaactgccataatagagataaaggctgtcgccctccaccaggaaagctgggtcccaataggacaggatgtccttcaccttcgcccaacggcccgaggccgggtcggttgacttataaagaatggcacggccgcccgacgaaccgacatagaaaacggccccgtcgtgcaggaaaatgccgggtgcatagtcttcaatgggcaataccggctcttccacgatgatatgcttccactcggtaaagtcgtcggtacaccaatagcccgacgatttggaggcaaacaggaaatacttgtccttgaagcggaccacaaccgggtcggcagcctcacgaatgcccgcacctccctggattttcataaaccggtagtccagattcagcggattgcagaatgtggccggatgctccgccacccgtgtacggatggcgcggtcggtgcaaccggtggccagaaaagtacataccgacagacagcaggaaaacaaaaaaggtttcatagacatgtttttcaatacatccggaaagttctctccgctgtccctcccgcccacaaacggctgaaaggaaaaaggaaacgtggaaagatttgccctttctatggattttcgatgggatagatgtaatggctttgtaaatatagacaatctcccggaaccggacaagggtttcggataaaaattttatgttaaaacattgcatatcaagccttaaaatggggtatcatatacaataagcccgtcagaaaggctgccggactccctacgtgccggacacggaaagaaaggcaaccgctccgaagactatcgcagggaaaaaggagtagcacgctgataaaaagagttttaaccggaagaaacaggatctccccgcccggaaccgcctcatccggagccggcaagccagcccggcaccacggaaaatgcggaaatacactatgccgcaacagacacacgccgcattttccacgaacaagccgggagaggatacacggaaacggcattttttgtcacaacggcaagcagcacagcgaaaaaccggacacgcaggcggctcggcaaagggcaacagaaaacggtgttttccattggccattgccggacctttcgctatatttgtagaagataagagacggcccggccctgtcaaaccccggaaacatcgttccggccttaccatcgcgctcgcctttcaccatatacttgtatccttctaactcataactatataaactatgaaaaaaacaatctttctcccgggagtgctcgcactgactctctgcgcctgctccaccggccaccaggccccacaacccaccgtatccgaaaatatggagggatgggtgtacaacgaagaactcagcgacgaatttgaaggcaatgccctcgacacgaccaaatggtatgaccataacccgacctggctgggccgccagccttcactcttccggcgcgagaatgtaagggtggaaaacgggaaactcatcctcagcggaaaacgcgaagaggtgaaggacgctcccgaagggtatcacactttcacatcggctgccgtgcaaagccgcaaaaaggtgctctacggtttctttgaaatcaagtgcaaacccatgaagtcggccctttcgagcgccttctggctctacatacaggattccgtcaaacaggaggaaatcgacattttcgaaatctgcggccgccacgacagcgcccccgccatgccgctcacctattatgccacgagccacttcatcgtcaagcccgaacgcctccaggtgagcgaccatgtggcccacacctccactgtgccctgggccgaccgctatctggtggccggactgaaatggacacgcgacgaaatcgtgtggtacgtcgacggcaaggaaatacgccgccggaaaaacgacttctggcactcgcctgaaaccatcaacttcgacagcgaagcctttccctcctggtggggactcccctcggacgcggacaacggcggcgaatttgaaatcgaatatttcagatactggagtctgcctgaagcgcaggaacagcgcaccatatttgaaaacgacatgaaataaacggaagcggacggcctcactgcagattcgtccgcttgctttcatccaacgcgacgaaccggagcacccaacgccccggccgacaatttgtcatgactttctggcaaccagacgaacttttgtccgacccaatgtttacagaaacttaaaatcgggaagccgctgtataacaagggttaaaagcaaaagctgccaccggcagactgtgccggaaggcac

SEQ ID NO: 4399 - DNA, 23609 bp, synthetic construct
  source 1..23609: mol_type = other DNA
  misc_feature 1..23609: note = Synthetic
  variation 14972..17151: note = note, n is a, c, g, or t
ccatagtgggttacaacccggaaaccgggctgcctgaagtgccgtggctggaatcttctctttatgaagcatggcaggccagtggcaaggagtatgcggcgtttattcaagatgaacctgaatttcttgaacagagcaatgccaaaaagcctgctgcagaactcacgcgccaaggcaaagtaggcctggactgccgctacctgaattttgccgcccagtgtaccgggtggatggacttgacacgccaggggggctctggttcgttccagattttatggagcgatttatggaaaattaatacggctgccgctattccttactatacttcccgttatgctaattccccccgcgggtttggctttgttaccattggggcagggcttgactactttcaccggcctgccaatgaaaccaagaatgttattgaaaccatcattcgccaaaccaccctgtattccgccatattgcttgccgaggcggaaaaagccattcagcgcaacatgatgcaaaccgctgtccggctgagtgtttccaccctccttatgggggtggtggtggtgcttattgcggtgtggatggcctccatgttcacccgcagtataacccgcctggtgaaggggtttgcccgcttccgttcaggggaatggcaattccgttttcacaccaaggccaaagacgaactgggcgcccttgccaatgcgtttgatgacatggccgacagcgttgtgaaaagcgtgcaaggcacacttgttattacagaccttgagggcaacactatttatgccaatgccgtggccctgcgccacatgggaaagcagctagatgaggttattggcaaggcctatgccgactacggcatatttcctgtgggttctgcctgcgaccctattttggccttgcaggaagggcgtgatgcggattccatgtatcttgcttcagcagacaggtactttaagccacgggcagaatattttttgaacaggcatggggaacgcatcggctttattgtgtcttccaccgacgtaaccgaattggcagaagagcggcataaaaccgaagaacagcgcatgcttctggacacaattttttcttcaagcccggacgttatttggtatatggacccacaaggccgctaccttgcggtgaacccgcgttttgcttcctttaccgggcttgaaccccagggcacccttggacggcggtcttttgaggtgtttcccctagaacgcgggctggaatttgcccgtaacgacatggaagcgctggaaagccgtgtgcccacctatgcggaagaagtggtgatgtttgccgacgggcacgaagaaacactggattcggtgcgtattcccctgtttgatggggcatcaaactttattggcattattggctttgccagagacgtttcccgcagggtgtttgtggagaaacaactgcgcgacacccagttggaactggaacgcaccgcagcagatgcccaaatggccaatgcttccaaaagcgaatttcttgcgcgtatgagccatgaaattcgtacccccatgaacgccattattggcatgagcaatattgtgcaaacaaaacttgccaacccccagcatgatgtgcaggaactgcgggcgcatgtgcggcaaattgaggtttcttcccagcacttgttggggctgctcaacgatattttggatatttccaagatagaggcgggcaagcttgtcctctcccgcgagccgttccacctgggcaaacttgtgcaaagtgtattggatattattcagccgcgctgcacagaaaaaaatattcgcctgcaaagtgatgttgccctgcaactcccttactttagcaatgacgccttgcgccttcgccaggtgcttattaacttgctgggcaatgcggtaaagtttacgccggaatgcggggccataacccttggggtttccgaactgatccgggaaaatggcaaggcgctggtgcgctttactgttatggatacggggataggcatttcagaacacgcccaaaagaagttattcaccccatttgtgcaggcagatgccaacatagcccatagttacggtggcacagggcttgggctttccatcagccggcgcattgtcaaccttatgggaagtgacattgcccttgaaagcaaggaaggccagggcagtacattcagctttgacgtgtggtttgatgaagcagaggccattgccgttgaagaacattccagcctggaacagctttctgtgaaagggcgccgaatactgcttgtggatgacgtggacattaacaggcttattgtaacagaacagcttgccagtttggaacttgaaattgacgaggcaatagacggcatagaggcggtggaagcatttgtgcagcacccgccgcagtattacgacctgattttaatggatgtgcaaatgcctttgctggatgggtacgctgccacccaacaaattcgggaaagtggcaaagaagacgcctctacggtgcccattgtggcaatgacagccaacgccttcaaggaagatgtggataaagccatttccattggcatgaatgcccacctggcaaagcccattgacctggaaaagatgatggaggtactgtcgcgctttttagcccctcaggcaggcaagcaatagttttgaagaacgctgaataaggcagcgtttttctgcaatgcagtgcaaaagaagcatcccggtgggttaccccaccgggatgcttcttttacaagaccactgcaaaactgcgttttgcgtgcttttgtcatcatgtttcgctctgcctgcgcagaccgaaacataatcttgtactgatggtcaggaacacatgtgaccatgttgcccgatgtggcaccaaggcatatctattgcggttgtgcggaggcggtaacctttggaggctagggctgccttggtgccacacgtgggctatatgtaatacggcatttcctgtaaggccgcaccgccgtttaataatgcgaccttatgcggggaaggacccgctgtggggaggactgaggagcgcccaggtgcgctttgaactttacgaatatatatattctcaaagttcatatgagctagacgcttggaagccgcacctgaacaggccggagcagcatgtgtacaggtgcgagtacctgtgtgggaatgctgcccttgagcggcaggggggaagtgcatgggtagtatcagtgctgcaaggttagcttcagactgatgctccctccgggccaggcccgcagtaagaggcacttcatgagaaaactgtaaatactttgcactcgttgttaatattcttgggtatcccattctcggttgcattctcgttgtatgagtaaggcacagcagaagagaataatggccgagaaggtgaatgagccgataaccctgcggatgaaaagccccaaggccagtgtgttgtgcccagccgatgccagcaataccatagcggggggaagcagcaccaccaggacccttaggaacacaaggcgcaagcttaaccgaaaggtaagcaggcacggttgtccctgtaaaaaccatttacccaggaatacactgcctgcagctatgagcagggaatctgccatggaaaacaggaagttttccatgcccagcaaggggacccggcccaaaagcagaaaagccactgataacagagcattgcgccacccaccaagtagtcctgaccagaaaacaaagtctgtatatacatggataggggctgaaccattctgcatatgttcggacaataggttcaagcaaagcccggtaatccccagaatactccccaaaatcagatgattgcgagcgtcaagcacggcttcacgccgcatggtaagcaacatggcaaaagagccaataagaacagcagcctgtagtgaaacgtggggaaccatggcaatggcctctttggctccactttcaaggtgcattatccattccatggtaacacctcccgtaccttttaagagcaatcaccaaatgaaatgattgcattgctcttcaaggattttttcgaagtgcaggcaaaagcgcgattttttttgagtggggtgttagtccccccagccgcgccttggtgcaaactgtgtgctttgaacatgtgcactgtggtggctaagtctttttgcaacaccactgtgttttttcaaggcacgttacgcttgctgcttgcatagtgtgctcgcttgtactttgcgtgtctgttaaggagcattcaacataaaaaaaatgtattttgcaatattcacaaacgaagattttgcgtaaataatccattcaacaaatatgagtattggctgaagtcgttgggaggcaatggttaattttgcaacaattatggaactattttacaatttcctgtacgtatttttaccgaacaagccatagccaatgaatgcatatatgagaaagattcttattacatgtttgtatgtggtggagcagcaatatattttcaaggaatttttgcagtcgtggttgtgtgtgcaatagaacagacccaaaagaatggcaaataaacggcaatgagttgtattttatatattatcaagaagaaatcaaaatattatctagataaagtctagagatttggccatgcaccaaaaataccttgagcatgcgtgcagttggcaggctgagatgtattttagagagccataagagggggtgaatcaaagagtggcttactggcgaacaaagctcgccagtaagccactcttgcaagtgtgaactggtttggctaaggcactttcattttgaaattgcttggtggaggtaagcattactttcgtggaagggccatgtcgttacgagccctgttttctccacttgcgtagtgttgcgaacagtacctgggggtctattggcttggtaatgtggtcattcatgccgctttgcaggcttgcctcatagtcgcccaccatggcgtgggctgtcatggcaataatgggcaaggtggcatgggcggggttcttcctaatgtgccgtgtggcggtaagtccatccatttccggcatttgaatatccataagaataaggtcgtatgtgcctttttccagggcttccagggcttctcgcccgttattggctacatgggcctgaatgcttttgctttccaggtaatccagggcaatcatctggtttatgtcgttatcttctgttagcagcacacgcagcccggcaaggtcttcaaaggtgtctttttccttgtcatttggggggctttgggtgttgccttgcaatgttgcctcggctgctgccagggcgtcaggcaggagcccactctggtgagcagggctttctgtcgcaattgtaaacatggcggtaaaggaaaaagtgctgccctggcccgcagtgctttcacactgaatggtgccccccataagttccacaaggctgcggcttatggccaggccaaggcctgtgcccccatacttgcgggtggtggaagaatcggcctgggtaaagggagtaaacagtgaattaatttgctcttgttgcagaccaataccggtgtcttgtacggaaaagcgcaggcaaatggcttcgtccggggtggcggggggggtgtgcagggaaacagcaacatgcacgctgccgttttgggtaaacttaatggcattgctggaaaggttcagcagtacctgttccaggcgcagggggtcgcccacaaggttagcgggcacttcctgggcaatggtggtggtaaaggaaaggtctttgtctttggcctgttgggatagaatgtcctgcatttgtcccataatggctggaagggaaaacgacgtgttttccagcacaagcttgccagcttctattttggaaaaatccagaatatcattaataatgtgcagcaacagtttggcagaatattcggccttttgtacatacagggcttgcttttctgtcagctcggtttcggcaagaatgtgggtcatgcccaaaatggcattcatgggggtgcgaatttcatggctcatgttggcaagaaattcgcttttggcctgtgcgtttttttccgccaaatcgcgggcaaggcgaagttgttcctcttttttctgcatttctgccaacatggctttcagttcccgcaggtcgcgggtgtagcccagtaccaccgtttcttcactgcgttttccccttatcagggttatttctgcgggaacagggtctccattaagtttttggtgcatccattcaaaggttacccggcccttggcaaaggctgtttgaatatattcgtaggccatctcagcggtaggtctgccgcaaggctgaaattcgggcgagagttcaaaaaaccggtcaaggtattcctgcttgttggctaggtcgaacaggcgtggcgcttctgcgttgcagtctatgttttccagccgttcattccaaaagttgcagcacatggggtttgcatcaagcattatttgggtgcgttcttctgcttccataagcttcacgctggaaagcatggcagccaggtaaatgctcactgcctgcacggtttccacatcgctatggcccaattgcggcaaaaaaggcagttcttcggcgattcttccggtaatgagcagggcagctatttcgccttccgccagcacagggaccgtaataaagtagggcagccccaaggctttgcgcaggggggcttccaggctggcagggctttggctggttaccagcattggttttgctttgtccagcaatgaaggagcaatggaaaggggcattcccgtaagtcgctttgcctcagcttcatcatagccatgcaccatggccacctcaaagtggccaggtgtttttgcgggggtaagcaccacggtgcgctgcatgtccagggcggagtttatgcgctcgctcacagaggcaaataacgttgtttggtctgctctgtgcccaagccgggcagaaagttctgccattaggtgaaagccccggcgtttttgttccagttcatggcgcagggcaacggcttgcagatcaagctgaagaattttgccaatgttgctttgtgcacattggcgtaaatagtgcaactcttgctgcatttcttccagttcttgggcgggaatggatatcatattgttcttgttcatataggtacactcagcagacagaaaacgcctgtccagtcaaggccccgtggacgtccttccataggggcaatttcaacacctgtatacaggcccagcaagggagctctgcctgccacagcgtgttgtacaacttctgcatcttcatgtttcaggccggaataggcagcggcacggcctgcacagttaatgtacagggccagcactggtttgcggtgctgtaccccttgaaacagagcttctattctagggggaatgtacccatggtcttcaccattacggtacataatttgaaattctgtgccggcaaccatgtctggttcaaacataacaatgccgttgcgctgcaagtccagcccaagacaaaggcggcttgcataatgttcttccgcaaattcttgccacttgcctttgctgcctaccccaaaaaggaggaaaaaggggtaggcttcttggggaatggcagccccaagcagggaacgcaaaaatggtaaggcaggctggccgttaatttcaagaatggtttgtccctctgccttggtcacagtgtaatagcctgttccgggccggcacccatgcattatggcaaagtcaacctgcacttcaggggaaaacgccagccccagggctgtgtgttgctgtgtgccgctgcctgtccattgctgtgtgggcgtgccaataaagtcgccctgcatgcctgccccaaacagaggggggaaaaagcccaggccctgttcaagccctgccagcagggaagtagccataatcatgcgcaggccctggtctgtttttaccagggcatcatagaaaaggaaaaagggggtttggggggttatgccgcgggccagcattgccctgccaaggcgcatacctgcttctgtttcccctgcagtgaggttttcttccacaaacatctggtatttttcctgctgtaaccaaatggccgccacgcccacctgttcacccgcatagccaaactgggtgttggttattatgccaactgcgctgccccctattatgggcaccccttcccccaccacagccgccacggcactacgtaaatgagtagcgttatggcgggccgtagcgaagagcaacacaaggctgcaaggcccatgtttcttttgcccggcaagggcctgcacagcagcctcggtacctgcggcagtgctgccaggaagttcgctgtagccaacgcctacatgcatttggatatctcccctttacgcaaggtgttgcctgaacttgcggggtgctatgggtatgaaggataattgacacagtggagggcctgtatggaaataagacgtaagaagataatggcaagggccgcgtagcacaactggagtgtgcagcagggtctttttttagagaaacgccgcagttgtattccgtgctttcctatgtacatagcatagcttttcagacgaaggaagtataaagcatggggggtgctgtatagaatggaaggggcttctaaaccaaaaaaaggaagcctgtggcaggcttccccgggtactgtgcaggcaccggtgattaattaaaatgataacgaaaccaggtaaacagtacgttgccgtggttataccgttcaggaatgtaggttgcctgaatagccacatttttgtactgcatgctgacaatggggagcgcaccgggtaagggaatgtagtggtattcatgacgggcggttatgcctgcggtaaagccaaggcccagggaaaagtcttcgaacactttccagttttttatataggcgtagcctacaatgggttggaagcggtcgttggaatccataaagcccatggtgtacagggaatgctggtcgccgtcttcatcaaaatacgacttgccaaaaccgccgccccaggggtgttcgttgaatttttccgcttcccccgtgtggtacatgaatctgttgtgccaggcgtaggcaggcacgtacacgtcccatttgccattttcccaaatgttggaaaaacgttgcccgatacgggtgagcagggaagggctttccccttcggcggcttctgcagcaggcaacgtataggttgtttcaggagcggcaggtgcggaacccggcgcgttgtctacaggtcctggtgcgctggctgtggcagcaggtacggcaactgtgggctgttttcctgctccttggggcatggcggcattaaccggggcagtatgcaggcaggcaagcagggtgcatgcggtcaacactactttgcaggaaaaacacaatgataccaaaaaaagacgcatagggttgctccaaccatataagcgatgaaaaataggcggcatggccgcaccacgtttatttaaacggaaaaaaaatccatggcaagaggtagaatggggatgctgtattttttttatgtgccttaaggacagactgcgaaaatggcgtttcctcaaaaataaattctttacagaacagggttcctgtggcatcaatggccctctggcacggcatatgcccaaccagaacactacctgcaccagatgtgggttcccgtggggttgtagctcagttgggagagcgcttgaatggcattcaagaggtcgtgggttcaattccctccagctccaccagaaaatttaaggattccgtagcaatacggagtcctttttttttgtgcgtgtggggcagggtacggtctatgacccaaatatgacttttactttggtcaatgagggttggtgggaatataaatagaagcgattgaataaaaagaggcggcccccgaagggaaccgccaaatcttacggtgttctgcccgtgggcaaaacacttgttatagttgcctaaccaaatgaatcctgctagagattaattgtatagataaaaaaataattacaccgaacatctcgtgttgtcaactttattatacggagaagcacatgccccaatattatcggtatattcttggcatagaccttggcatagcatccactggcactgcccttgtattggttggaccgaataatgaatttttaaaaatacttgatatgggggtacgtacttttatcactcccgatggtgcttctgaaaggcgcggtaaacgcatggagcgtaaacacacacggcgcaaacgccagcgtcttagccgggtgcgtcttgtactgcaagctttgggcttgctccctgctgccgagcaagaaatgcacacacttaccctggcaaacccttaccagttgcgggctaacgccgtgcaggggaaactggaaaatatagcagagctcggccgctgctgcctgcacatggcaaagtttcggggggctggctttttaacccagcaagaagaagcaatggaagccgggcatacgcttgctgcaccagaacttaccgcagaagcagcaccagtaaccgcaacggcaaaaaagggtgctgcccccaaaaaagacacccaaaaaacagccagcgcctaccgtaagcttgaagaagtgctggggggcacagggcaaaccatttcgtctttttttgtgcaacgcctcaataatggcaacccggtgcgccgccgtaagtttcaccttggcacaggcaacaatggcacagcggaaacgggttacgctgcactggcaggcacaaaggaagtggagtacgcggtacctcgttttttggtgaaggaggagttccggcgcatgtgggccacccagcgccagcattacccccaccttacgccagccatggaagaagcggtgtatgacgccatttttcaagatgcaccccatgccccgtatgccacaggcaactgtacctttgtgccgggggaaaaacgcctgccccgtatgcaccgcctaagtgaaacgcgccgcatttatgagcaaattaaccacatacgctactccacaccggaaggggagcgttttttaactaagcccgtgcgcgatgcattggttaccaaggccctgcaccagggtgttgcccttaccaaaacagaactgcgtaaaaccataagcgccctgacaaacgaaaaagtgctgggggtgaaccttgcggacgaggtaaaaagcattcagcctttttcccatatcaaagcatttgccaatgttccggcctgggccacgttcagccagcaggaacaagacagtattatagactttattgcagagcccgccattgacccgcaagaccccgccagtgttctatacccggaggatgctcttctggcacttttgtgccagaaactccagatgcaagggccgcaagcagaagctgtggcaagccaggttatggcggcgctgccacagggcagaagcaaccttggcataaccgccacacgacaaattattgaaaaattgcgtgaggggtatgaagaggcggtgccggacgaaactggtgcaccatgccttgtgtggcggccccacacgcaccgttccgcggcagatgcctgcgcgtttatggcagaagcggaacgcattcgagccattggtggcaactacccgctgttgccctattatgcagaaatattgcagcaggatgtaacccctattcacccgtggcacaagcacacagcagcggaagaagaacgggagcaggggcgcgtgcccaaccccgtggtgcatgtggtgctgaaccagttgcgtaaagttgtgaatgaaattattggcctgtatggcaagccccagcgcattcatgtggaactggcaagggaacttggcctttccgccaaaaaacgtgatgagttgattaaagaaatgcagaaaaatgagcgggaaaatgaagctattcaccgcgaactggcagagctgcaccttgccccgagcaagcgaaaccgcactaaatacaagctgtggttgcagcagggtaagcgcagcttgttcactttacaggaaattgaagccagcgacattgctgcctgcgaaattgagcaccttattccccgttcacacgggggtaccaacaccttcatgaacctgtgccttgtgcctgatgcggaaaacaaggccaagggcgaacagttcccttacgatgttattcaaaagctagccaaagataagtggagtgaaatcagtaaaattattcacgaccccaagttccccaaggcaaaggcctggcgctttgggccggaagccgctacccggtttggcgaaacaggggatgaagaacaaacagaccgtcgccttacagacacccgctacatggcaaaactggccacccggtacttgcatgctgtgtgcccggatattgttccggtaaaagggggcaccacggcggcattgcgccgctactggggtttggaagggcttgaatatgaattgcttggcgtacctgtaacaaaagacatagtggacccggaaacaggtgaggtgcacataaaccccgccactggctaccccgcccacaacccgctatgggccgcaaagccacgcatagaccaccgccaccacgcgctggatgccctggttaccgcctgcaccacaagggctatggttaaaaaaatggtagagcaggaaaaagctggccagcgcattagcgaatttccacagccgtttggtgacagtaccgcccattttcggcaccacgtgcaaaaccatttgttgtgcgttactccttcccccaaggccgaacacggcatggcagggcaactgcacgacgccacaaaataccgtattttgccagaaccggaaggaaaaccagccaaagaaggcgagttcaccatacgcttcagccgtgccctgagtaaaattacgagctataacgacattgcaaacattgtgtttaataccaaaacaataccccttgccacgccacaggcccagcaagcttaccagcaatgcctgcacattgtgcaggtaattaacaaccatttgccagaggcagaacaagccttgcacagggcacaacaggaagctgccgaaaatggcaagcctgtgcgggcattacctgcaaaggtgcaggaagcaaacaccgtaagcatggctattcagcttgcgcaaacaaaagggttgcttggggcaacgtacccctgtttggcacgcaagtctttagtgggcataaaccgcgccttgcaatttggctatgaacccaaaaacaactaccgcaccgacttttttgtggatagtaaaggcaaggtgggttgggagtgcatacggcgcatagatataaacaaccccgagtttgtaccgcaatggaaaaaagatggatacaagcggctgtggggcctgtgtaacggcgacgtgctggaagtgctgcctaccccggccctgcatgaacaactggggccactgctgcccaaggggccagtcttctttgtggtgcaaaaaatgagcaatggaaggctgcagtgcaacttgctgcacgacgcccgcgccctggatggctcaaaccaggccgtgcaggccgggttgaccaaacacccggcatatgcccggtggactactggagaaaacggactgagctattactgccagttgcaagcccgcaaagtggagttgaccccgtttgggaagatagcgcgcaagcacgcaaggttgtggcatggcaagaaaatgggcaagaaaccataaacggccaggacattacgaaataatgtgggttgttgttatgtttgacctgcccgtgagcacaaaaatggaaatgcgccgggccaccctgttcagaaacagcctgctggagcttggctttagcagaaagcagttttctgtgtacatgcgccatgccgccaacctggaaaatgccaagcaactggcccaaaaggtaaaaaaatgccttgtgcccaatggctatgtttctgttttgtatattacagacaggcaatacggcatgacagagaacttttttggcccggcaaaagccaaaaatgagggagcggaattggcaacgcaccagcagttaatgttattttagccgctgtaatgctatatggctttaggtccagcaggaaaagcaggcagggcaagttttatggccccttcggtaaacgaagccgccagggtttgggccataaggtacgttgcaggaataaagtaatttgttcgttgcagcatggccaccttttggtcggtaagggaacacagtatccgcttgtttttgggggtcagttccggctctgctattccagccacaagaggtgccacaagtgcgtctgcaaaggggcgcaggggttccatcaggtcgtctgcaaggcaaaaggcattcagcctgttgcaatggtgcaccccaaacaggggtaatagccccgccgcacacaaggcccgcaccatgcatgcccgcaccacggcataggcataattcaaaaaagcgttggtgcccgccgcgcttgcttcacgcacaaagcccttgccaagcagggcaggccagtaaaggcgggcggcgttggcttcgtaattatcgctgtcgcccggcttcactttttggctgaatacctcaattcgttctgccaccttgctggcatggggggcgtgctggcgcagcacggccgcctggttgcgcagctttgcctgcacaatggtttgccagaggttgttttttaacgcaacagaagcccccacctgggcatgggctatggcctgctgctggtaatgcacggttatgggggtagctatggaaatgggggcgtattgttcgccacaaataataacaggaatatttaatgccccaaggcgggaaagaaacgactttgtgagcgtggcaccctgtgcacttataataaacgctgtaatggtatcaatgggaatgcgcccaagctcggttcctttttcttgcaccacaacaaaaccgcgctccgcatgaatgtaacggccttcttcggaaacctcaattatcatgcctgcctccttggggatatgcaaaagagactactttccgcacgtgggaaagtagtctttttttgcaatttttctccaaataaatcagcacattgattgcaannnnnnnnnnnnnnnnnnnnnnnnnnnnnnnnnnnnnnnnnnnnnnnnnnnnnnnnnnnnnnnnnnnnnnnnnnnnnnnnnnnnnnnnnnnnnnnnnnnnnnnnnnnnnnnnnnnnnnnnnnnnnnnnnnnnnnnnnnnnnnnnnnnnnnnnnnnnnnnnnnnnnnnnnnnnnnnnnnnnnnnnnnnnnnnnnnnnnnnnnnnnnnnnnnnnnnnnnnnnnnnnnnnnnnnnnnnnnnnnnnnnnnnnnnnnnnnnnnnnnnnnnnnnnnnnnnnnnnnnnnnnnnnnnnnnnnnnnnnnnnnnnnnnnnnnnnnnnnnnnnnnnnnnnnnnnnnnnnnnnnnnnnnnnnnnnnnnnnnnnnnnnnnnnnnnnnnnnnnnnnnnnnnnnnnnnnnnnnnnnnnnnnnnnnnnnnnnnnnnnnnnnnnnnnnnnnnnnnnnnnnnnnnnnnnnnnnnnnnnnnnnnnnnnnnnnnnnnnnnnnnnnnnnnnnnnnnnnnnnnnnnnnnnnnnnnnnnnnnnnnnnnnnnnnnnnnnnnnnnnnnnnnnnnnnnnnnnnnnnnnnnnnnnnnnnnnnnnnnnnnnnnnnnnnnnnnnnnnnnnnnnnnnnnnnnnnnnnnnnnnnnnnnnnnnnnnnnnnnnnnnnnnnnnnnnnnnnnnnnnnnnnnnnnnnnnnnnnnnnnnnnnnnnnnnnnnnnnnnnnnnnnnnnnnnnnnnnnnnnnnnnnnnnnnnnnnnnnnnnnnnnnnnnnnnnnnnnnnnnnnnnnnnnnnnnnnnnnnnnnnnnnnnnnnnnnnnnnnnnnnnnnnnnnnnnnnnnnnnnnnnnnnnnnnnnnnnnnnnnnnnnnnnnnnnnnnnnnnnnnnnnnnnnnnnnnnnnnnnnnnnnnnnnnnnnnnnnnnnnnnnnnnnnnnnnnnnnnnnnnnnnnnnnnnnnnnnnnnnnnnnnnnnnnnnnnnnnnnnnnnnnnnnnnnnnnnnnnnnnnnnnnnnnnnnnnnnnnnnnnnnnnnnnnnnnnnnnnnnnnnnnnnnnnnnnnnnnnnnnnnnnnnnnnnnnnnnnnnnnnnnnnnnnnnnnnnnnnnnnnnnnnnnnnnnnnnnnnnnnnnnnnnnnnnnnnnnnnnnnnnnnnnnnnnnnnnnnnnnnnnnnnnnnnnnnnnnnnnnnnnnnnnnnnnnnnnnnnnnnnnnnnnnnnnnnnnnnnnnnnnnnnnnnnnnnnnnnnnnnnnnnnnnnnnnnnnnnnnnnnnnnnnnnnnnnnnnnnnnnnnnnnnnnnnnnnnnnnnnnnnnnnnnnnnnnnnnnnnnnnnnnnnnnnnnnnnnnnnnnnnnnnnnnnnnnnnnnnnnnnnnnnnnnnnnnnnnnnnnnnnnnnnnnnnnnnnnnnnnnnnnnnnnnnnnnnnnnnnnnnnnnnnnnnnnnnnnnnnnnnnnnnnnnnnnnnnnnnnnnnnnnnnnnnnnnnnnnnnnnnnnnnnnnnnnnnnnnnnnnnnnnnnnnnnnnnnnnnnnnnnnnnnnnnnnnnnnnnnnnnnnnnnnnnnnnnnnnnnnnnnnnnnnnnnnnnnnnnnnnnnnnnnnnnnnnnnnnnnnnnnnnnnnnnnnnnnnnnnnnnnnnnnnnnnnnnnnnnnnnnnnnnnnnnnnnnnnnnnnnnnnnnnnnnnnnnnnnnnnnnnnnnnnnnnnnnnnnnnnnnnnnnnnnnnnnnnnnnnnnnnnnnnnnnnnnnnnnnnnnnnnnnnnnnnnnnnnnnnnnnnnnnnnnnnnnnnnnnnnnnnnnnnnnnnnnnnnnnnnnnnnnnnnnnnnnnnnnnnnnnnnnnnnnnnnnnnnnnnnnnnnnnnnnnnnnnnnnnnnnnnnnnnnnnnnnnnnnnnnnnnnnnnnnnnnnnnnnnnnnnnnnnnnnnnnnnnnnnnnnnnnnnnnnnnnnnnnnnnnnnnnnnnnnnnnnnnnnnnnnnnnnnnnnnnnnnnnnnnnnnnnnnnnnnnnnnnnnnnnnnnnnnnnnnnnnnnnnnnnnnnnnnnnnnnnnnnnnnnnnnnnnnnnnnnnnnnnnnnnnnnnnnnnnnnnnnnnnnnnnnnnnnnnnnnnnnnnnnnnnnnnnnnnnnnnnnnnnnnnnnnnnnnnnnnnnnnnnnnnnnnnnnnnnnnnnnnnnnnnnnnnnnnnnnnnnnnnnnnnnnnnnnnnnnnnnnnnnnnnngtgcgactctagcaggattgatttggacaggcaactatagctgctgcggttcgtacttgtctggctgaatcactctagcaggattgatttggacaggcaactatagctgttgtggcaaggcctacacaacgggctgtattatattttccctgctcccatgacccaaatatgacccaaaagaaaaatcacccttcgtaacctattgaaatcatgtactgcatgcacgccatgtacgaaagtgcaataccgatggaaacgcgcccggattttgttgtgggttatgcgtaaaagtgttgtgcctcaaggctttttgtgggcatgtgcatgaacaaatggccgcatcatctcctgtttgcctcctgaatggcattcaagaggtcgtgggttcaattccctccagctccaccagaaaatttaaggattccgtagcaatacggagtccttttttttgtgcgtgtggggcagggtacgtcatagcgattgcaaaaaagcccctgccagaacatatctggcaggggctttccatacttcaagtgcagcaaggctcagcgctgcaatggcagcatttactggctcagggtttggagcaccttgcactgttcaagggtcaggtccagggtgccgaagtccgcttctttcatacggccaagcactgttatgcgttggcctttgttcaggctcataacggcttgttcctggtcgctgtcaaagcggcaggtcatgtcatcgttatagttggcaggaacgtccgccatgtgaataaagtattcctgcttgcctgttttgcgcccgccacgggaaaagtctgggctgcgtgaaaaggcattcacgcccacaacgtaaacatccagtttcatccatttgcctgtgtattctttattggatcgtgcgttgtttgcccggtattcttcagcaatttgggccacacttgttttttgcaagttgttcactttgtcttgctgctggggggtaaactgggttgaacgcggcgtgcagcccgcaaggagaaaaaagaaacagagaacaccaagtaatttattcatgaagagactcctgaggtaagctttgcccggcatggtgcacggcagccacggcaccgtacttggctggttacctggtgtcaaggaaacgttcagttttctgatttgccacttcctgctgctcctgcggcggggtacatacattggtggtggggcagggctaaagagccataaccacaaaaaaccgggtgcattgtaccatgcacccggtttttgcctgaaagaaggctattgcataatagtcttaaagcgacttcccgcagggaagacgttccaaaaagcgtttctttagccgagtcgctttgcttctgccgcaaccttaacctgcaacgcttccccaagggtcttgcctgcttcctcgcactgcttcaggaatgcttccttgggcacgtattgtgttttcagtgcaggcaggggcatttccatgcccatttgggaaaggcgctcgtgaataacgttcacactttcacctgaccagccgtaagagccaaaggccgctcccaggcggttttgggggcgcaggcctttcatgtaggtaagcatgcgggccacgttgggcataatgccgttgttgtgggtgggggaaccaacaataaccaggccgcaccgggaaagctctgtcattactgtgctgtggtggtgctgtttcaggtccataatatggctttccacacctgccaggcgcagcccttctgaaagggcataggccattttttcagtgctgtgccacatggtgtcaaacacaatcagggccttgttttgtgtttgttgcagggcatacttgcggtaagtttccagcaccatgtttacttgctctttggtacggaaaataaggccgtggtccggggcaatcatgtcaatttccagcttcagcgcggtaacgtggtcaagcaccttaagcacttgctgggagtagggcagaacaatgttgtggtaatattcgcgcatggcaaattcaagcattgccgggtctacttcatcggaataacggacagtgctggcaatgttttgcccaaaggcgtcgttgcttataagcagcttgtctgtgtcaatgtaagagaacatgctgtctggccagtgcagcatacgggtttccaaaaagtggatggtacgcttgccaatgcacagggtgtcgcctgtttttttcacttcaatgggccagcctgtggtgtcgaagtgggcttgcatggctttaaggcccatgggggaacagaaaatcttttcaggcttgcacattttaaccagttggggcaggcagccagaatggtcaagttccacgtggttaatgacaaaatagtcaatactttccgggtttgttacaagcgacaaacgggcgagcatggtgctgagaaagtcgtgctttaccgtgtcaaacagcacaattttttcgtctttcaccaggtaagagttgtatgtagaacccttgggtgaaagggaatagccgtgaaagtccatgctgccaaaatcaacagcgccaacccagtaaatatcttttttaatttctaatggttgcataatatcctctgatcgttagatgcgtgtttattgggggtatactgcccaacttttccccttttgcccatgccttggcagcttatttcaaacagtggctgcctctggggtggaaaagactatactctttctgttctgcaagggcaagttttgggaactcatcagtgcgaagccaaacgcaacaccgttggcaaaagtgcctttggcattgactttattgcggctaacttctatgaataatttagaaattcgaagaattttctccttgggtatgtgttgctcgttttttcaagaggacacgcccaaaatcccccacctatgtgcgttggtgttttgctacacgcaacctctctgattttccggcacatattgcgtgctttcctctgcgtttagccaagtttgtctttataggcttgtatgcagcaatacaccaaatttatgtgcataaatcgaggcttattcttgcaactgccactattttttgcataattttcttgaaaaattttgaggctgctactcaatcgcttttccaaagtgctaatagcacttattattattaaaaacaatataaatccacgcttcaaacgtgtgaagagggagaacggtatgcagcgcactcttattatactcatgctcagtttgttctggatagcaggtacgcccactgggggccattcggcagatggcgcggccttgttccttcgctgtgttggttgccacggggctgatggcacgaaaccgcctcatgtacttaagggccaaagttctgcccaggtgcttggtaaaatgaaggggtttcttgatggcagctatggcggcgagcgaaaagaagtaatgattggcaagctcaaggcgctttcacctgaagagaggcaaagcctggctgattatatagggaacttgtaatgcgcgttacagaaaagaggttccttgccgccctggcagtgcttgcggtgggctggtttggcctgggcagtgtggcaacgcttgcggcccagccagaagcccccgcagcccagcatgaaatgcatgaaggcaccctggccaaccaggtgccaccgcttacgcctgaacagcagaagaacccccacctggccataccgggggggcaggaagctgttgcccataagcgggaacagctagaagaactgagccaggaagaaaaggcacagtttgcgcgggtggatgaaaagcccggtgctatcattccgcaaggcattatgtttcgcgatgaaacaggccgcgaagtagctattggcagcctcatggacgttccggtaattcttgtcccggtgtattattcctgccccggcacctgccacttattgctcagttccctggcccgcatcctgcccggtgtggccctggtgccaggtaaagagtatcgggttattgccgtaagctttgacgaacacgacaccccggaactggccatgcagcgcaagaataacatgatggctgccatggactttgcctaccccccggaaggatgggtgtttttaagcggcagcaaggaatctgttgcgcagcttatggggtcttttggctttcggtacaagcgcatgggcaaagacttcatacaccccaccatgttgctggcagtagctcctgggggtaaaataagccgctatttatacgggcaaagcttcatgccctttgacattaccatgtcccttaacgaagcggcacaaggcaaggtgagcttgtcgcttaagcgcgtgctggcctactgctttacttacgatgctgccagcaagcgctttgtgtttgactttatgcgccttgccggggtggttattctgttcggcgcaggcgtatttttgtttgtgctggtgaaaggcaacaaacgaaaaaagcggccctgaacgttggtgttgttccgggttgcgcatgagtttaccgagcccttttggcttttcaaagttaacatgttccagaggatgatatggctacaagcacaagttttcttgaacccatgccaggaacccgtgggggaattggctcatggatattttccaccgaccataagcgcattggcatgctgtatttttatgccattctagccatgtttgccgtggggcttacccttggcctgctcattcgcctggaactgcttacccccaacacacgcatgatgagcgcagacacctacaatgcgctgttcacgctgcatggggttgttatgatttttctggtggttattcccagcattcccgccacctttggcaacctgttcctgcccattcaaattggggcggaagatgtggcctttccccggttgaacaacttttcctggtggctgtacatgacaggtgccctgctggccgttatagccattttcacaggcaacggcccgccagatactggctggacattttatgtgccctttagtgaaattaccaccaccaacgtgacccttgcggtatttgccgtatttattctgggcttttcctctattcttaccgggctgaattttattgtcaccctgcaccgtatgcgggcaccaggcatgacctggacacgcctgcccctgttttgttggtcgctgtatgccaccgggtggattcaggtactggccaccccggtgctggccattaccttgctgcttattatggcggaacgtgtgctgggggtgggcctgtttgacccttcccgtgggggcgaccccattttgttccagcacctgttttggatttattcgcacccggcagtgtatgtgatgattctgccagccatgggcgttatttccgaagtgctgcccgtgttttcccgaaaagccatttttgggtacaaaatgattgctttttccagccttgccattgcttttgccggttccctggtatgggcacaccacatgtttgtgagcggtatgagcgacaccgccgtgctggtattctctttccttacctttgtggtggccattccttccgccatcaaggtgttcaactgggtggcaaccttgtacaaaggttccattcacctggaaccgccgttttggtatgcgttggcttttttgttcctgttttccattggcgggttaaccggactggtgcttggttctgccggaacagacgtgcacgtgcacgacacctattttgtggtggctcacttccactatgttatttttggcggtctgggctttgcctttttttctgccctgcacttctggctgcccaaggtgtatggccgcatgtacaataagcactgggccaacgtggcctgcctgtttgccttcattggctttaacgtgctgtatttccccatgtttattgttggccttcagggcatgccccggcgctaccacacctacctgcccaagtatgaaggaatgcaaatgctttccactgtgggctcatgggttttggcttctgccattattcttatggcctggaacttgtggcgcggtgccaaaaaaggcaagcccattggcaataacccctggggttctgccacgttggaatggagcatagcttccccgccgccgcaccacaactttgtgacggaaccagtggtaacgcatggcccctatgactatgaagggattactccagatgcctgataccaacttacacccagcgcaccctgccccggttcccgatattgagggcgaccgcattggcatgtggttgttcctgtttacggaagtgcttctgtttggcggtttgtttttgctgtatgctgtgtattttagccgcgacccggaagcattccacaatggtggcaaggtgttaagccgcgttatgggaacggtaaacacggtggtgcttattaccagcagcctttttgtggttctcgcggtaagcgccttgcaaaagggcaaggtagcccttgcccggtatttattgctgggcacagtgttggcagcccttgtgtttttggtaatcaaatacgttgaatggactgcca

SEQ ID NO: 4400 - DNA, 23552 bp, synthetic construct
  source 1..23552: mol_type = other DNA
  misc_feature 1..23552: note = Synthetic
gctgtccatcgacgagcatgaacacgaaaatcaggaaacactctcgctcgacacctctcttgaaaatctgaacatcaagggacggcgcatacttgtggcggaggacaatcccattaaccagctcgtgttgcaggaaatgcttgcgccctccggcgcgcaaatcgtactggccaataacggacaggaggctctggacgccgtcaaggcccagtcttttgatctggtgcttatggatatgcagatgcctgtcatgggggggcttgaagccacggcgaaaatccgggagcttcccacggcaaaagacctgccgatcatcgctgtaactgccaatgcgatggaagaagacaaggataaggggtttgcctgcggcatggacgcctatctgacaaaacccattgacccggtggaacttgtgcgcgtgcttcacacctggctggacaagcgcctcccggcgacaccgcaataacagatccttaaaagcattcgatagtaaacaaataccccggcaggactactcagtcctgccggggtatttgtttagcaagtaattccagcattattattggcgcacaaagccgggaatgtggtttttattgattcaagatattttctcaaaactaaaaagatttagtttagatcaaaatataaaaaaatctatatattttttcaaaaaaatggaaactaaagctaatctcattgttgtacaaggtaattattgccatatcggatgattttttgggggagatgcccgtccagagtaaagtggcgtgaacgtcgcttttaccgttatttcgcttgattaggaaaaaatgcagctcaggcaaaaaatgtggcctgttgggtaccggcgcttgacatacgatctcaaatatgtgttatcttatatgggactatactcaatcatacggtagccacattttttcctactcaggatccaggagagcatcaggtatgaagatcaatactatcgccgcatccgccatgtacaaattacaagtagccttctttttctggcgagcggtggagcggaccgaactcggtgattccgctccgagtccggaacttttcaatgctgaacgcatggagcgttacggcacagagttggcatcaacccataagctgcgcccggcgcgggcgaccggcctcctgctggcccggctggcggacaatgaacgtgttctgagcaactgctgcaaaatgttttccgcggtcacagccctgtccaaagtggaacgccggagcagtccggccggggaatggctgctggataactactggatgctggaggagcatattcatgcggcccggcggcacctgccggaggcctatatgaaggctctgccccagcttgccggcggcgccgtggacggaatgccccgggtctacgatattgtcctggaaaacatctcccacgcggacggccatttggacaacgccttgctgcaccgttttgtggaagcctaccagacggtcacgcccttgaccctgggtgaattgtgggccattccaatcatgctgcgcctggccctgatcgaaaacttgcgccgggtatcggtcaaggtcattgcctcctggcacgatcgccaactggcaacagcttgggcggagcgtattctggaagccgcggcaggcgggaaacggggccttttgccaatcatggccgagttggccgcttccgggccgcctttgaacgcgccctttgtggctgaactggcccggcgtctgcaagatcaggggccgggggtagccctgtctctgcactgggtggaagaggaagtggcgcatacaggccgatccatagaacaactggtgctggaagacacgcgggaacaggctgcggagcaggtatccatcagccattccctgtgcgggctgcgcatgcttcagtctctggattggcacgactttgttgaagggcagagcgtggtcgaacaagtgctgcgcaaggaccccgcgaatatttacccgtccatgacttttggcacgcgggataattaccggcatgccgtggagcgcctggctaaaaagtacggcctgtccgaggagcgcgtggcccgtatgaccttggcccttgccaatcagcatggccggaaaaagtcttacctgcctgaggacgaggcaatgcctccacaaagcatgcccggtccggccggacatgtcggattctatttgattgacaacggtttgccggatctgaaaaaggcactgaaggacgcggcaggaagtggccccgcgcagactttgggggaacggggggcggaggctctcgcagaggccgcgcctcctcttgaagcgtgctcctctcttcttgcccaggacaggcgtgactccctggccctgcctgtttccctgtacatcggtctggcccttggcctggccttgctcctgacctggccgttcctgttcatgctgcgacagggcggagccgggctgtccctgttgcttgcggctgccgtgcccgccttcatcatggccagtcaactcacgatcaagctggtcaactggctgtcctgcctggccgtgaggccgcgcttcatgccccggctgaatttcagcgcgggcatcccggccgacgcgcgcactctggtggtggtgccttgcatgctcggcaacgtcgaggaggtggatacccttctggaacgcctggaagtgcactatctggccaaccgggatcccaacgtgcagttcggtctgttgagtgacttcaaggatgctccggaagaatccatgcagcacgacgcggccttgctggatcgtctggaaaagggaattaccgccttgaacgccaaatatgccgacaacggcgccgtggcggaacccttctttttctgccatcggccgaggcactggagtgaatcggagcaaacctggatggcctgggagcgcaagcgcggcaagctggcggagttcaacgccattctcagaggaaaaggctttgcgcgttttatgcgcattggcggcaacgcggttggcaactcggttgcgggcaaaccggatctgtccccggttcagtatgtaatcaccctggatgcggacaccaggctcccgcgtgatgtggtgcgccaactggtcgggagcatggctcacccgctgaaccggcctgtccatgacccggaaacgcggcacgtggtgtccggctatgccgtgatgcagccgcgcgtggcctcaaccctgaccagcgccacccgttccggctatgcccggcttttctgttccgacgcgggctttgatccctatacccgcaacgtatccgatgtgtaccaggatcttttccggcagggttcgtatatcggcaagggcatctattcggtggactcctttgaggaggccttgggtgaacgcttcccggaaaacagtatcctcagccatgatctgattgaaggctgttacgcccgttccggtctggtcacggatgtgttggtgtatgaagactatccctccagctacagcgcggacgtggcccgccagtcccgctggatccggggggactggcagctcctgccctggcttttgcccagggtgccggtgcccgcttcggccgcgcctgggcacgggccgtccgcgttaaggccgcaaagcacggtccgggagaagaacccgctttccgccctgtcgcgttggaaaataatggacaatatgcggcgcagtctggtgccgctgtcgctcctgaccatgctgctgctcggctggtttctggctcccaacccggccgcctggaccctgctggtcctggccgtggctttttccctgcctcttctggacgtgtttcatgctgttatgcgcaagccgcaggacattcccttccggcggcgcgtcgggatcgccttgcagtccttgggcgatcacagcgtgcgcatgctgttcatcctggtctggctgccgtttgaagcctggtacagccttgatgcggccctgcgcaccctgtggcgcatgacagtaagcaagcgcggcctgttgcagtggacgccttccgctgacacggccctgaccggagccgataccctgcccgcatttttccggctgatgcgctccgcgcccctggccgccctgatcataggaatagccttggccgtgttcaaggggtcgcaggccgcggtctggttgaccgctggaccgttcctgctgctctggttgccggctccggcctttgcctggaagctgagtcagcccacggcggccgaggcctttacgcccacgccggtggaaaaacgcctcctggacaagttggcccgccgcacctgggcttttttcgatacctatgtcggcccggaagacaactggctgcccccggacaacatgcaggagcggcccgagatcgcggtagcgcaccggacgtcgcccaccaacatgggcgtgtccctgctctcccatctcgcggcctgggatttcggctacctggggccgggacggctgctggagcggctggacaataccctggcggtcatgtcctgcctggagcgctaccggggccatttttataactggtacgacaccaagagcatggaagtgctgatgccgcgctatgtctcctccgtggacagcggcaacctggctgggtgtctcctgaccttgcagtccggcttgagggaactggccgattccccggtgctgcatgcccgctgctttgagggcttggccgataccgccgggattctcggcgcgtccctgcctgttgccggggaatatgcccgggaatgggaatcatttcaggaactgttgcgggccgccagatcccaggagttctccactctgcatgatgcggcgacagccatgcgcctgctggccgagtcagcgacccggctgcatgcggcctgtgacccggccaaaggcagcgaagcctgtttctggctggacgccctggagcggcagtgcgttgatctggcggatgaactggaagcttttgccctgccaccaggtccagatagcgtggccttacatctgcccacgtaccggcaactggccgaactggacacggccagccagccgccggaactgcgggaaaaggcggaaagcgcccgcgccctggcaaatggccggatagggctggccgaaagcctgggccggaccgcggccgatctggcggacatggacttcaccttcctgttcgacaaggggcgcaacctcttgtccatcggctacaatctcgctgccgggcggatggatcaaagtttttacgatctgctcgcttccgaggccaggctgacctactttgtggccattgccagaggccagttgccgcagaagagttggttctccctgagccgcttgctcaatcagagcggcgacgcgtccgtgctgctgtcctggtccggctccatgtttgaatacctgatgcccctgctgcttatgcccaactacgaggctaccctgcttgatgcggcctgccgggccgcggtcaggcgtcagatagcctacggcaaggaactgggcctgccgtggggcgtctcggaatccgggtacaacgtgcgcgacggtaaccataattaccagtaccatgcctttggcgtgcccggtctcgggctcaagcggggactgggggatgacgtggtgctcgcgccctatgccacggccctggccctgactgtcatgccggagccggccgtgcgcaacctgaaccggctgcttgaagaaggcatgggcggccgcttcggcatgtacgaggccgtggactatacggcgtcccgtctgccgcgtgggcagaaatcagccataatatattccttcatggcccaccatctgggcatgaccatgctttctctgactgccgcgcttctgggtgaacccatgcagcgccgctttctggcgcagccggaattcagggcagccaccctcctgcttgaggagcgcgtgccggaagccgcgcccgaatatctgcacagcagcaaggagatgaccctgaactccctggagcaggccgcgcacggcgcggaaaacactctgcgtgtgtatcttgaaccggacatgacgcatcctgccgtgcaattattgtccaacggacggtatcatgttgtggtcagcagcgccggaggaggcctctcccggcatgaggacgtggccataacccgttggcgcgaagacgccaccagggataaccacggcatcttctgctatttgcgcgatgtggaaagcggcgagttctggtctgccgcgcaccagcccaccacagccaaggtggaacgctatgaagcggtattttccggagcaagggccgagttcaaggtcaggaacaacggctttgacagccacatggaaatcgcggtgtcgcctgaggacgacatggaattgcgccgggtgcgcctgcacaaccggagtaaaacgcgccggaccatagaactgaccagctatgtggaagtggccctggggccgcagatggacgacgcgcagcatccggcttttgccaagctgttcgtgcaaaccgcgctgcatcccgagaaacaggccattacctgcgcccgcagaccgcgctcgcccgaggaaaagccgctgcacatgttccatgcctttgccgtgcacggggccgcgtccgaggctgtgtcctacgaaaccgaccgcaatcgtttcattggccggggccgcagtctggccgctccggccgtactggacccggatgctccggaagccctttccggcaccgagggcgcggtgctcgaccccattgcggctatccgctgccggatcacgctcgatcccggcaagtccgccacggtggacctgttcaccggcgtgggatcggaccgtgagcattgcctcagtctggtttccggctataaagatgagcatctggccgatcggatctttaacctggcctggacccacagccaggtgctcctgcaccagttcaacgcctccgcctttgacgagcacctttacgaagacatggccgcgccccttatttacggccacggtcccttgcgggccgataccgctgttctggccgccaacacgcgcagccagaccagcttgtggggacagtccatttccggcgatacccccattgttctgctcaagatctccggcatgtcccacacggcgtccgtggcccagatggtcaaggcccatgcctattggcgggccaagggattgaacgcggatctggtcatcctggatgaaagtcacatcgggtaccgccaggaactgctggacctggtgatcagcagctcgccctcggtaggggaagtacaactgctggaccggcccggtggcatttacctgcgttttgcggatcagattgcccgcgaagacctgattctgctggaggcttcagcccggttggtcttcagcgacagaaacggcccgttggacgagcaggttacccggaccattgccgaaaacccgctgcccgccgcctttcgtaaaacagttgaaccggattcggccgcgcaggacagccagcaggttcaggctccccgcaaaccggctctgttgctggccaaccgctatggcggcttcactccggacggcagcgaatacgtgatctctttgcaggaaggcgagcaattgcccgcgccctgggttaacgtactcgccaacaagcagatcggcactgtcatttccgaaagcggcagcgcctacacctggcgggaaaacgcccacgagttccgcctgagcccgtggcagaatgacccggtgcaggacgagagcggggaagccatctacatcagggatgaagaaagcggagaatactggtccccgaccccgctgccgaaaagaggcacgggcagctactgcgccaggcacggcttcggctacagcgtgttctgccacgtggaacaaggcatgcgcagcgaactcaaggtgttcgtgggccgcgaggttccgatcaaattctcggtactgaaggtgtacaacatctcgggccgggaacgccgtctctcggccacgggctatgtcgaatgggtgctcggcgatctgcgcgccagaaccgcccagcacattgttacggccaaggatatgattaccggcgccctgctggcaaaaaacgtctattctcaggactttccgggcaaggtcgccttttttgacgtgaaccaggaggaacgctttttcaccgctgatcgggccgagttcatcggccgcaacaacagcctgcgtaatcccgcggccatgtccagggtctccctgtccgggcgcagcggcagtctcgaggcagccgccaggcggccgggccgcatcggagccgggtacgacccctgcgcggccctccaggttcccttcagcctgaaagacggagaaagccgggagattgtctttatcctgggcgcggccgacaacgtggaacaggcctcggtcctggcccggcgctataccgctcccaagagcgcccatgccgagcagcgtctggtcaccgaatactggcgggacgtgctgcaaacagtgcagatcaaaactccggacccggccgtggacgtactggccaacggctggctcatgtaccaggccatggcctgccgctacctcgcccgtagcggctactaccagtcaagcggagcctatggtttccgggatcagttacaggactgcatggctatggtgcatgcagcgccggaattcctgcaagaacagattctgcgcgccgcctcgcgccagttcccggaaggggacgtgcagcactggtggcacccgcccgtgggacgcggcgtgcgtacccgttgttccgacgacctgctctggctgccctttgccgtggaacgctatatccgcaccaccggcaacatggaaatcctggacaaagaggtcagctatattgaaggcagaccattgcatgagggcgaagagtcctactatgacaatcccttcaccgtgcatctcagcgaaccggtctacgctcactgtgtacgcgctctggagcacgtgcgctttggcgagcgcggcctgccgctcatgggcagcggcgactggaatgacggcatggaccgggtgggcatacagggcaagggcgagagcgtttggctcggctttttcctgttccgggtgctcacggacttcattcccctggccgaagccagaggcgacgaggagttcgcggatcactgccggaagcggattgacgccctgcgcgagagtctggaacggcacggctgggacggcgaatggtacaggcgggcctactttgatgacggcacgccgctgggttcggagcaaaatgcggagtgccgcattgattccatagcccagagttggtccgtgctctcttcagcagcgccggattggcggcagaaaaaggccatgcaatccctgtatgaacgcctggtccgccgggacatcggcctggtgcaattgctgcaacctccctttgatcactccgaactggctccgggttacatcaaaggctatgtgccgggcgtgcgcgaaaacggcggccaatacacgcatgccgcggtctgggcggcaatggcctttgccgcccttggcgacacggccaaagcctggcagcttttccgtatgatcaatccggtcctgcacggcgaagacatgaccctggatacctacaaggccgagccctatgtggtggcggccgatgtgtatgccgtgcccccgcatgaaggccggggcggctggacctggtacacgggcgcggcaggctggatgtaccgcctgatcgtggaatccctgcttggcctgaacgtggaaggcgacagcctgcgtatcgctccgctgctgccgcaggactgggaggaggtcagtctgaactaccgccggggcaagaccaggtaccgcatccaggtgcgccgggctgtgcatgacgaacgccggggccttaccctggacggcggaatgcgcaaggacctggctgtgcccctggctgatgacggggtggagcatgaggtgttggtgttgatatagcaccccgctaagaagcgaaagaaagaggcggcccccggaggggccgccaaatctgacggtgtaagacgaatcttacacttgttatagttgcctatccaaaccgatcctgctagagatattgtataggtttgtatactcaaacatatataatggtcttttgtcaactcgttttcttctggaggagaacgtagtgcagcattacaggtatcggctcggcgtggatatgggtattgcttccatcggcaccgcgcttgtacaaattgattccgagggtgttccactcaagattttggacctgggagtacgcactttttccacgccggaaggggctgccgagcggcgggccaagcgattggagcgtaaacatatccgcaggaagcgacaacgcctggcaaaggttcgccgtatccttcaagaacatggcctgttgcccacggacaccgagagcctgaagcagcttattctcaaggagccgtatagccttcgcgctcttgcggctatcaatagagtatcccggttggaagatatgggccgttgctttttgcatatggccaagttcaggggggccggttttttaacgcagcaggaagaacaacaggcatccggggatgaagatgcgagcgtccccagtaacaaggacaaacaaaaaacagccaatgtgtaccgtaagctggaagatgcggtgcgggacaaaaaacagacgctttcccaataccttgtcgagcttctggaaaagaaaatgccggttcggcggcgcaagtttcttgtggatcaaaacaagatagagcatgcggttccgcgttttttggtcaaagaagaattccggcgcatctgggaaacacaacgcacgttttatccggaactgaccaaggcaatggaggaggctgtttaccgggaaatttttcaggattttccccacgctccctatgccaccggcaactgtaccctgctgccgcgtaatgaagacggcagcgaaaacaaacgcctgccccgcatgcatcgcctggcggaaaaacgccgcatttacgagcaaatcaataatattcgctacaccacgccggaaggggaatgttttttaagccgggatttgcgcgatcatctcgtcacgctggcctatgacaaaggacagacactgggcaaaaaacttctcaaaagcgaaattaccgttgccacgggcttgaaagttttgtcggtcaacctgagtgacgatgacacaagcatcaagggattctgccatgtggcggcgtttgcggatattcccacatggcacaccatgtctgatgccgagcaggatgccgtgatcagctttatcgcggaaccggtcctcaatccggctgatcccacaagtgaactgtacccggaagacgagtttcttgaaaaactctgcgccatgcttcgccttgaggggccaaacgccgaagatgacgcctctcgcgccattgctcttctggcaaaggacagaagcaatcttggccttacggcgaccaatagagttttggaaaaactgactgtgggccacgaggtggatgttcccaccgcagcgggcgaaacgcagcccgtatggcgggcgcatacgcacagaaccgctgctgatgcctgtggatttactgccgaggaggagcgcatccgcgccctgcaggggagctacgcttcattgccctactatggcgagatcttacggcatgatgtgaccaccatccacccctggcacaaaaagaacgcggctcccgaggaagagcgatggggccgaattcccaatcctgtcgtacatgtcgcgcttaaccagttgcgtaaggtggtcaatgaaattgtcggcttgtacggcaagcccgagagcatccatgtggagttcgccagggaactcggcatgtcggcggtcaaacgggaagccctgataaaagagatgcagaaaaatgaacgggaaaacgagcatattaccaacgagctcattgcgcttggccttacgccaagcagaaccaacaggatcaaatataaactgtgggaagaacagggcaaacgcagcctctattctttgcaagagatcaaggccagcgatatcgatgcctgcgaaatagatcacctcattccgcagtcaaagggaggaactgacagcagaatgaatctttgtctttgttttgcagatgaaaacaaggccaagggcgacacatttccttatgacatgatccaaaaaaccgcgccggaaaaatggaaggaaatcagcaaagccattagtgaaaaaaatttccccaaggcaaaagcttggcgtttttctcccgatgcggcaacgcgctatgatctacacggagacgaagaccagacagacagccggcttaccgacaccagctacatggcaaaaatgggcgcgcgctatctttgggcgctctgttccgatgtggtggcggtaaagggccgcataacatcagacttgcggcatttatggggcctggacgggttggagtatgaactgttcggcttgtccatcaatgaacatatagtagacgagcaaactggtgaagtaaccctcaaccccgccaccggctatcctgccctcaaccccctatgggttcgcaagccgcgcatagaccaccgccaccacgcccttgatgctctggtggctgcctgcactacgcggggcatggtggcaaggctggtgcgcgaggaaaaaagcggcaagaagggcaaggagcggagcaactttcccgttcctttcggagcttgcgcggcggactttcgctctcaggccttgcgggccttacagcaggtcactccctcgccaaaggcggagcatggcacggcagggcagttgcacgatgcgacaaaatatcggattttgcggccaaggccagcaaagggtgattacctcatccgctaccaacgcggtctggataaaatcaaagataaaaatgccgttacaaaaatcatgttcaacacgaacaccatttcgcttgatgatgagactgtgaaaaaagctgctgctcaatgtcaggccataatcagcaccattgagcggcactatcccgctgccgaggaggctctcgccgcgcagcaggccgaggcgcaaagcggcaggctgccccgagccaaggaaggcaaagccaaagaagaagctgttgttcgtaaagccattgatttggctcaaaaggcggggcaactgggatccagttacccatgcctcgactacaagcgtctcgtggcggtcaacgagtctctgcaattcggctacgagccgaaaagcaactattgcacggatttttatgaaaccccggctggcaaggtcggatgggaatgcatcacccgtattgacgcgaacgacagcggctttgtgcccaaatggaaagaagcgggcgggaaacacatatggagcctgcgcatagatgacgttattgagattacacccaccgacgagcttaggcaggaactcgacagccgctgtccccccggtaaggtgtatttggtggttcagaaaatgggaaaagattatcttcagtgtaacttgctccacgacgcgcgcccgttgaatgggagaaacccggcagtccaggccggacttgaggcgcatgcggaatacacgcgatgggacaccggagggataggtttgaaaagctactgcgagctttccgccagaaagattgagatttctcctttcggcaaaattttgcgcaagcataaaaggctgcggagtggcaaaaaaatggcgaagaaagcataaacggccgggacactacgaaataatgtgggtcgtggtcatgtttgatcttccggtgggcacaaaggtggaaatgcgtagggcaaccgcctttaggaacagcctgcttgagcttggctttacccgcaagcagttttccgtatacatgcgccatgccacaaatttggagaaggcaaaacagcttgggcaaaaggttaagcattgcctggttcccaacggttttgtttcggttttgtatatcaccgataggcaatacggcatggtggagaacttttttggccctgttcgagcaaaaaacgaagcggacgatttggcaaaccatgaacagctcatgctgttttaacaggctgcgtacactatcaggcgtccttttccggcggagcgaggtatggcagaacaagctggttcccgcccgcgccgaatgaagcggccagactttgcgccatcagatatgtggcgtgaataaaatgggttctcttgccactcaaaaacaccttgcattcaataagtgaacagagggtgcgcttgttttgcggcgtcaattcgtaagaggcatcgggggcggcaagtgacctgacgatatcatcccccaaggggcgcaatggctccatcaggtcatccgcaaggcagaaggggttaagcttgttgtgatggtgcaccccaaaaaggggcaacaacccggcagcgcatatagcccgggccatgcaagcccgaagtatggcatacgcataattcagcatggcgtttaccccttcctgttccatatcccggccaaagccgctcccgaacagggcaggccagtaaagccgggcggcattcgcttcgtaattgtcaggatcgccgggcctgaccttgcggctgaacagcaagatacgctcgccggctttaagggcaccaggggaatggcgtgagagcaccgtggcctgattgcgcagtttggcctggacaataccttgccagatctcttttttgagcaatgccggggcagccgtttgcgcttgggcaacctccaactgcttgtaatgagcgtttaccggcatagcgatggatatgggcagataatttgctccgcagataacgacaggaatatttgtgccgccaaggcgcgacaacagtgacttactgagcgtcgccccttgggcgcttatgataagcgccgtcacggtatcaatgggaatgcgccccagttccttgtctttttcctgaatgacaacaaaaccgcgctcggcatgtatgtaccgcccctcttccgcaatttcgacaatcattgcctgccctccctcattgcaaagaacaaaggctgcccttgcacggaacgtggtaagaacagcctttattcaggaaacaattccaaacgaaccagcacgttgcgtgtaacgtactctagcagggtcggtttggacaggcaactatagctactcaaagtgttcgcagaccgggcattccactctagcagggtcggtttggacaggcaactatagcacttcctttatgagcgccgctgcatcgtcgactctagcagggtcggtttggacaggcaactatagccaatgaagcagtcggcacaggcgctcggagactctagcagggtcggtttggacaggcaactatagccatgctgcccatttgctttgaggcggtttcactctagcagggtcggtttggacaggcaactatagcagccttttcaagccacgattgcttcggcggactctagcagggtcggtttggacaggcaactatagctgctgtcataccttcgcctcgcaatattccactctagcagggtcggtttggacaggcaactatagctacgacaggcgtattgatgcactgccttcgactctagcagggtcggtttggacaggcaactatagcggatgaccctgcaatggatgcagaaagaacactctagcagggtcggtttggacaggcaactatagctgcaattttacgctggacgacggccttggaactctagcagggtcggtttggacaggcaactatagctgcggcgttgtatgggacgagattgccccgactctagcagggtcggtttggacaggcaactatagcataccggacattgtggtatagtaccggacgactctagcagggtcggtttggacaggcaactatagccgcttggagtcgccgtatgcaggtttatgaactctagcagggtcggtttggacaggcaactatagcatagtacctgcatacggcgactccaagcgtactctagcagggtcggtttggacaggcaactatagcatacttaatatacgctcaacgccttccgttactctagcagggtcggtttggacaggcaactatagcctacatacccatctgtgagcagttcacaatactctagcagggtcggtttggacaggcaactatagcttctgttcaagaatcttaaatccggagaagactctagcagggtcggtttggacaggcaactatagcataacgcctgcataggtgatgcagtcactgactctagcagggtcggtttggacaggcaactatagccgcaagctgcttgcaataatcgcgacaattactctagcagggtcggtttggacaggcaactatagcccagattcacccgcttacaatggctatcgactctagcagggtcggtttggacaggcaactatagctatccttgttctttgccatgaccttgtttcactctagcagggtcggtttggacaggcaactatagctgcggcgttgtatggggcgagattgccccgactctagcagggtcggtttggacaggcaactatagcttggatagaacgctgcatcacgggaacactactctagcagggtcggtttggacaggcaactatagcaagctgctcatgtcattcacttggctcaacactctagcagggtcggtttggacaggcaactatagcgctgcgaaacaaggggagtatcgtcaaggcactctagcagggtcggtttggacaggcaactatagcagcgacctgaataacgcgcttgcgagtgaaactctagcagggtcggtttggacaggcaactatagctattaaaactgtattgagcgacaagcgagcactctagcagggtcggtttggacaggcaactatagcgcggatgggaagcctgcaacgatagcctttactctagcagggtcggtttggacaggcaactatagcggtgatacagcagacgccgccgatatacagactctagcagggtcggtttggacaggcaactatagcaacaataataggtacatataggcgcttttactctagcagggtcggtttggacaggcaactatagcagctttcttgccttgccagcttgcccttgtactctagcagggtcggtttggacaggcaactatagcagcactcgctgaattgcatgtatgcggctcactctagcagggtcggtttggacaggcaactatagcgtgtttgtgaccgttgcctttcttccttgaactctagcagggtcggtttggacaggcaactatagcaatgcaagattgcttatgcgcgttcccatcactctagcagggtcggtttggacaggcaactatagcttagcgttattcagcacgatggcgcggacaactctagcagggtcggtttggacaggcaactatagctgatggccgaagtaggcgaaaaactcgcaaactctagcagggtcggtttggacaggcaactatagcataagcaacgaatccacgctatgacctggaactctagcagggtcggtttggacaggcaactatagctggtacgccctgcaatatataacaccttccactctagcagggtcggtttggacaggcaactatagcggtgctgacttccggcttccgggcttgtttactctagcagggtcggtttggacaggcaactatagcggcactgactacgacatcaacctgataaccactctagcagggtcggtttggacaggcaactatagctgcaaaggcacgcagctcggcatgagcgagactctagcagggtcggtttggacaggcaactatagcggcttccccgctctaccgggcggccgcgcgactctagcagggtcggtttggacaggcaactatagctgacaatggtcgccttgctagggagcttggactctagcagggtcggtttggacaggcaactatagcgcacacgggcaatccgaaagcgcatgaagtactctagcagggtcggtttggacaggcaactatagcggcggcgcgccgcttgtcggtggtttcggcactctagcagggtcggtttggacaggcaactatagctggataaatcaactcaattttcaaatattcactctagcagggtcggtttggacaggcaactatagcgcacagtaacagttcccgcgacaggtattaactctagcagggtcggtttggacaggcaactatagcggcccgcccatattgtaacgcgggtactctactctagcagggtcggtttggacaggcaactatagctggtaaatttcgctttccgtgaagcccgtaactctagcagggtcggtttggacaggcaactatagctatagaaacgctcataagccgtgccgccttactctagcagggtcggtttggacaggcaactatagcatgcttacgcttgcaatatgcaggaaattaactctagcagggtcggtttggacaggcaactatagcagctttcttgccttgccagcttgcccttgtactctagcagggtcggtttggacaggcaactatagcagcactcgctgaattgcatgtatgcggctcactctagcagggtcggtttggacaggcaactatagcgtgtttgtgaccgttgcctttcttccttgaactctagcagggtcggtttggacaggcaactatagcaatgcaagattgcttatgcgcgttcccatcactctagcagggtcggtttggacaggcaactatagcttagcgttattcagcacgatggcgcggacaactctagcagggtcggtttggacaggcaactatagctgatggccgaagtaggcgaaaaactcgcaaactctagcagggtcggtttggacaggcaactatagcataagcaacgaatccacgctatgacctggaactctagcagggtcggtttggacaggcaactatagctggtacgccctgcaatatataacaccttccactctagcagggtcggtttggacaggcaactatagcggtgctgacttccggcttccgggcttgtttactctagcagggtcggtttggacaggcaactatagcggcactgactacgacatcaacctgataaccactctagcagggtcggtttggacaggcaactatagctgattacgtcatcatagacggctaccaccgactctagcagggtcggtttggacaggcaactatagcatcgggggacatcgggccaatgctttttgaactctagcagggtcggtttggacaggcaactatagcactggtaaaacgtggtaacataagcacacaactctagcagggtcggtttggacaggcaactatagccaactccgaattttcacgggccgttgaaagactctagcagggtcggtttggacaggcaactatagctgattacgtcatcatagacggctaccaccgactctagcagggtcggtttggacaggcaactatagcatcgggggacatcgggccaatgctttttgaactctagcagggtcggtttggacaggcaactatagcactggtaaaacgtggtaacataagcacacaactctagcagggtcggtttggacaggcaactatagctgcaatggatactttgacaatgcgcctgaaactctagcagggtcggtttggacaggcaactatagcccgaatccgggtggcgagtgagtgtgattcactctagcagggtcggtttggacaggcaactatagccggtgtggctttagggttggccttagcggtactctagcaggatcggtttggacaggcaactatagcgcgggccgtatgcggggcgtttgccgttgtactctagcagggtcggtttggacaggcaactatagctcttctaaagattttatgatgatagaaaggactctagcagggtcggtttggacaggcaactatagccgctaccttagggacgcttttcttgcttcttggcgtaccagatggcgtaggcgcacccaccgccgatcacaatagccgtcacgatataaaaaagagtgctcattttggaaccctccaaagtttgtacccggcataggccatcaatgccccgcatccaaacacatataagctgctgtttataaacgcaaccgctatacatgcggccccggccatcgccagaacatttgaccaatacggcatacctcctctatagataaaatagcaacccctgtcagagatggcaaggaaggcgttatcactctgccgggcctgcctcttgcccctccatctctctcaaacgcaggaacggtgaatcttcagaacagctttgaagatgctttcagggccgtcaaccgagcaggccgggcaatgcagttcgcagggcaggtagacaatgtattgccagggggagacaatcagggaaagagcgttttccggggccggatgaaaggccagatccttgctgtccagaaggtcttccgtgggttttgtggccgggtaggcgatactgtaccagtgttgttcgcggcccttgagcagcacttggatgtcgatatagtcccggtgcagttcgtagcggcgttccgaaaccggcgcggtggtcgttttctggatcatggcgaatattttgtcgccgtcaatggggtacttgccttcttcgaggttcaggagatcattgttcctcaagtaggctatggcggtgtcaaaggccttgggatagcagtatttttctttgtcccattgccggataaagcctgtgatcacggctctagccttccagtatcttgctgtgaacaaacacccgcgccgggccttccatatccacctgcggcacttgcaggccgaggtgggcgcggtgattaatcaggatggggccgagcaggttgagggcggtttcctcgggcttgcccggaggaatggtggctgttaccagcacggccagttcggccgcgttttcggcctggagcagtttttgttccgcgtcgccgatatgcaggctgtactccggcaggaacacaaaggggtcggccaccaaaaggcccagcgtgggtttttctatactctgcaacacaagcaggggcgcgttttcctggatttgcagcagggtgaactcgtgtatgtcctcaaaaccgatgatgccgcgcgggaaatggatgatcttgtccatcctgatttcacgcctgcccaaacgagattcgatgatttttatttcttgattcgccataacgccgccgctgcaaaaagatcgtgttcctcggccgccagggccagggtattttcttccttcactcgctggtaaacttcttcccggtatacggccgtggtatcaggaaccatgatgccgagtttgacctgtttgccgctcacgccaaacacggtgattttgatattatctccgatatgcaggctttcgccgggccgccgtgtcagtatgagcatgcagttcctttgccgcgttagaggaagtttaccagactcatctgcattatcatggatgaggacttgagtacactgttatacgcaatctgctgctgggccagacgagtcatgagttcggtcacgtcaacgtcttccatctggctcagattgtcttcctcgctataggtacgcatgaccagggccgcctgggtcacgatcaggcggttttcccgtccgccgacttccgcaacccgggtgctcaccagggtcatgatatccttcaactcgtccaggcactgctgaaccatggtctgatcgttggtctcaagcccggccacgagcttgcccagggtttcaaacatattgggtccaggcacgggctcggcataggggtagcccgtgttttccgggtagttgtaaagaccgccgaagatatccttgcccaccatgttcacagtaatatagtcactgtcgccgatttggaaatcgatgtccgcccggtgggggtggatgatatactgcgtacccatgtcggccggagccgcgggcagagtataggtgggcggaggaccggcagaggtcatttctcctatgctcaggtaaccgccgggaaccggaaggctgatcttgtccgtgcccgtggtgggcatgggcgcggatgtatgggtccagttgctgccgttgtccgtgctgaaggaatagtacaggcggccgttctcgatggagtcaaggcgcaccgcgacatcgcgggtaaagtgcccttgggcgtcggcttccaggttgcggttagctgcggagttccagtagcttgccgtgacctgggtcgtgttgtcgtcgccgccgtaaaccgcagtgggacgcacgtaaagccaggtgccttcgccggttttgagaatttcatccgggctgctcaggtcagccgccgtataagtatgtgtgacggtggcgctggcgtcggagatttcaaccgtcacgccgatgccggtatcaataatgcagccggtgcccgccgggttgggcgtgggaggattggtgggcagccaggttttgccgccgtcggcactgtacatgtaagaggccgagtcagccgggccgctgcttaccggagtaatgagcacggttttttcagtgccgccctgcacatggaattgcacgccgtccaggtctccggcggggtctttgaccgtcacgccgagagccatgttgtagggagggcggtcagttttgtgcccggcgaaaatatgctggtccccgaacttggtgttggagagggccacaagctgtcccatatactcgcgtatggccgaggccacctgaaggcggttatcctggttgatggtgccggtgctggtctggatgtccttggctttgatcaggctgagcacgttcagcaccgagccgtcacccgagccgagaatattgtcggaaagggcgagccagcccatggccattttggagttttcctcataggtggacaatctgctcaaggtgctgcgcgtgtcaagaatgcggcccgcgctgaccggatcgtcagaggggcggttcacgcgtttttggcttgaagcctgaatattggattccatgtacgccgagagggaatggttcatgttgctgatgaacgagttgtacatgagtccctgggttacgcgtaatgacatgggtatactccttgcctctattcttattgcttcaggccgagcagggtttgcagcatttcatccgcggtggtaatcagctttgcggccgccttatacgacgcctggaacttgatcaggctgctcatttcctcgtccaggctgacgccggagacttcctcgcagcggacatagaggtcgagcgccatggctgtttcattggcagccgtgaacttgacgctcgcggtgtccgaaccgaccttggtcaccagggtggaataataggcggagatgggttggctggtttttttgttccagatggtgcctatgtccacggccttattggccagatccgcgatttgcttggcgatttgattgtcgcccatgttcagttcaccgggcacgttgacctgacccgcgttgatcaggttcaggttggtggacagatccgggcgcacgccaaagctggccgggtcgtctccggtgaaaaaggtgttgatgccgagcgccgcggccaggccgctggtgtcgtcggtaatggcaaagctgtatctgtccgggtcgctggacgaaatgtgcaggtggccgtccacaattctggccgtgaagggttggtgcacgatgccgtccccgtccgtgaacgtcgctgcgttgatggccgcggccacatcctgcaggctgtgtacggaagggtcgaagttgttgggcgaaaagacctccagacccggatacggaatatacgggg

SEQ ID NO: 4401 - DNA, 23276 bp, synthetic construct
  misc_feature 1..23276: note = Synthetic
  source 1..23276: mol_type = other DNA
tggcaggtcagcatcctcgcccaggagatcagccacctcaggaggcactgcccccgcctgcgctatcacgtcaccagcggcggcaccgcacaggtcaccgacagccttgaccgcgggctgctcgacttcgccgcgctcgtcgagccgccggacgccaccaggtacgggagccttcccctgccggtcatcgacgtgtggggggtcgtcatgcgcagcgacagcaccctggcagccaaggaggccgtcaccgtcgaggatctggtcggcctgccgctgctgtgctccgagcagtcctgggagcgtgacatcccgggctgggccggggagcgcatgggggagctcaccctggaggggaccttccagctggcctacaacggcgccgtcttcgcccgggcggggctgggctacctgctcgccttcgaccacctggtagacaccagcccgtccagcggcctcaccttccgcccgctgaagcccacgctgacctcacacatgtacctcatctggcgccgggaacaggtcctctcgcccatcgcgcaacgcttcctggcccaggtgcgctcctcgctcgggggcttgcaggacccccaggatcccacagccaccggtcacgccccggcggagcggtagtagagcaccgcaacctgggtgcggttgcgcagcccgagctttgccagcaccgcgctgatgtggttgcgcacggtgccctcgctcatgaacagccgcccagccacctcggcgttgtccaggccctcggacagcgcctcgaccacctcgtactcgcgctcggtcagcgaggcgaagaccgctgaccgctccccgtatccccggggctggggcgcccgcagggagcctgtcggcgcctccatggtttcccccatggtcgcccccatggtcgcggtacgctccaggacctggccctccatgacggtcagcccagccatgacgctgcgcagggccggggccacctgggccacgtcctgcttgatgaggtagccgcgcgcgcccatccgcagcgcccgcacgatgtagtcgtcgtcggagaaggtggtgaggaagacgatgcgggcctgcctgtcatgctccaggacctgctccgccgcgctcagcccgtcaccgccgggcatgcggatgtccatgagcaggatgtcgggctggtggcgggcgtacccggccacggcctgcgggccgctgccgccctggccgacgacctcgatatcgtcttccgccgacaggatcgtggccaaggagctggcgacgatggcgtcgtcgtcaacaatgagcaccctcatgcgtcccccttcgggatggtggcgaagaccgtgaacctcggggagggggtgacacgcaggactccccccagcatctcgacccgctccctcatggagcgcaggcccatgcccacgggatcgggacgggcggaccggcccggcaccgcgccatcgttgctgatagtgacctgccagaacgccgggtactcggccagggcgacccgggcggagtcggctgcgccgtggcgcacggcgttggtcagcgcctcccgggtcaccgccagcaggcagtgggagacgtcggtgggcggggcctggtccagcaggcagctgaccgcgacgtccttgatgccacagcgcagccccagcaggttgagggccgtgggcaggtcctcgccctcctcggacagggcgtgcacgctgcgccgcacggagcccagcgcctcctcaagagtggcacccacctcctccagctgcgacggcagggtggggtggtcacggtggagcacctggagcgccctgaccctcagggtgaggcgggtcagcaggtgccccaccgtgtcgtggatgtcgcgggcgatcctggtgcgctctgacagggcggccgcccgcacctcgtggtcctgggcctccagaaggcgggcgttggtgcgctccagggcgaccaccttgacctgcaggtcgtcccgcagacggtacaagtgaccccgggtcaggtccccttgcgcggtgcgcacacccaggagcaccgccacggcgcacaggacggccgccaggaccacagccgtcggcggcagccgcgcccctgtcgctgccgccagcacaggccccccgcacagcaggagcagccaggtgccgcctgcccgtagggtggtggaacgggccaggtcgtaggcggccaggggcgcgccgagcacggactccggcgacaggcagcccgccaccaggtaggcagccggggcgacgacggccccgcgcctgccctccaccaggacgcacaggctgctcagcaccaccgccaccagcacccagacgacccggacgacaccgggtacgccgaccaccagcatcagggcggtgcagccacccaggacgatgctcttgtccaccagtggtcccacaggacgattatccggcatatctcggcaggccgtcctggcacagggccggaaggcgcctacacgggaagcaccgacgaaaccgttccgtgacagatgtcatgggacgaccctggacccgtgacagcgctcagctgtgcgggctgacaggcctgcgccaccatggcgagcagacacagaccggagcagacgcaacgggcaggagacccgccgacaaggacctcgaaggagacgagatgcctgacatgacagctgacgcctccagcacctccccgggggcagcaagcagcacggcctcggctcccggcaccactgccggtaccgccgctaccgccagcaccggcagtgtcggcagcgcagtagcggtggagggcctggtcaagcgctacggggacctggtcgcggtggacaacctgacgctgcggatcgcctcgggtgagatcttcggactgctggggcccaacggctcgggcaagaccaccacgatcagctgcatcctccagctcctgactcgcgaccgcggcgagatcagcgtcctggggcagccgatgagggccacctcctacgacctcaagcgccgcatcggcatcgtcccccaggaggtcgccgtcttcgacgagctcacggtaagggagaacatcgacgccttctgcgccctctacgtccccggccgcaggcagcgccgggccctggtggaggaggccatcgacttcgtcgacctgggtcgctttgcgggattccggcccgccaggctttccggaggcctgctgcgcaggctcaacatcgcctgcggtatcgcccacaggcctgagctcatcatcctcgacgagccgacggtagcggtggacccccagagccgcaacgccatcctcgacggcatcagggacctcaaccggcagggggcgaccatcatctacaccagccactacatggaggaggtggagcagctgtgcacccggatcatgatcgtcgacggcggcaaggaggtcgccagcggcaccaccagcgagctgaagtcgatgatcggggtcggtgagcgcatccgcgttgaggtagtcgcccccgaggcccctggggaggaggccctcgagcaggtgcgccgcctgggccacgtgcgctccgcggcctggcaggctcccgagctgctcgtcgagtgcgcccccggcgcccacaacctctccgacgtcatggaggtgctggcagcgcaggaggtcacctgcgggcgcgtcacctccgagccgcccacgctcaacgacgtcttcctggagatgaccgggcgtgccctgcgcgacgaggccgcctgaggagcccgtgatgtcagtggtgtctgctatgtctgcgttgttcaaggcggtgtggtgatgtcagcggtgtcagaggtcgtgacgatcggcgcctaccaggcgctgcgcctggtccgcgacagggtgctgctgctgtggacgctggggctgcctgtcatcctgtcactcatcttctccagcatgttctccggcatggacgagctctaccaggccgaccccgtcgagctgggggtggtcctggatgagccctaccgcgacgcggaggggctggaggaggtggtcactgccgtctcctcccaggacggggagatgcacctggtcaacacccaccccgtgtcctcccccgctgaggcggaggacgcggccctagagggggagacgatcggctacctggccgtggaggacggcgagccggtcctccacgtctctcccgccagcagcgacgaggcgacagtccccgtgctgcgggctgtcctggagtcctacctgagcaccagggccgagtacgccgcgctcaccgcccaggggctcggccccgagcagatggcggccacccaggtgtcgcggacccacacccaggaggtccaggtcacccaggagcccgcggacccgcaggtgcgcttctactacgccctgctcgccttcgcctgcggcacgggggcggctgtctccgtcatcgccgcccagggggtcgtggcaacgtcctcaccgctgggtgcccgccgcagcctggcggggagcgcccggtggagggtggtgctggggacgctggccggctcgtgggtgtgcatcgtcgcctgcctgcttatcgccttctacgtcatccgggcggtggccgacatcagcttcgggccgagcatctggctgtgccacgtggccatcgccgtggccagcctcatgacctgcgccgccggggccgccctgggcacggtgcgtagcatgagcctggggatcgtctccggtatcgtggccctgctgtcgctgctcaccgggctgtacggtcccggcgcgcagcagctggccgacaccgtggagcagtccgcccccctgcttgcccaggccaaccccctgtggcagattgcgcacagcttctttgcgctgctctactacgacagccttgagcccttcgcccgctgctgtgccgttatggggggtatgaccctcctgttcctggccgtcgcgctggtgcgcatgaggaggctgagccatgagcatctttaggacgtcactgcgtatcgtcgccgcgcaccgactgtacgtcctggtctacctggtcctgctgagcatgctgggcctgctcactgccgcagtcgcctccagctcgcaggaggacggtcaggtcgtcgaggaggatcccgccgtcgccgtcatcgaccgggacggctccaccatctcccaggggctcaccagctacgtggagtcccagggggacaccgtctccctagaggacaccaggagggcgctccaggacgccgccgcccaggaccgggtccagtacgtcctcatcatccccgagggatacggagaggagctcgtcgccgcagcccaggagggacaggaccccccggtgctggacaccgtggtcagctaccagtccgcaacgggctcgcgcgtggacgtgcgctccagcgccttcctggaccaggtctacgaccacctgtcgctgtcgggggccaccgcccaggaggcggtcacgctggcgcgcgaggcagtggaccagtccgtacgggccgaggtgatcagcgtggcctccccgtccctgccggaacgcttcagggtcttcgccgagttctccctctacccgctgttcgccttcggcctggtgtccgtctccacgctcatgctggcgctgagccgccggccggtgcgctcgcgcctggcctccgccccgaccagcggggtcgtgcgcagccttggcgtcatggcgacctgcctcatggttggcaccgtggggtggctgtgggtcctcggcctgggcacggtggccttcaccggcgcggacgcggcagactcggcgctgcccctgggactggtgggcctggcgctgttctcctacatgctcttctccgttgcggtcgggttcctcctgggccagctgggggcgggccgcaacgtggccaacgccgtggcgaacatcctcggtatggtgctcacgttcctgtcgggggcgtggatgccgctggagtacatgcctgacgcgctggcgccactgaccaggatcacgcccagctactgggtggaccaggtgattcagacggcgtctaccgcgccctcgctcaacagcgacaccatcacgacgatggtgagccagtgcgcggtgtgcgccctgttcgccctggccgtcttcagcgccggggtcgccgtggggcggccccgggccaggtcctccctgtagcccttgcggtgagggcacacttgggcgcatgaccacgcgtgacctcaccgagctgttggagtcgatcggtgcgggcgacgggcgcctggtgcacctggagcacgtcccggctcgccctgggcgccaggccgactggcccgcctgggccgacaccgacctggtggccgcctaccaccgcaccggcatcacccgcccctggacccaccaggtggaggccgctgaggcgctgcacgccgggcaccacacggtcctggccacgggcaccggctccggcaagtccctggccgcctggctgcccgccctcagcgacgtcctgacggcacaggcggagcacccggccccggacggcagccaaccgcgtgggggaggccgtgagaacgtccgggagaaggggcgagagagggtctctgccctgcggcagcggcccgccgtcatgtacctggcccccaccaaggccctggctgccgaccaggctgcgggcctggagcgcctggtcgccgcgctggaggccgtccaggcggagcactgtcaggagtgctgccacaagcgccgccaggagcccctccccaagcacagccacgagcgcgaccacgagcacagccgacccgctggtgccgggagtaccggtcccgccgtcgggctgcgcacggtgcgcaccggcacctgcgacggggacacgccgatggccgagcgggactgggtacgcgcccacgccgacgtcgtgctgactaacccggacttcctccacttctccctcctacccggccacgagcgctggacccgcctgctacggggcctgcgctacgtcgtcgtcgacgagtgccatgcctaccggggcgtgctgggggcgcacgtggcgctggtgctgcggcggctcctgcgcctggtgcgtcggctgcggcccgacggcccccagccggtggtcctgtgcgcctcggcgaccgccgccgagcccgccctgaccgccgcccggctcatcgggacggagccgagcgaggtcgtcacggtcagcaaggacggcgccccggcagggcagcgcagcctggccctgtggcagcctgccctgcgtgacccgtgggtggtggctgccccagccgatccaggcggcccggcagccctcactgacctctccggtctttccggccccggcggcccggctggcctcagcgacccggcggcccttaccgatcccgaggacacgacagcccggcgctcggcgctggtggaggcctccgagctgacagtggacctgctcagcgtgggggcccgggtgctggtctttgtccgctcccgccgcagcgcggagatcgtggccgagcgcacccgtcacactctggggctgtccctgcctgagctggcgggcacagtggccgcctaccgtggcggctacctgccggaggagcgccgcgccctggagacggacctgcgccgcgggcgtctgcgcgccctggccaccaccagcgccctggagctggggatcgacgtcaccgacctggacgcggtggtcatcgccgggtggccgggtacccgcacgtcgctgagccagcaggcgggccgggccgggcgggccggcgggcgcggcctggctgtcctcatcgcctccgacaaccccctggacgcctacctggtccaccaccctgaggcggtcttcgcctccccggaggccaccgtcttcgacccggccaacccctacgtgctggccccgcacctgtgcgcggcggcctcggagtccccactgaggcaggaggacctggccctgttcggcctggctgacgaatccctgctggtcgagctggaggagcgcggcgccctgcggcggcgccccaccgggtggttctggaacgtgaccctgcccggacggccgcaggacctcacctccctgcgcggggacggcccgccagccgtccccgtggtggagacgggcacggggacggtcgtcggcaccgtggacggcgcggcggcggactccaccgtgcacgagggggccgtctacgtgcaccaggggacggtgtacgtggtggaggagctcaccgaggaggcggccttcgtacgccagcaggcggcggtcggctaccgtacccgggcccgctcgcgcaccagcgtgcgcatcctggccgagcgtgagcgccaggagtgggtggtgccgcaggatggcgggcagccggaggacgggctgccgggtggacgcaaggagtcggaggcgcccgccgtcgcctggtccttcggctcggtggaggtcaccagccaggtgaccggctacagcaggctggcgctacccggcatggaggtggtctcccagcacccgctggacatgcccgagcgcgtgctgcccaccgccgccacctggtggacgctgccccgagagctctgcgagagcgcggggctgggagacgacgtgctgcccggggcgctgcacgccgccgagcacgctgccatcgggatcctgcctctggtggcgacctgtgaccgctgggacatcggcgggctgtccacggcgctgcacccccagacggcgcagcccaccgtcttcgtccacgacggccacgccggaggggccgggttcgccgagcgcgggtatcgagccggacggcagtggctggccgcgaccctgggcgtcatcgagcagtgcgggtgcaccaacggctgccccagctgcgtccagtcccccaagtgcggcaacaacaacgagcccctggacaagcaaggggccgccgccctgctgaggctgctggtgcaggccgcgccccccgaaggcgatgcagcaaaggaccatgcagcacggtagcagcacggtagtggccctcgcctctgtcgcactacggcctgctcccgagaaggagcaggcctcagctgaggagaaggaggggcgcagcccagcaggccacgtcccgtcagacaacgacggcgggctgcgaataccgggccgcgaataccgggcggcgaatacggtaagccgggcatgagaacctggaaccagctcctgcgggcagggccggggcacggcaggagacgggtccacggcaagcggggcaagcggccccaggggaggcctgtgcgggcctcccagccgctagcagcccggtctagagtcatgctcgagcacccgatcaggggaaccgcccggcgctgcggcacaagcggacccggcacagcgccgaacagggcaccacgctccgccctctcccagacaggagaacccatgagcaccacaacacaccccattaccatcaccctgggcagctccctcctcgcagccaccctggacgactccccagccagccgctccctgctgcgccagctgcccgtcacagtgtccttctccgactacgccgggcaggagatcctggccgccctgcccgaggcactggacgtgaccgggatgtcagccgctgcgccccaggctggcgacatcgcctggtacacacccaacaaggtactcgtcctggcctactcctcagtggggcactggccgggcctgtacgtcatcgggcgcatcagtggagacaccaccaggaccgccagcacgctcaggagcatgacgggaccggttgaggcggttattaggcgggcccgggggcggtgaaggcctcggctcaggcttgccgctatccgcctggcagacggggcggagacgccctgccagcaccgagggcattcagcctgggcaggcaggatctgaggtcctttccgtggcgtgcatccatgatgtgccgcttgtcgggaccttgcgcaccaggacgcctggcgatagagtgcacacgactgattcccagtaagccgcaccgtgcttgtgcggacgaaggctccaccggcttgccggtcccgctgcccggcccctccggggtcgggcagctttcatattctcacacggtttccctgcgagaacttacggggacgtgataggaactccccatggcaacgaggcacatcaacgtggggatcgacgtcggctcgcactcggtcggcctggccgctatcgaggtcgacgggaacggtgttcccacccgggtcctgtccgccctgtcccacatccacgactcaggcctggacaaggacggggccaagaacgcgttgacccgccgcaacacctccggtgcggcccggcgcaccagacggctcatacgcaggcggcgtcggcgtctgaagaacctcgacgacaccctgcaacgccttggctacccggtcccagactacggggacgacaaggacccttaccttatctggcgggtacgcgccgagcttgccgatcacccccttcccgaggaggcgcgtcgccctgccatcgccatggcggtgcgtcacatcgcccgtcaccgcgggtggcgcaacccttacaccaaggcggagtcgctgcttgagcccgcgccggactcctccttcatggaggcggtgcggaaccggattaccgagcgcacaggcgagatcctggaggacgggctgactcccggccagatcatgcagcaggtcgcgctgacaaggcgccttcccatgcggggacagacagggctgctcggaaagatccaccagagcgataacgccaatgagatccgccggatctgcgcggtgcagggcgtcagcgacgaggactgtcgggccatcatcctggctgtcttcgcagcggagtccccacgtggttcggccgtcggccgggtcggccgcgatcctctaccgggccaggaggcgctgccacgcgcgccgaagtgtgaccccgagttccagcggtaccggattatctccatcacggccaacctcagaatccacgacaacggtgaggcccggcccctgagcgcggacgagcgccgtcgtgtcgttagcttcctgctcgggtcatccacagacgatcctggctgggacgacgtctccgacctgcttggcatcgcccgccaggacctgcacggcaccgcccggctcactgccgacggcgagcgctctgccgcccggcccccgatcgacgccaccgaccgggtcgtgcgcaagtgcccgatcaaggcactgcagtcctggtgggctgaggctgacaccgagcgccgcagcgcgatggtccaccagctctacgaggcgaccgaggactcggagtgcgccgagttcctatcctcgttgtcagagaaggagcaaggggcgctggacaaggtccacctcccggtcggccgggccgcctactcccgcgactcgctcacacggctcaacgagcacatgctcaccacgaccgatgacctgcacgaggcgcgcaaggccgtcttcggtgttgacgacgagtgggtcccgccagccgagccaattggcaccccggtggggaacccggcggtggaccgcacggtcaaggtcgtcgcacgcttcctcaacgcggtcaaggacgtgtacggcgtcccggaacgtatccaggtggagcacgtgcgtgacggcttcgtgagcgagcgcatggcgcgcgagatcgacctggagaataaacggcgctttgagcagaaccagaggacgatcgcccagattcatgaggcgctgggacgcgggggtgaggtgcgcaggtcagacgtcatccggtacgaggcgatcacgctgcaggacagcaagtgcctgtactgcgggaaccccatcgggtacgacgatgcggagctcgaccatattgtccctcaggcgggcacaggatccaacaaccaccgtgagaacctcgttgccgtgtgcggaccctgcaaccagcagaagtcaaagaagatcttctcagagtgggccgcgtcctgcgacaggcctggggtgagcgtagaggccgccgtcaagcgtgtcagggcgtggaggaaccaaccggaatcaatggaccgcacagagctgagccgcctgaagaaagatgtcatcacacgcctgcgccgcacccgggaggacccgccgatcgacgagcggagcatggagtccgtggcctggatggccaatgagctgcggcaccggattgctgccgcgttccccgagcctcgcacccaggtcgccgtgtaccggggcagcgcgactgcggcggcgcggcgtgccgctggcatcgactcgcgcgtcaacctccttggggagaaggggagaaaggaccgcctggaccgcaggcaccacgctgtggacgcggctgtcgtcgccctcatgcgcccggggatcgccaagaccctggccgagcgctccagcctgcgctgggagcagctctataggagggagaatcagacctggcgggacaatgcatggctgagcccagaagccagggagaagttcgagcagtggaagaactcaatgctccggctcgtcgagctgctgaacgcggcactggcggaggacacgatctatgtgacggagaatatacgtctgcgcctgggggacggcgcggcccacgacgacaccattcgctcgctcggccgggtccgcctgggggacggcctcactgcggcgcaggttgaccgggcctcctcggaggcgctgtggtgtgcgctgacgcgccagcccgactatgaccagaagaaggggctcccggccgatccgcaacgggtgatacgggtccacggcacacctgtcagggctgaggagcaggtcacggtcttcaccaagaacaagaagtcaggcagccccaccgagaagccctttgcggccatcccggtgcgcggcgggtacgcagagatcagctcaacgatccaccacgcccgcatctaccgcattgagggaaggaagcccgcctacgccatgctgcgggtcttctcctacgacctccagcggcaccgcactgagaacctctttgccgtggaggtcctgccccagtcgatctccatgcgctgcgccgagcccaagctccgggcagcgctgaggaaccatacggccacctacctggggtgggtcgttgttggcgacgagctcgaggtccccatgtccggcttcagcagcaagggaaagatcggagatttccttgtggagtacccagacacccgccggtggcgagtccacgggttctacagcgagacacgactgagactgcgcccctcccagatagccgctgaggggctccccgacgacgcccccgatgccgtgcacaagacgctcggtaccccaggctgggtcatcgctgtcaacgcgctgggcgcgtcgcacccacgagtggtccgccgtgacaccctggggcgcccccgcacagcgagcacagcggggctgccggtgtcgtggcgcatcgagtaggcggcctccgtggacaccgcctggcgcatcctcgactgctcgtcacttactggttcgatccgctccgcgcgcggagccattgagattcgcccggaggagggagctttccagtcagtcccggtcgccgatgtggccgtggtcctcctaggtaccagggtcgcgatctccaccgcagtcatgcaccggctgctggacgccgacgtcgtcgtcatgttctgcgactggcgtggtgtccccgagggggctgcctacccctggcgcgcgcatacgcgcgtcggggccaggcagcgggcgcaggcagagctctcacttccccggcagaagaacgcgtgggggaggctcgtgcgagccaaggtcctcggccaggcgcacgtcctgtctacggtggataagtccaccgccctgcgcctgcgaaacctggcgaagtcggtgcactccggggacccggaaaacgtggagggccaggcggcacgactgtactgggcccgcctgttcggcccggaccagtcctttctacgactgccagagtccgaggacccctggaacacctatctcaattacggttacggggtcctgagggctcacggggtccgggctgtcgtgggtgcggggctcaaccccacgctcggtctcttccaccggggcaggtcaaactacttcaaccttgtcgacgaccttatcgagcccttccgcccggctgtcgacgccacggtcctgaccctcccggctgaaggatcgctggcggaccgctcagtcaagcaacggcttgtacaggcagtgctccagcccttcaacgcaggcggcgacaccctgcccacagtcctcgagcgcctggcacagcacctggggcagtacgtggaaggagaccgtaagcggctggacgtgccgcagtggacaggccctcaccgggatcgtgacgatggcagatgacccgatgtggtgcgttgtcatgttcgacctgccggtgggcaccaagaagcagcgccgtgaggccacacgcttccgcaatcttctgcttgacgagggctactggcgggcgcagtactcggtgtacgtgcgctactccccaaccgtggcaggcgagaaccgtagggtgaacgccatcaaggccaacctgcccgcgggcggggaggtccgtatcctctacgtcaccgaccgcgagtgggcacggacgctctgcttccagaacgaggcacccgtcaaggtcgagaaggagccccagcagctcacgatcttttgacgtcgaacctcgacctttcattggaatcttccccctagcaggctatgacgaagcctaccagggggaagggtgaccgattcccagtgtcgcggcggcggggctagtggtgtggggaagcctaccagggggaagggtgaccgattcccagtccaggacctgctccctgactccggcgtcgaagcctaccagggggaagggtgaccgattcccagtcgtcgagggcgtggctgctggggtgcgggaagcctaccagggggaagggtgaccgattcccagtccagcgggcatgcggggccggaccacgggaagcctaccagggggaagggtgaccgattcccagtctgcggggctgcggtggtgcgcggccgtgaagcctaccagggggaagggtgaccgattcccagtggctgccgcgcctgggggactccccgttgaagcctaccagggggaagggtgaccgattcccagttggtgtcgatagtgcggatgcacaggaggaagcctaccagggggaagggtgaccgattcccagtccaccggggagcaggtcgtcctggtggagaagcctaccagggggaagggtgaccgattcccagtttcctttctggtttcgtgtcctggcttggaagcctaccagggggaagggtgaccgattcccaatacgggcacgacaggcaccccgccacagcgaagcctaccagggggaagggtgaccgattcccagtgtgggggccgtaggcatgagtgcctgccgaagcctaccagggggaagggtgaccgattcccagtacacacgcccagtgggagtccacggccagaagcctaccagggggaagggtgaccgattcccagtccagggggtcatcggtgtcggcgggggtgaagcctaccagggggaagggtgaccgattcccagtcgtggtccacgtggtcggcctcggctccgaagcctaccagggggaagggtgaccgattcccagtccgtgacctgcccggcgacaggggccaggaagcctaccagggggaagggtgaccgattcccagttatgaccaccacgcagacgcatataagcgaagcctaccagggggaagggtgcccgattcccagtacctggtggtccaccacctcgacgggaggaagcctaccagggggaagggtgaccgattcccagtggtcgcctgcgaggccgttgcctgctcagaagcctaccagggggaagggtgaccgattcccagttgacgaggaggacgctggctgacctatggaagcctaccaggggaagggtgaccgattcccagtccgcctcggaggtgtaggagccgaccacgaagcctaccagggggaagggtgaccgattcccagtgagtcgaacccgccctgcgaccgtccgggaagcctaccagggggaagggtgaccgattcccagcccttccgccctcaatacccctgctgcacatcttcaaccggcctcattccacgcaacgccaggagaagtgccagacttgcgcgaaatcacgcgcaacgagcaggtgtgacgcagcgggccacaaccagacgtcggctccacgatgtgcaaggcacccttcagcgcacatcgtggacccgacgagacggccacttccttacacctatcggccgcacgcctttggaatctggcgaaacaaagcggatcgcggaggccgctcttctctgctgtccgaggacccccgtcacgggcacctgtctcgcagggaggccgcctcactcgttcgctatgttcctcccctcatggtcctctcctttcccctctgcccctatccgcggatccgcagcaccgggttctcaagcaggcatggtcctctcctttcccctctgcccctatccgcgccggtcagcccctatccgcgccggtcagcgtagccccgcgataccaccctctccagatcacaactcaacgacccgcttcttgcccagtcccgcgataccgtacctgttccttaggatcgtgcccgtgaccacagccgttccctgcgtgcccactggcccaccctccgcatcccctgacaccacgcccactcctactcccccgccctccctggacgtcgccccgggctcggtggtacgggtacgcgacgaggactggctggtcacccaggtctccgccaactccgacggcaccctggtcacggtgcagggactctccgagctggtacgcgacaccaccgcccagttctccgctgggatcgaccacatcgagcccgtggacccgcgccgcacccgcgtggtcgcggacacctccacccggcatcgcctttcgcgcctgtggctggaggcgacgctgcgcaagacggcgttgccggccggctccacggagatggcggtggtgggcgacatgctggccgacccgctcccctaccagctcacggccgtccggcaggcgctggacccggccaacctgcgcccgcgcatcttgctggcggacaccgtgggtctgggcaagaccctggagatcggcatgatcctggcggagctggtgcgccggggacgcggggaccggattctggtcgtcacgccccggcacgtgctggagcagatgcagcatgagatgtggtcgcgcttcgcccttccctttgtgcgcctggactcggtgggtattcagcgggtgcggcgcaccatcccggccacccgcaaccccttctccgtctaccaccgggcgatcatctccatcgacacgctcaagtccgaccgctacctcaatcatctgcgcaggcagcgctgggacgccgtggtcattgacgagtcgcacaatgtcaccaacaagggcacgctcaacaatcgtctggcagacatcctggcccgccagacgaacgccctgatcctggcctcggccacgcctcacaatggcgatccgaagtccttcgcggagctgattcgcctgctggagccgacggcggtccgcgcggacggctcgctggatcgcgaggctgtgcgtcggctggtgatccgccgtcaccgccactccgaggaggtgcgcgacgtcgtgggcgaccgttggaaggagcgactgaccccggtcaaccggctggtggcgccctccccggcggaggacacggtggccggagagctgtcccgctcctggctgcaccggcccgacggcgcagccgccccgagcgctcccggcgggggtactgcgggtaacggcggcaatgcgctgttttcctggacgttggcgaaggccttcctgtcctccccagcggcgctgattcagacgattgacgagcgcttggcgcggcggcctcgggcggacaacctaaggatactagcagactcaaaactaccccaattattcgcgtcgcaaataaatcgaatgggctgagaacgtaaataagagcaactctaaagtctccgcatactagcgacctcaccaggcatatccctcccaccctcaacggacgacgattacaagttgcgcatagcaatacgctcataggcgcgccgcaaacgttttatgcacatcatgatgactgcgaggaaatgaagtgccgccgcaaccgcaattccggtaaaaatcggaccagagcgcctatcgccaatccaattaccggcacctgcgacgatcagatacagggtgaaaactaagccccaaactattgcccacaaagtattggccatacattcatcaacaagccgatagtcgaactcagttagccgactatcacgggcgaacgtcatccgcaactgaaaaaggaataccgacatggaaaacaacaggccagaaacgatcgaaacaccagcgacaacatcgcctacatctacaagccttgcgttcatcaaatacgcgacaacaccacccgcaaacggaatacctacctggctggcccaggccctccagtcaggtttgccggtcctcgcatcataaagcgtgctgaaatgactaaccggaacccgccacaacgatgcctttcccatacggatgcttcactcctccgactggttgctccacgccgattcccaaactccaccatgacgctggagcaaatctgacacgcgctcagcacaacgctcgacgaggatcttgtcagacaacggcgcctctcccgcctcagtcatcacttcgcgaatcgcaggcccggaattctggccaagaagaaacttcttcgatcttctatcgcgttccatcgtaacgtaaacctcgtagtcggtatcgaactcaggaacggacaccacttctttgagaatatcctgacgtgacaacttccctagcagtttctgagggaaaaacttcaatcctcgttcaggtcgcgcgatataggacaacctgccaaccttaacaatcgacccatcttctatgttaacgctcttccccgcgactcgcacctcgacttcagtcagatttgcgagctcaatccaagcctccgcctccacctctctggctgtatccatggtcacagagtccgagtagttcgaaaagtatcgcttgaacatccccatgatacggccacccgcagaacctcgcgaagactcttcggcaaaaaaataagcacgttcacctttttcgggcacgaacaatagcgcacgaatagagcccactggagcctcatcgtcggtgatctcatggaccacctcgcctgtactcacatccagtacctcgccacgttcaccatatgagccaacacgcatgtcaagcagttctacgcgaggagcgactcggcgagcagaggtgacgctgacccaggtctgttgcttgctgaaggcacgatcctcgtcagggatagcaacggcccagttatggaacacatcgattaagtcgtctccgttcagatccgacggggcgtaggtcgctgcgttacgctggtatttctcatggaatgtcatcacggtcgcggtgaggactcgccgacccataaatactcctaaatcagaaaacaaaaactattgaatttcactaacagaatcagggaggctcgaaccttgcgcagccaaccgtgacaccacagatatcctatgcctcccttatatcttcacctctcaccgacccagcgtcaaatgattcggcaaagcctgcgggcggttgtctcgcaatcagaactatccgcgtaccgaaaaagtctgcagaacataccacacgatacaacagtactcctccgcatccaaggggcaacaagagccgcataactatatcatatcaatcgtgccgctgatgatcaacaacgcatgaactgggtagtgcgcgcctcgcgccggtgatgtccagagcctcgcgagcggtagcgggacagcagtcgctgaaatacgtcaaatttgcggaaatgacggccactctggtgacctcggccaaccaccaaaacattatagacaacctggagccacggtgcggcaaccctccgccgagagcgggcgtctcggcaacggcgacggacaacccgataacccaccgcagtactcacaacctgacccaggagcgtcaaggataacaaaaacaacaacacacagcatcctgatccaaagttctttcaactgaaacagaggctaccagaatactccgcgcccagccgccccgacatgcttcactctttccgcccctcccccataaccccccgcctcaacatcaacgaggatgatccatcataaatagatctcccccgcaactatagttgcagttctagtgaaacgacacgactgaacacaaacgcttcccgccctaaaatacgcttaaccgctcacgccaggtctccaaacctcgccacatacgccgtcagtgcctcaacgacgcgagccttgcgctcatcgcggctctggccagcagcggcctcgcggaagcgggagacgtgtgggagcagacgtgtgatcgccataccctctgtcggcacaaacccatcgcgcagagcagcagccacgaacttctcagtctctgcctcgcgtagcccctcggtcacgacgatggtgtccagttcggaggccatgcgctccgcgatgaatgccttccactgctcgtccacggtcccgttgctggagactgacccgacgaaatcctcaataagatcgcgcttggagtggagcgtggggctggaggcgatcgcacggctgatctccaccggaatctcacggtcctcaccgtcaccccgctcggcacgcttgtcctccacgaggtgcaggatgtagtcgacaccgacctcgacctgcttgatgagttcgatctcgaagacgaggtcatcatcgactacctccttctccgtcttggccgccgcacgcatctgggcgtggatctccaggtacatgctggtgtagtcggcaagatcggcgtcgttgaggccacccatgttgtcctcggagaactcgtcgaaggagacgaggatgttgcgcagccggagaatctggccgagcagcattacgaactccttctgggccacctctgaggcgatcacctcaccgggctgccacttgccgcgcaactgcgctaccttggcgatgaactcctccaggtactcacggtaggagcgcaggaggatggttccgctagcgttcttgttgccgaacagggcgatagcggcgtcggtctcagcctggagattgcggaagcagacgatgttcccgtagctcttgaccgcgttgaggatgcggttagtgcgggagaaggcctggatgaggccgtgagtgtgcagtgatttgtcgacccacagggtgttgagtgttttggagtcgaagccggtgagaaacatgttgacgacgataacaaggtcgatctgccgcttagcaagacggtcggagacatccgcgtagtagttctcaaaccctgaggcgctggtgtcgtagttggttccgaactgccggttgtagtcggcgatggcggcgttgaggaaggccctgtcgtcggcggacagcgcggtggggtcggtggattcctcggcgagtgagtcgccaggtgcttcggcgttggcggcgtaggagtagatgatgccgacgctgagccgctggtcgcccggcaaaccctgctgctgacgggcgaactcctggtagtaggcgcgcgcggcggggatggaggcggtggcaagcagcgagttgaatccggccaggcgctgctgcccgagcgtgtaagtccggttgcgccgcgtcttctggttgaagtgctcgcggatgtaggtgacgacctgcgcaatccgccctggtgccataagcgctcgttcggtgtcgatagcgctgacttcggtgtcgacgacatcgtcgcgactgtgcacagtgtcgatgtagtcgatgcggaagggcaggacgttcttgtcgccgatggcgtcgacgatcgtgtaggagtgaagttggtcgccgaaggcctgggcggtggtgcgcagctgtatgttgccgctggagcccgcgttctcggcgaagatgggggtgccggtgaagccgaagaggtggtagttgcagaatgccttggtgatagcggtgtgcatgtcgccaaactggctgcggtgacactcgtcaaagacgaggacgacgtgcccagtgtagacggcgtgcttgcggttgcgcccgacgaaggtggacagtttctggatcgtggtgacgatgatcttaaccgtcgggtcattgatctgggcggcgagttggacggtggactggttggcggagacggtaccttcggcgaagcggttgtactccttgatagtttggtggtcgaggtctttgcggtcgacgacgaagatgactttgtcgatctcccccatcccggcggcgagcttggccgttttgaaagaggtaagggtcttaccgctgccggtggtgtgccagatgtacccgccagcagcaagggtgccggtctggcgggcgttggtggaggtgttgatgcgctgaaggatcgcctcggtggcggcgatctggtagggccgcatgaccagaagcttgcggtcggatagggcgtcggcaacgctaaagacgcagtagcgtgtcaggaccgctagcaacgtgtgcttagacaggaaggtgcgggtgaaatcgacgaggtcggtgatgcgctggttggtggcgtcggtccaccaggaggtgaactcgtaggcgtccgacgtcgcagccttgacccgccgctgggtgccacggttctcggttacgtggtcttggcgggtcgtgttggcgtagtacttagtgtaggtgccgttcgagatgatgaagatctggacgtatccgaacaggcccgccccggaccagaaagagtcgcgctggtaacggctgatctggttgaaggcctcgcggatgtcgacgccgcgccgtttaagctcgacgtggaccagcggcagcccgttgaccaagatggtgacgtcgtacctgttgaagtgtgagccgttggtagcgacgtactggttggtgacctgcaggcggttgttgtggatgtgacgcttgtcgatcaggcggatgttcttgaactcgccgttgtctcgggtgagaacttggacgtggtcctcctggatgcgtcgggtcttctcgaccacatcggacgctccccctgcggtctggatggagcgttcgaagaagcgcttccactcggtgtcggtgaagcggtagtcgttgagcgcctcaagctgagcacggaggttggcaatgaactctttctcagcattctccggcgtaaacctgacgtactcgtaggcctgctcctgcaactgggtaatgaaagcgcgttcgaggtccgcttcggactgatatgccttgctggtgcgttcgctcggctcgtaagtgcccacgacggtggagtcgtcggtcagaacgaccggctcgatgcgcacggcctgggc

SEQ ID NO: 4402 - DNA, 20319 bp, synthetic construct
  source 1..20319: mol_type = other DNA
  misc_feature 1..20319: note = Synthetic
gaaagtgcagttccaaccgtcactttcgagtgcaaaatgcacctctcgacgaggaaggggccgatggtgatcttgcggaccgcggtgacgaccgccctgaaacatctccagcgacccggtgagaagggctcaatgaaggactaaagggcgtagcagtgggaaagaggcgtagcagatgaacggggcggcgcggggggcgggcgggtcggatgcgcggcatcggggccgggcgggtgggtgttacgcatttcgattgggatcggttgtaggagatcggcggaatcatgagggaaacccgccgccggcccgtggggtgccgctctctcgtgcgctgtgccctcgcgaccggtccgagaagaacccggctccactccagagggccccgccgcccgggagcccaacggcccaacacggggcgcaggaacactgccgctcggggcccgactccgccgcctcgacggggagggcgtattgggataggttatcggtatggtgatcgcgcgattggcggaagtcagactccaccgtttcaagtcctttcacggagcgacggtccctctcggggacctgacgatcctgaccgggcgcaattcgagtggaaaatcgaatgttctcgacgcgatcgaggtgctgtcccgaatctccggcggagagcttctcggcgatgccctcgacggcgggcgccgagagggcggtccggtgcgcggcggttcgcgcggatgcgctccttacggggagacctcattcaaaatcggatgccggatcgagatcggcgacgacgggaccgccttggactacgatgtagaggtcggggtggatccgactctgaggatccgagacgagaggcttgtgcaaaccggcgcaggggaggagaagacctggttcgaggtcaggcgtgcgagtcgggagaacctggagatctcctacagaagcggcgtgaacggatccagccggttggccgcgatgcgcaacgaccggagtgttctgggacagatcaggaccgcactggtcgtcgagacggagactgttcggcagctggtcgggcgtgcgatgacggtggcggacgcgttggccaacactttcaacctggatcccgagccgcggttgatgaggaattatgttccgccgggggagtaccggttgagaaggagcggcgagaatctggccgccactgttcttcaccttcgggctgcgaacccgggacggttccaggatctggaggacatgctgcggatcgtctcggattgcaatatggaatccctcgatttttcctggaccgatgagggccaggtcatgcttgctcttgatgaagggaggggaaggcgcactacggccaggctcatgagtgacgggaccctgcgattcagtgcggtggttacggccctgatgacggcgtcgacatcgcttgatatcggtgcatccggtccggccggccccacattcgatgcgcccgcccccggaatcgtgctcgcgatcgaggagatcgagaacggtctccacccctctcacgcggcgcgtctgctcgacctggtcgagagtgtctcccggcagccgggtgtatcggtactgctgacgacgcacagccccgccctcctcgacgcaatcaacggaaaggcgctccgggatgttctcgtgtgccatggtggtcgagtctctcccctggtcgatctgccggggtatgcgacagaaatggccggaggaagtctcgggcgcgtggtgagccggggcgggctcgtagcagccgagactcggagcgccaacgactactccggtttcctgcacatgatcggaacggtatcgtgaacgtctggttcatcgatacttctgttctcgatcatatagtcccggtgcccggctggtcgaaggcgggttcaccggaccggcaggacatcgccctgctcatgggtgagcgagtcgactcgggggacagcatgatcctgccgatcaccgctgtgatcgagacggggaatcacatatgtcaggttccggagggcggtcgacggagatcggcggcaatgcgatttgcggagatcctgcggtgggtgatcaacggcagatctccttgggttctcgatgaagtgcagtgggacagggccttcctgagagattttgttgcgggggccggcacaggaacgacatgggtcgatctggcctcccagggcaagaacggtcttggaggaggagatatgacgttggtggtcgagcgcgatcagtactgcgctcgtactggaataccccgggaaagggtcaggatatggactctcgatcggggtctgtccgcttacgcgtgaccggggttcgcgatccggcgtcgggggtcaggcggcttcgtgctcgatggggtggaatacatcgtgcagatgcaggccccaggatctgcgctgcgttttgacgtcttcgagttgctgcggtgccacgccatacggatcgacctcgcgctgttgaatgcggtcggcggctgagagtcgaaaggttatccgggggtcgtctgagcgcattgagtctttcccaccgggaggggtcctggtgtggggccggctgcagtctgcgacggccgcgactggccccaccctcgccgagaggtgcatttcgcactcgagaacgacggttggaactgcccgctcgagtgcgaagtgcacgtctgggcgtcagagggtgtccgtcgtggccgccgccggcccgcgctcgcccatccgcgccatcatgacaatcccgacccgcgagccgccgtccccggtgagaaaggctcaatgtgcgctttccgccggtttcgcgtgtcgtttccgccggtttcgcgtgctttttccgccggtttcggtgaagagggcggggacgggcggggtcagcccgccgcgccggcgtctaccggtccccgctgagggcggcgaggtcgaccaggggcaggagcagcgcgctcgggcgggcggcgtcgtggtgcacggtgatctccaccggcgccccgcccgccggatcagccacgtcgtagcgcggccagcacgagcccgccaggtccaggcggaggcggtgcccggcgggcacgtgcacaccggtggcccacatgtccacctccacctcgaccgcctcgcccggggtcagcgggtcgcgccggtccgtcccgcggcgggcggacaggcgcagcacgccgtcggtgagcaggacggaggtgccgtcgggcaggacctcggtgagggcggcgtgcaggtgagcgtcgacggcgtcggcgctcacccaggcgcgcagccgcaccggccccaggacggtgaccggctcggtcaaaggcggcccggtgaacacggcgacgtcgtcgcgcgcctcgacgccgcgctggtcgtgcggcccggagttctccggcgagctcatgagcatctggccgccctgcgcggggaccgggtcggcggggtcgtggatccaggaggtggcgccgacggcggcctccgcctcgtcgggcgcgagcagggcgccgccgtcggacagacgccaggccgtctcctcggcgtccggcgccggccaggcgggcaggtcgacccagcgcccggcccccatgatgtagacgcgcaccgggtcgcggggcaggcgcgcggcggcctccccgtcccccagggccgccctccagaagtcgaccgtgagctcgccgatccccgactcccgcacgccgccgccggggaaggagcgcccagtcaggcgcccgtcgaaggtcaggtgcgtccacgggccgatgaccaggcgctggcccgccccggccgggccgtcggccatggcgcggtagttgcgcagggtgccgcccaggaacaggtcgtaccagccggcgacgtggagcgcgggcacgtcgagggcggccagggcccgccaggggtaggccagggactcccagtaggcgtcgtgcagcgggtgggcgacccagtcggccgcgtggcctccggccgtgtgcgcccgcgccagcctgcgggcggcctccgccatgcccacgcgcgccaggaagggcgtgaagtcctccatcggctcgggcagaagctcctggggcgcgtcctcctgcccgtcgtgcaccaggcccgcgcgcacctgctggcgcgtccactcgtaagaggtcccggccaggagcacgcccccgcgcatggccaggtcctcgtcgtaggtggagggggcgacccaggcggtcatcgccgccaggtgctcggtggaggccagggccgcggtgaactgggtggtggtcaggtaggagttgccgaaggtgatgacgcgcccgtcgcaccagggcagggcggccagggcccggcgcgcggccacgccgtcggaggcctcatcggcgtggaagcggaagtcgccgtcggagatgtccgtgccgcggcaggcctgggcgacgacggcgaagccctcctcgacggcccggtccaggcccaccgccgtctgcatccccaggcaggccgccgtgaggccgggcgcggcgggatcctcgcccaggtcctgggcgatcatggggcgccaggacccgaagtaggggcagcgggtcagcaggaccgggtgggcggcgtcgtcgtcggggcgcacgacgtcggctcgcaggatcgtgccgtcgggcatcgggatcggcaggatctcatgaacggcgcgcgaggcggcgccgcccggctcgggcatcaggagctcctggtgcaactgctcggggctctcgggaggggcgatctcggtgccaatgtcgtcggcggcggtgctggtgccggcgtcggcgatagcgtcggcaccagcgtcaatgtcggtcatatcgggtcctctgttcccggggcgatgactgtgctacgagactacagggccggggcggtgtcggcggccgcgcagacctcgacggtccgccccccgcgtagctcgcgcaccctgccgtcgggcgtcatcagctccccgctcaccccggcgggcagctcgatctcgtagcgcacgcgggagtgcgcgccgacgacagcggtgccggtccgcgcggagctggcccatgcggcgctgggccggtcgatgcccgcgctggcgcccgccccgccggcgccccccggcgccgcccggccggcagtgcgctcccaggacacctccacccgcccgaagggcgtgtcgcggtgcgcccgcgcccaggacaccgggccgttcgtgagcggggcgacgcgcacccgccggtacccgggctccaacggcgcgatcccgcccaggcggcggaacaaccagtcgtccacgcagccgagggcgcagtggttgaagctcatggcccccaccgtcccgtcgggcgcgaccgccgcccaggactcccagatcgtcgtcgccccctcggcgacctcgtagagccacgacggcaccgcctcctgcatgagcaccgcccacgcctcggcctcgtgcccgctgtccaccaggacgtccaggaggaagggcgtggacaagaaccccgtgtccagacggcccccggccccgcgcaccagctcggccaggcgctcggccacccgatcgcgcagcgcccggtcggcgaccaggtcgaaggcgagggcgaggacctgctcgccctgcaggcccgaggagacgacgccgtcggcgctcacgtactcggccgcgaccgccccgcgcaccgcctcccagcgctcgcgcagcccggcggcctcgcgctcgtggcccagggcgccctccacccgggccagcgtgcgcagcgcctcggcgtggtaggcggaggcgacgaactcgcccgtgcgccggggcgcctccataatgggcagcggcacgtcggcggcgagggtcgacggcgccagccagtcgccgaagtgcgtgcgcgagttccacagcaggcgctggcgcgcggcctcctccccgctcaggcgctcccacccgttggtcggcccgcccgcctcggcgcgcaggcgctcgggcagctcccggtcggcctcgcgcgtctgcttggcgacccacgagcgcatcgcgcccaggttctcctccagggcggtggcgtccccgtagcgctcccacagggccagcggcacgcggatgacggcgtcgccccacccggcggacaccgcgatcccgcccggcccggggatcccctccacggcgcccatgagcgggggccacgggctcatgttcatcaccgagccgtcctcgcgctggtcggcgcggacattgcgcatccagcgggccaggaaggcgtggacctcggcgttgttcgcggcggcgggggcgaagacctgggcgtcgccggtccagccggtgcgctcgcgctgggggcagtcggtggggatccacaggaagttggcccgctgggaccacacgacgttcttgtgcagccgggtcaggcgcgcgtcggagcaggcgaatccgcccgtggcgggcaggtcggaggccaggacgacgccgaccgcgtcgcgcgcccgcagccggccggggtagccggtgacgcgcacgtagcggaagccgtggaaggtgaaggccggctcgaagacctccggcgcctcgggcgtgcccgtgcccgccaggatccacacgtcgcgctggtccttgttggggcccacgacgttggagaagaaggagccgtcggcggccaggtgctcggagtgctccaggacgatctcggtgccggccggcccgacggcggccaggcgcaccctcccggcgatgacctgccccaggtcgaggaccgtttcgcccgcgggcgtggtgaggacccgtgcgacgggtagcgccctgactcggcgtgcgggctcgccgcggaagggctccaggcgcgtggtcggctccaggcgcgcggtgggcacgatccgcacccggtcccaggcgccgtcgtcgaacccggggcggtcccagcccgctacggcggcggcgagccggtcgtcgcgccgctcgcccacgagtatgtcgctgtagcggatcgggccgccctcggtgctgcgggcggtggcgtcggggccgacgacggcggtggagccgtccgcgtaggtcagggacagctgccaccaggcccgcaggacgcgcccgtactgggcggactcgcccagggcgccgatgcgcccggcgaaccagccgtcggccaggcgcaggcccaggacgtgggggccgggggaggccagggcggcggtgacgtcgtggacgtcgaactcggtgtagtcgtggtagctcgtccagcccggggcgaggacggagtcgcccacgggtgcgccgtcgatggacacgtcgaggacgccctgggcggtggtgtacaggcgggcgcgggtcagggcggcggcggttggttcggcggcgtccggggcggcggttggttcggcggcgtccggggcggcggttggttcggcggcgtccggcgcggcggttggttcggcggcgtccggggcggccagccggggcgggacgagctcctgacggatgagcttgaccgggtggaggcgccggccggcgggctcccaggcgcgggcggcgccgtcctcgccgaagacggccgcgaagtcaatgggcggctcaggttcgaccggggtctgggcgggctcgacccagggggcgacgacgtcggagtcggggtgcagcagggaggtggagaaggcggagtccgtccaggcggagggggcggcgccggcggtccacacgcgcacccgccaggcgtagtcggcgtcggaggccaggggatcgccgctgtaggcgacccagggggacatgggaggggagactacctcgacgcggccggtcgcccagaccgggtcggccggggcgccggtcgccgggtcgaggcggcgcacctcgatctcgtaggcccgcgccggtgcgggcccgggaacccgccaggccaggaccgggcgggggacggcgacgccggtgggggcggcgaggtggtcgacggtgaggttcacgggcgcgtgacacacgaggggcgtcgtgtcccgaccggtgcggggagaagtcatgtcgttccaatcgctcgtcgttgaagcggttcagatcgtatcgtgacgtcccggggacggacacatccccgccattgagcccttctcgccgggaacggcggtccgcggacggcttctccgtcccaggcggagcatcgcgggtccggggcgccgttttcgcggccggggcggtcttcggggcacccgcagcggccgccgcccggcccgcacctgcagccgccgcctggtccgcgaccgccctccccgcagaggcccacgccccggtcagccccgggagcctcacacgccccaccacgatcgtgcgtcatcacgccgactccggcctccaagccaccgcttctgatgagaaaggcttaatgacccgacacggatggcgcgctgatcgccgctcgatgaccgtcgtcctcgtgcggccgggagaccgtgcggctcgcgatggtattcgcggccgagtagcaagaagggcgaggacctcaccgtcctcgcccgaattcgacgcagcggatcgttccgcctcagggaccggctgtgtcagtgaaggttattcagtgggcggcgggtccggcgcccgcctggacggccccgccgggagtcccccggttctccgcgagcgcgcaggtctccagtcaaacgcgcagatgggaggtgcgcgttcgcggaggatgacgggcaggggctggcgaaccggacgcagaatgtgccctccccaccgaccccgccccggaacccttccccgatgaggaggaatcgacatacccagacgcccccagaataaccttcactgccgtaatggttcaggacagtgtgtgcgtctactgcggcggtactatcgggtatctgacgtgccagctcgaccacattgtcccgcaggcagggcccggttccaacaaccgtcgcgagaacctcgtcgcagtgtgcgagcggtgtaaccgcagcaagtcgaacaccccgttcgccacgtgggcccaggactgcggtatctcgggtgtcagcgtagaggaggccgtggcccgggtgaggcgttggaggaatatccaggacggtcgcgcgcagtctgcacagctgcgaagacttcagaagaacgtgatcgcacgattgcgtcgcaccgatgaggatccagaaattgacgcacgaagtatggagtcagtggcctggatggctaatgagctccatcaccgggtgcagtcagcgtatccgtcggcagaggtcgccgtgtaccgcgggtcgttgacggccggggccaggcgtgcggcaggaattgactcgcgcgtcaacctgctgggggagcgcgggaagaaggaccggcttgatcgcaggcatcatgccgtggatgcggccgtcattgcgctaatgaaccccagtgttgccaagaccttggctgagcggtccagccaacgctgggcgcagcggctgtccggtcaggaggagacctggaagtccttcaccggcgcaacccctggtgcgcgggacaggtttgactcctggcgtgaccatatgctccggcttaccgagttgctcaatgcggcactggcagaagatcgtgtctgtgtcacagagaacctacggctccgactcggtagcgggaacgcccaccatgaaattgtacgtcctctggctcgacaccgtctgggagacgggctgactgccgtgcaggttgatcgggcatcctcgccagctctgtggtgcgcactgacgcggcagcccgattttactccccggggaggtctgcccccatcggagaaccgtgttatcaaggtccacgggaggcgggtgaccgccgacgacaatatcacggtcttctcacagaaaccgggtgacgacgcggctgagaagccgtttgcggcgatcgcagtccgaggaggattcgctacgattggtttgacgatccaccatgcacgtctctaccggatcgaggggagaaagcccgtctatgccatgctgcgggtctttagccacgaccttcttccgtaccgtcgtgacgacttgttctcagtgcccctggctctccagactatcagcgtcaggtgtgcttggcccaagctgagggcggccttggctgaggaggctgctacctacctcggctgggtggtcgtgggcgacgagctcgaggttcccatggagagttttacaggcggatacatcggtgggttccgcaaggagttccctaatattacacgatggaggatcagggggtttgagagcgctactgtcgtcaagttgcgtcctaacgtgctcgcggcagaaggtcttaccgagtccgttggtgacgttgcgaaaatagtgggaagagggtggcggatgtccgtcaacgttctcttctccacccaccctacggtagtcaggcgtgatgcgttgggacgtgtccgccactccagtgcagccggtctgccgaccacctggacggttaggtaggtcgttctgatggatacagcttggcgtattattgactgctcctcactggacggtcagctcacctcggaacgaggggccgtcctggtgcaccccagtgctggggagcaggtacgggtaccggtagccgatgtggcggtgttccttgtcggccctcacacggccttctcctccgcggtgttgcaccgacttcttggggcggacgtggtggtgatgttctgcgactggcgcggggtacctgaaggagcagcgtacccgtggcacgagcacactcggattggtgcgcgacaactggcccagtcccagttgtccctgccgcggaggaagaatgcgtggggtaggatcgtcaaggccaaggtcctggggcaggcggcggtactgagcggcgtggacgcgagtgcctccgagcggttgcgggagatggcccgaaaggtccgttctggcgacccggagaacattgaggcccatgcggcccgtctgtactggtcgaggatgttccctgacgagggtcggttctttcgggagcctgatgccgaggataataggaatagctgcctcaactacgggtacggtgtcctgagggcacacggtatacgtgcggtggtgagcgccgggctcagccccgctatcggcctgttccatcgtggtcgtagcaatgccttcaatctcgttgacgatcttattgagccttttcgtcctgtcgtagacgataccgttctatctcttgctccggatgactctcttgagaatcgaagcgtcaagcagaagcttgtggcgaccgtgcagcaggcgttcgattccacgggctccacgcttcccaccgtcctcgaacgtctggctcagcatctggggcagtactgtgaaggtgatcgtgaccgtttagatgttccttcgtgggctggacctcagaaggtttctaatggcagatgacccgatgtggtccattgtcatgttcgatcttccggtcctgactgcgaagcaacgtcgtgaggccaaccagtttcggcaccttcttcttgacgagggattttggatggcgcagtacagtgtgtacgtgaggtactctccgaccatgtccggcgaggttcgcagaatccgggccatcaaggctgcgctgccagacggcggcgaggttagagtgctctatgtcacagatcgcgagtggtcgaccatgctctgttttcgcgaggaggctcctcttgccccggatcccgcaccccagcagctcacgattttctagtcacggagaactgcgtatgcgcaggtcagaaccccctggcaggctcatgaggagtctaccagggggactgaggactgattcccagctgttcggccgtaacctggtggcgtacctggagtctaccagggggactgaggactgattcccagccggatcatcaacggaagcctcgacctggggagtctaccagggggactgaggactgattcccagctgtgctggctcctcaaggccggcgtgcaggagtctaccagggggactgaggactgattcccagctggagcggacgagggcggtgatggcgtcggagtctaccagggggactgaggactgattcccagcaccgtctccatcgacaggatcgcgatagggagtctaccagggggattgaggactgattcccagcggcctgagccagaggccccgccaccgccggagtctaccagggggactgaggactgattcccagcccgaacgggcgtgcgggcagcagtatgaggagtctaccagggggactgaggactgattcccagcgtgtacccgtcatggtcggtcaccgtgaggagtctaccagggggactgaggactgattcccagccccgccccagtggagtccgacgccctcgggagtctaccagggggactgaggactgattcccagcaggtcgatggcggtgcggagcctgtcgaggagtctaccagggggactgcccagcttgtcaggatgaggaaggcggagatacgctcaattcacgcaagatgagcatagtgcgcagagcgtgtgcgccaccggttggcaggaggtctgatgactacagcggcggagagcaggacctacctgcccgaggaggaggttgctgggcggttcggtgagatcgtggagatgctgtcctcgcacggggcgtccgcgcacctggtggctggtggtgagacgatcgagctgagccagtccatggcagaccttctggtccaggtcgctcgggcgatgcgtcaggggctcgcggtgacgatcgccccgcacggcacccggctgacgacgcaggaggcggccgacatgctcggcatctcccgctctaccctggtcaggatgctggaggcgggggagattcccttcgagagagttcgtcggcaccgtcggctctgtctgtctgacgtgcttgagtttcagcggcgccagcggcgtgcagcggacgaggcgctgggtgacatggtggcggatacgcaggctatgggagggtatgacgacgatcctgcacgactgcgtgaggtgcttgcggctgtgcgctcagagggctgacgacaatgttctctgtaatgcttgacgcctgcgtgctggcacccagtaccttgcgtgatgtattgctcgagatcggtaccacacaggctttcaggccgttgtggagcgagatgattgaggaggagatggagcgggcggtcctccgtctgcgtgacgagcgtggtcgcgatcaggaggagtcgcgcggttatgtcacccggctccgacgtcagatgaacgaggcacttcctgacgcgcgggtacgagggtgggagggcgctctgcagtttgtcccgcgaatgcgtgacgcaaatgatggtcacgttgtcgcagcggccctcgtcgggcgtgcggacgtgattgttactttcaatctcaaggatttcgaggacgaacgtcttccgggtgctcttttctcgcaatctccggacgacttcctgatcgatcttgtcgggctgtatccgcgtcttgtcctcgacgcccttgacactattgtggcaagaacggggcggaagggtcccaggtggagtgtggacgatcttcttgagaggcttgaagtcgagggcttgcatgggttcgtcacaatggtgaggtacgagagaggcgtgtatcggtagcgcacagactgcaagggttcttgcagatctcagtagttcttgcgtcggccctcctcctgacccggacatatccgcatgattccgtgggccctgtgtcagcctcctacaagaactcgtgcaacctgcaagaagtggtgctgtctgcaagaactcgtgtccgggatgctcgccctgctgtcccgcctccggcctcgacctgggccccggtccagggcccgctggttgagctgccagaagactacgggggtgggggcatcctgcttgttgccccagggccaggggcgctcggcctggactgcccccggtccggcccggatcctgccgtaggcggcgctagcagacaggccgatgccggccccgtctatctcaggccccgcccggctcggggtccctacctgctccagactcctaacccgcccctcccgccgtcctgcctggcccttacctgccccagtgctcacccggccccgcccaggcccttcccgctgcggcccctaccaggcgtccagtatgtggctggtgtgtcccgtcctggtacgtggtgtagtctcgtgcccgtgagcagcaccagcggcctgattaccagccggcgcgcgatgtagaccgtcgccccggcactgcccgcgcgccctctggaccaccggttcggggggcgttttcgttgcctctgcaccaccgaaaacacaggagtcaccagtggcccacccgtcccgaccagccgtgcccaccgacccggacgccgcccgacaggagcgcagcgcccgcatcgcggtcacggtcttcccgctcattatgctcgcggccttcctcgccgcgttcttctggcccgccaccttcgtgcctctggccggttacatgacgccgctgctggccgtcaccatgctgggcatgggcatgaccctgtccgtccccgacttcaccatgatcgtccgccaccccgggccggtcgtgctgggtgtgtgcagccagtacgccattatgccgctggtgggctggggcgtggcgagtctgctgccgctgcccgacgagctcaaggtcggcattatcctcattggctgcgtccccggtgggacgacgtcgaacgtgtgcaccttcctggccaaggggaacaccgccctgagcgtgtccatgaccgccttctccaccatgctcgcaccggttgtcaccccggcgctgaccctgtggctggcagggacctacatggaggtgcccgccgggcagatggcgttgtccattgtccagatcgtgctcctgccggtcggcttcgggctggcgtgcaacgtgttcctccaccgccaggtcgcccgcatccagcccgccatgccgtgggtctcggtggtcgcgatcgccggggtggtcgccgccgtggcggccaagagccaggcgctcatcgccaccgccgggttcctcatgttcgcggccatcgccctggagaacgccgtcgggtacgcgctcggctacaccgccgcccgggccttcggcgtctcgcgcgccgaccggcgcaccatctccatcgaggtggggctccagaacgccgggctcggctccaccctggccgcccactacctcagcgcggcagtggccgccccctgcgcggtggctaccttctggcacacgatcagcggctccctgctggccatgtactggcgcctgcgcggcttccccgcgggcgaggacccgcaggcccccgtccgccggctgtgggagcggaagggtcgcgacgccgccctggagcccgcgggtgccgaggcctgaggcactcgccccggggcggtcgtcaggagccagcccatggcgtagcggtaggggccctgaggcctcgccccggggcggtcgtgctgggtaagccggtacaccaccggtccccgcccggggggtcaccaggcgtcgtcgggcgcggtcacgcaccccggtctccgcccggggtcaggggccgctcagcgtccaccgcgcaggaggagccggatcacctccggggccgagtagcggcgtggctgggagccggggttgacggtctccaggacgccgaggtcgaccagctgacccaccaggctgttggcgcgcccgtaggacaggcccagctccctctggacctggcgcacggtgaaggacgggttggccacggcgaggtccaccaggtccggcgcccgtgccgagcgcagcgaggaggcccggacccggtcccgcagggccccctgcacctccaccagtgccagcatctgctccctggtggcggtggcggcgtcggacaggccgcgtgcgaagaaggacaggaaggagtcccagtcaccgtcggtgctcacccccaggagcgcgtcgtagtactcggtgcggcgggcctcgaaccagggggagaccgtcagggtgggctcggagagcagcccggtgcgcatgagcgtgagcacaatgaggtagcgtccgagccgtccgttgccgtcccggaaggggtggagcgtctcgaactggtagtgcaccatcccggccacgacgacggggtctatacgtccgtggtggtccgtccccagccagtccaggagggccgtcaccccggcacgcagctggtcccccggtggtaccgggacgaacctgctggcctcgaccggtgtgacctcgggcccggcgacgtcgcggcggccgacgaccacctgcccctggcgcagccgtccggactccccctccagcggcgtggcgcgcatgaggcggccctggaggtcctcaatgagtcccagggtcagggggcgcccctcgcccatccagtcgaagcccagctgggccatgctgacgtagttgaggatctcagtcatctgggcggaggtgggggcgtcggcgtcggccgtgagcacctcctccagcggggcgtatgtcccctccagcgcggaggtggactgggcctcccgacgcagtgagggcgtccgcagcaggtaggggttgggcaggcaccgcgccgtggcgtccagggccgccagcgcccgcccggctgccgcgacggcccggtaggtagagcccgccagcaccggctcgtcaggtcccagggggaccggtacgaaggcgcggtggcgccagtcgcccaggtacgggtccgacccggtgatctcgaccagctcccccatagccgggttcctgaacatgctcacgtccatcatgtcacactaacggcccttgtctgacatgggcaagaccagcttttcacacaacgggcacttgtgtgaaaagtagtcggtggacatgtcacacatgtgccatgaggcgggaggcggtcccgcgcccggggcgccccgcccggccgccctgcttaccgctgctgggcccggtgcctgcgccgctcggccttgcggtggcgctgccagcgctggacggggcgttccgtcagcgccagcagggccaggacctccagcgccaggcccgcgatggagaccagggtcgcgtgacgtacccccagggtggtgatgtgcccggccgtggtcagggccgacagggtcaggaccgtcagcagcgcggtgcgggacctggggtgcccgacccaggaggcccaggccaggacggccaggagggtcgtcataaagctgctcaggcctatgaccacccagtaggcgaccgcctcggggtgggccacgccctcgtcacgcagggcctgcgcggtcaggaggatggtggagtcgctgaccaggcgcaccgcgtcggccagcaccgccagccccaccagggccaggccgaccagcagcccgccggggcgttgccggctggcccgggcgtccagggcgcgggcgcgggccaggtccacggagcggacgtcgtccacgacgacgtcgtgcaggttcagcacgtagaggtcgccgtcggtctcaatacggtcgcccccgccgttcctgtcgtggtaggcggtgaagaagtccggccacacctcggtggaggcctcccggctggcccacatgacgtcgtcgaccacgtagttgcgctcaatgtcgatgttcgcgtcgatcttgtgggtgacctggccggtcagggtgctcaggcccacagagcggtcgtaggtggcgcccccgagccagtccacgacgcgccccccgggcaggacccacccggcaggggtgtgccagaagcgcacatggtggcgctaggcggggttgccctccacctccttctggtaggcgaagtcctgaccccgcccgaacagggtgagcgtggagaccggggccgccgggtaggagcggcgtgtcagggaggagacgacgatcctccaggaggaggcgggcgttatggggtcggcgcgcgcccagccggcgcgcgtcatggcctcgtggatgtcgtcctcgtcccccaggacggccaggttgaccgggtcccccaggacgccgtcggtggtgcgggtgcggccgatgaagtagtcgggcacgtacagccaggtgaggacctggtggaggcgggggatggccaggtaggccaggagcgcccagaacaggacgactgccaggacggaccagggggacacgtgccagcccgccccgatgacggcccacgccagccacacggtggccagggcggccacggcgaagaagacggcgtccacgacgtcgtccaggccccaggagcgggcgcgcgtctcggagagcttgtcgtcgtgcgagcggtaggtgggtgccgtggtggggcgcggccgggtcgccacagggtcactcatgtcgccaccgtagcggggcgcccgcctcggggcggcgcgctcccggctagttgcgggcggcgtcgagcagcttctgggccaggacggggtcggccctgcggtcggactgccgggtgacggccagcccggaggcggtgcaggtgtaggttgccacgctggtgcggctggacacgctcccggtggacagccccagggagcccaggccgtcgcagctggcgacggcgcggataatgtcggtcgtctcctcggaggtgagtcgatggtccttgtcgccggtgagctcgcaaacgtggatgttcgtcaggccgtccggacggccgtaggcctgcagcctgctcccgtacttgctgtgatcgtccgtggccaggatcgcgttgaccggcgcggggtcgatcacctgccccggctccaggtagagctcgacgtcccgcctcccgctggagaagatctgcttgtagtgcatgacgccgctgtcgcccccaccggtctgtggcgtctggagggcctggggtatctggagatccaggtcctgagggaccgtgctgtgcgcctcgtactccaccatgacgtcgtgcctgctcagggtcaccgactgggcgctggtgcccgcgcgcgtgagggcgagggtcagggccgggcgggccagctcgtggccgccgtcgcccagcccggtctccatgctcagggggaggccgtcgacctcccaggacagtgagaccgtcagacgggtcggggacgccgccgtgatctggtccgccatctcctgctccgccctggtgagcagggtgatgacctcctcggccccggtcccctctcggaggtccgtcctcgccatgacccccgtgttgtcccagtacccggcctgcgcgtcgcatgcggtgacgacctcctgtgcgcagaagtagctcctggcggccagggcgaggtccacatggctcgacggcggctccgaggaggagaaggggtcgtacaggtcgcagccgaccagcgtcagcgccgagaccagtaccaggaggatccggatccgcaccgagctgcgtgtgatcatggacccagcataggacgtcgggaggacggtgcgagtcgcgtgtcacacgctgcctctggtacccggcaggtccgggacccggaggtccccgctcacgcccatggacagctggccgtctggtacctggtaggtccgggacccgggcccgagtcctggacccggggcccgggacccgggtggccccggacccgggcccggtcaggccgaggtaccgggctccttagccccggtccgccctggcctcgcccccgtccccggaggcctccccgttaccggacgtcttgtctgcggcgtccgccctgagccgggtgttgacccgctccacgtccaggcgcgtgagcaggagcaggatgagcgcgttggcgatcagcggcagccacacgtacatgacgtagagcatctggacggtcgagtccggctgtaccggcgcatcgcgcacgtacccgctggcggccagcagccacccggccagggccgtgccgacgccgccgcccaccttcacccccagcgaggtgcaggagaacatgagcccgtcgatccgcttgccggtgcgcagccacgtgtactccgagatctcggcgatcatggcgttgagcgtgccctgcagcgggctcatgcccagggaggccagcgcggacagcgccagcatgagcggcacgctgcccatgtaggcggccaccagcacccccaggcgcccgaccacggcgatcgcgtacccccagatgttgacccggtacatctccttgaaacggtctaccaccaccggcgtcaccagcagccccacaatgagggggacgttaatggcccaggcgaagacccccaggagcttggcgtcgcccaggatgtacttcataaagaagatgcccatgttgagcatggccgtgaagatctgggtcaggaggaagatccccaggataatgaggtagtacctgttggacagaagtatcctggccgactcgcgcattgtcggcctctcctcggcggtgctctcgacctcctggcggcccacctcctgctgctcctggcggcccgccccggcattggggctattgtccgccccggcattggggctattgtccgccccggcgtcggggctattgtccgccccggcgtcgggcccgtcgccctccagctcctcttccgg

SEQ ID NO: 4403 - DNA, 17470 bp, synthetic construct
  misc_feature 1..17470: note = Synthetic
  source 1..17470: mol_type = other DNA
ccttgcgctggaggttctcgttctcctcgctccagcggaaggcctcgtcgatctcggcggtggagatgagggtggagaagatcgaggagtaggagcgggcgtgcaccgactccatgaaggcgatattggtgtagaccgcctcctcatggggggtgcgggcgtcggggatcagcgagacggcgcccaccgtgccctggatggtgtccagcagggtcaggccggtgaacacgcgggtggtcatgttcttctcgggctcggtcagggtcgcccacgactgcacgtcattggacagcggcaccttctcgggcagccagaagttgccggtcaggcggtcccagacctccaggtccttgtcgtcgatgagacggttccagttgatggcctggacgcggtcgatgagcttgatcggctcgggcatgggggctcctcccggacgggtgcggctgacgccgtcatgctaccgacggcgggtggggaccccggcgcgcccggttcccgcgacgaaccgattgatgcggtgatgttgtgatgcgatgatacttgcatgcgcaccacgctcgagatcgacgacagggtcctcgcagttgcgcgcgagcgggcgcgccgcgagggagtctcgctgggcagggccgtctcggacctcgccctccggggcgctggcggggggacctgggctgcgagcaggcggggcgtgccgcttttcacgccgcgggccggcgaatccgcaccggtggtgacgccggagacggtggagaggtatcgcgatggcgaggagtgacgccccgctgcggctcctcgacgtcaatgttctgatcgcactgtccctgccgaaccatgtgcaccacgggctggtgtccaggtggttcgacggcgttgcgcgttgggcgacctgctcgatcacgcagtccgcgtacatccgcctcctgctcaatccgaaggtgacgggttttcccgttgccgccggccgggctcgtgaggggctcgcgcagctgtgccgggtcgaggggcacgagttcctggccgacgacgcgcccctggcggagcccctcatcgacatgataggactcgtcggattccgacaggtgacgaaccttcatcttgtcgatctcgcggcgcggcacggtgccgttctctccaccatcgacgggcgcatccccgacgccctggtcgcgggcgaccgccggcacatcgagctcatcgaggtgtgaggcacgcggtctggagccggaccccggcgaggtcgcggccattccccgagtccttgccgacaggggacgggccatcgtcattggagggacggtttccgatgccgacgatgacgctcccggcaatgcgatagcgccgcagcagcgccaatcgcgcaggcggcgggatgtcgggccctggaagtgcgtacgagcatgcccgtaaactcaggacagagcctcctcgatgatcctgcggctatagttgttggtgtccttcatgggcccggtaatgactccgtccgacatggacatcatgagccgctctggatccggatagtggccccccgagggatcctcgaggatgatcgtgaccttctcgataacgggagccccctggatagcccgaataagtctcacagccagatcgcggccattcccctggtctttaccgataggaacgctttcactgccgccatctataatgagctcgggaacgtcgacctggtcgtccaacttcataaaatacccgttcccctgcgacgccgaatcagggacggaggagaatatcctctcgaaggggaaactcgacagatcggtgtcggtcgcaccccagacggtgacaccccaatcaggaagctgaatccactcccgaaatccacgcagccctccatcttctccccgcggatatgcgagaacaaaatcatcgggcagcttttcctgcgcctggtacacaatctccatatcaggaactcggacgcgcgtcacgctcccctgcgagagctccaccgcccattcgagcagatcccgaaaaactttcgtccggtcatcgtcaacccattcatagagattatagtcttggcacgctattgaggcgccattgcaggtccagccgaacagaagccaggtctcctgcttactcagtctgctcaccattttatgtgcagcgccccggagcatatcgacaatggcgtcagtccccgtatcatccttgagggtgaggtcaatatcgatcgagctctcgaactccgcaccgcggcggtagtccacctgcgatcgcgtgacgatatcctgctcggagaagtaagccttgaaggcgcggtactccggagtatcctccggatcggagaagacgcaccctgaagcaccccaggcaagccccagggcgaatcctgtcaggacagtcctgcgcgtaggtcgggggaaagaggaagccaaaaccacggcaggcaccctaacggcacggtcccacggcctccatggggacacctgcccgtcaccctgttggtggtcctggggccagcccggggccggaccggggccgggccagcagagccggcagggctggccccggaccggcatgacggttcgcgtacttcttgcccggctgcgccttgttagcgtgccggccccgggccggtatgacggtttgccccgtccgtagatggtccggaggcgagaaggtggcccgggcagcgacgaagggcgccgcctccgctgccggcggctgggccagcgcccaggcgggcgctgcgattagcgcatgtgtcggcggaccggttggtgccgcgacacgctgtcggaaaactcatcggaatctcccggcgacggctcgccgccccactcccatcgggccggcaggcaccgcaagtgaccgccccatctcccaggaggccggactgaggatccgatgcccgtgttcttgtcgggcgtcatggcatggtgctcccgtcgctcgccgggcgcggctgacagcttcgcaaacagcgctgacagacggtggacggccgccagacaatcgcggacggtccggccggagccgccagcggcatgatcatcggaatgtctggaactgagcgagcagactcccggctcagcccaggatctccgtaaggagccggcggctgtagtcgtcggtgtcgaacgtcggcccggtgatgacgccgtccgccatggatacccagaaggactccgtctccgggtagcggggtccggcggggtcctccaggcagatcaagaccctctggactacaggagccccctggatcgcccggatcagcctggcggcgaggtcgcggccgttccccgaacccttgccgatgggggacaggccgtcgtcgttggattgacggttgccgatattgagataggggccgtccttggcattccagtaggtgtctaccgccaggcgatgcctcaatccctgagggccggggtcgggaatggaggagagaatcttcttcaggggaaagtccgacatgtcgtcgtcgcttgtggcctgaatatcgatgtcccagcccggcagggcaattctgctctcgaacttaacacgctcactgtcaaatttctgcgcattgagcacaaaatcctcgggcaactcgtcatgaacctcgtacaggatgctcatcgaaggaacatagatgctctggactcttccctgcgcgatctccgtcgcccattcgagcagactcagctcgtgcggcttcttctggtcgacatccttccacagcccaaggccggtagtggcgtagttgacgagggcgtcgctataatgccaatcgatccagatcctgacgtcggcctcctcccccaccttgcgagccgccccctggagcatactggcaacggaatccggctcggcgtcgttcttgagacgcagatgagcctcaataaaactcgccctgtccacaccgaggttgtatttcacctccgctttctccacgatttcctgcccggagaagtagcccttgagggcgaggtagtccgggttggtgaccgcgcaccccgaggcgccccagagaatgccgagggcagagccgaccaaaacggtcctgcgtgcgggcttggcaaaacgtgcagtggaggccatgacggagaacctatcggagcctccccgcaacctccacggggagatctctccactcagggcctcctcgcgaccgcgcatcaggcgggacaatggggacatgaatggagatgcaggcccttccccgcgactcaccggcgaggctccgatcctcctgactgggctggtcgagcgcctccgcgagctcctgacggccgacggcgcgccgccacgccttgtcgtcggcatcaccggaccgccgggagcgggcaagtccacgctcgtcaccgcgctggagacggcactgcgtcagcgcggcctgctggcgggaatcgtgcccatggacggcttccacatgtccaacgcggtcctcgacgagctcggccgccacgggcgcaagggcgcgccggacaccttcgacatcgacggctacctggcggtcctggaccgggtgcggcgggcgggcccgggcggcgaaccccgcgaggtcctggcgccggtgtaccgccgcgacctgcacgagccggtggcggcgggcacgcgcgtcaccggccgcgggatcgtcgtcaccgagggcaactacctggcgctggactcactgggctgggagggcgcccgggagcggatcaacctgctcgtcatgctggaggtggacgaggaggagctcatccggcgcctggtgacccggcacatgtccttcggccggcaccgggccgacgccggtcactgggtgcgcgccgtcgacctgcccaacgcccggctcgtgtctgcctgccgggaccgctgcgacgaggtgtggcggatcatccggtagcgcggcaccaaggtcgggtgcgcaccccgccccgacgtcagacggaccgcccgccccggggctgtggcgggcgcctgggaccgggcgcgcggcagccccggggatggcggtgaaacgacagcgtgatccgcagtatatccgcaagtaaatggcatgaggcgggctcgcgcggatcccgatctgcgcgggcccgtcgaggtggggcgaatcgacgccaggtctccgcgcactcacggcgtcatgggcgggctgcacatgggagaaacccggcacctccgcatcacagcctgattttcgcggaattatgcggaaaacgcgatgcgcccgctggccggcggtcggctcccatgtgcgcagacccccctgtacgcacatgggagctcggcaaccagtgttgacgcgcacggcaaaaccccgagattccaacgaaaatcggcctcggtcgcccgatcgcgcgtctctcccatgtgcaaccgggccgccgcggcccgcaggcgagccagcgcggctccactgtcgtccccctaccctggcaccccggcggcgatatcccgctgctcatcatggcgcggctccgccgccatccccctaccctggcaccatgacgtactcgcagccgcacaccgtcacccgccaccagatcttccagaccagcctcatcaccgccctggcccagggcgtctacgaggatgagatgacgctggccgaactgctcgggcacggctccttcgggatcggcaccttcaacgggcttgacggcgagatggtgatcctgggcggcacctgctaccggctgcgcggcgacggctcggtgagcgtgccggacctggatgagcgcacgccgtacgccgtcgtgacgaacttcgtgccggccatccgccaggaggtgggaggcgggctcagccgaaaggagttctccgagatcatcgacggcctcgtgccgagctccaactacatgtatgcgctgcgggtgacgggccgcttcgcgtgggcgagcgcacggaccgtagtcaagcaggagaggccctaccggccgatggtcgaggccaccgacggcgaggaggtcgtgcgccgcggggacttcgaggggaccgtggcgggattccgcacgcccctgtacgagcaggggatctccgtggccggctgccacgcccatgtcattgacgaggaccgcgcctggggcgggcacctcgtggacttcgagctgacccggggcgtcgccgagctctgcctgggcaccgacttccggctgaggctgccggtgaccgaggagttcagggcggcggacctgagcgaggacatgagcgaggagatccggcgggtcgagcaccactgagcggggttgtgcaggtcgaacgcgaccaccaccatgactccaggacagcgacaggacggcttcttgccagaacgcgacacaacgcgtaatatgccctttgactgattcccagtaagcctcgccgtgattgcgaggttgaatgctccgccggttcgccggtcgcgtctgcccggttctcgtccggatcgggcagacgcacacacaactaccacgacccagccgcggatgtggttaaatacactacgtgaccactatgcgcatccgcgtcggcattgacgtcggaactaattccgttgggtgctgcgccctcgtcgtcgacgaggcgggggcccccacaaatattctgtcctgtctatccttgatacatgactccggcatcggcgaagacggccagaaaaccgcttccagtcgccgcgagcagtccggtgtcgcgcgtagagcacgccgcctgctgcgtcagcgccgtaaacgcctccgacaactggacgcccttttagagaaacggggatacccgatcgtggacccctctgctcagaaggatccctacttggtgtggcgagtccgtgcccagctagcgcaggagaccctcccggaagagagccgcagatacgctctctcaatggcactgcgccatatcgcacgacatcgaggatggcgcaacccgtacgccaatgtccagtccctcctgctcccggcacctgagtccgaattcatgaaggcaatgcgtcaacgaatcatggagaagacgggcgagatcctagacgaaagcatcacacccgggcaggccatggccgaaacggccctgaccacctcgatccccatgcgagggccgaatggggttctggacaagttgcaccagacggacaacgccaacgaaatcaggcgaatctgcgagaagcaggggatctctgctgaagagtgcaaagaactcctcttggcggtcttcgcctccaagtctccccggggctcctccctgggccgcgtcgcatctgacccgctgcccggacaaggcgggctcaagcgggcaccgaagtgcgaccccgagttccaacgcttcagaatcatctcgatcgtcgccaacctgcgagtaaccgagcagaacaagggcagtcgaccgctatcgcccgacgaacgcgaacgtgtcgtgaactttctcctcgaatcgacatcagaagaccttgcatgggcagacatcgctgaactgctcggcatccgccgccaggacctgcgtggaacagccacaaccactgcggatggagaacgcgccagcgcccagccgcctacggacgtaacaaatcggattatgagcggctgcagcgtcaaagcactgagagcttggtggaagaaagcggacgccgatcggcgcagcgcgatgatcggttacctctacgaaggcgcagaagactcggagtgcgccgacttcctggggagcctgacggagaaataacagggcaagctggactcgctgcaccttcccgctggccgtgccgcctactcacacgactcactggcgcgtttgagtgagcggatgctgcagaccgacgatgacttgcatgctgcccgtatgcatgttttcggagtcgacgacgcatggaggcctccggtggaggccatcggcgcccccgtcggcaatccctccgtggaccgcaccgtaaaagccgtagcacggttcctgaaggccgtggataatgtctggggatatcctgaatccattcagatagaacatgtgcgcgatggcttcgcaagcgagagaacagctcgagagctcgaccgagagaataaccgcaggttcaagcagaaccaggataccgtaaccgagattcagaaagtttacggcgttcagggggaagttcatcgcagtgacgtcatgcgctacaccaccgtgacgcagcaggactgcacgtgtgtctactgcggtagtaccatcacctacctgacctgccaacttgaccacatcatccctcaggcgggaatcggctccaataatcatcgggagaatctcgttgccgtgtgtgagccatgcaaccggtccaagtcgaatcttccgtttgcagtctgggcagagaaatgcgatgctccgggagtcagcgtggaagaggctgttgcccgagtccggaagtggaggaacatccaacccgggcgcgcccaggccactcgattgaagaaactccagaaagatgttatcgcccgcctacgacgtaccgacgaggatccggccatcgatacgcgcagcatggagtcagtggcctggatggcaaatgagcttcatcagagggtaaagtccgcgtatccgtcggccaaggttgccgtttaccggggttccataacggcgggagccaggcgagcagcaggaatcgactcacgtgttaatcttcttggcgagcgagggcgcaaggaccggctggaccgtcggcatcatgctgttgatgccgccgtgatcgcgatgatgtctccgggcatcgccaagactctcgccgagcgctcaaacctgcgctggtcggaatggctgtccggcaaggtggagacctggaaatctttcaccggcgccactcccggcgcacgtgagaacttcggggcctggcgtcagcatatgcttcgacttactgagctgcttaatttcgcgatcgcagaggaccggattcatgttaccgagaacttgcggttgcgactcgggagtgggaacgcccacgacgagaccgtgcgtcctctgatactgcaccgattaggagaaggtttcacctcagcacaggtcgacagagcctcctcgcccgccctgtggtgtgcgttgacgcgagagccagattttgatttcaaaacgggactgccggcgtcggaaaatcgcgttatccgtgttcatggaaaaagactgaacgctgacgacactgtatcattcttttcaaagaagtccggagacgactccaaggagagacctttcgcggcaatttctgttcgaggtggatttgcggagatcggctcaacaattcatcacgcacgaatctatcgcatcaatgacgagaagcccatctacgctatgctgcgagtcttcacccaggatctcattccccatcgacattccgatcttttctcggcccccctcccgcctcaatcaatcagcgtccgctgcgctgaaccgaaaatgaaggacgcactttcggcggggactgccacttatctcggatgggttgtcacaggtgacgaactcgaagtccccatggaaggtttcacaacgggacagatcggagagttccacaaggagttcccaacgatcacgcgctggaggatacggggcttcttcgataaggcacgccttagactgcgtcccgcgctcctggcatccgaaggacttcgtgacgcctctgatcccgtaaggaaaacgctgtctattcctggatgggttatttctgtcaatggaatttgctcgacgcacccgacggtcgttcggcgagactcactcgggcgggctcgcaactcaaccaattcgggcctgccgacaagctggacaatcgagtagagcgacatcatggacacagcatggcgtattgtcgactgctcttctttagaggggatgcttacttcagaacgcggctctattttggtacgtccagacaacggcccacccacgagaataccggtggtcgacgtcacggctcttcttttaggtccgcgcgcatgtttttcaaatgcggtcttacataggcttctgcactcggatgtcgtcgttatgttctgcgactggcgcggcgtgcctgagggcgcggcctatccatggagcggccatacacgtataggtgcccgccagttggctcaggctcgtttatcggttccacggcagaagaatgcgtggggccgaatagtgaaggcaaaggtactagggcaatcgattgttttgggccgcgcagacgctcgggcagcctgtcgccttcgtgagatgtcccggaaggtacgctcgggcgacccagagaatattgaagctcacgcagccagactgtactggtcgagaatatttcagggcgaggaacgctttcttcgtgatccttcagccgaagacaacagaaataactgtctcaactacggttacggagttctgagggcgcacggtgttcgagcggtcgtcagtgcaggtcttaatcccgctctgggcctcttccatcatggacgcagtaatgcattcaaccttgtcgatgatctcatcgagtcttttcgccctgcggtggatgacgctgttctctcgctcgaaccaagtgattcacttgaggatcgcgctgtgaaacaacagctcgtggctgctgtccagcagtctttcaattctacaggagcgagtcttcccaccgtgctggaacgtcttgctcagcatctgggtcagtactgcgaaggagaccgaaaccgtttggaagttccttcgtgggagggcccaaggagaggcgacgatggcagatgatccgatgtggtgccttgttatgttcgacttgcctgttctgactaagcggcaacgcagtgaggcgacgcgtttccgtcactttcttctcgacgaaggattttggatggcacagtacagcgtgtatgtgagatattcgccgaccgtgtctggcgagcctcggcgaatccgggcgatcaagacggccttgccagacggcggtgaggttcgagtgttgtatgtcacagatcgcgagtggtccacgatgctctgtttccgcgacgaagcccctgtcgcgcccgaccccgcaccccagcagcttacgattttctaaccatgccagagtgcgctttcggcgggattgcaacgatcagaaccccctggcgaagacttctgaagtctaccagggggactgacgactgattcccagcgggccgcgtacaggtcggatgagatctcgaagtctaccagggggactgacgactgattcccagcgggcgagggcgtgggtgcgagggcgagggaagtctaccagggggactgacgactgattcccagcagacccgggcatcgtggtggtgagcgacgaagtctaccagggggactgacgactgattcccagcgcgtcgtcatcggtggtgagcgcgtaccgaagtctaccagggggactgacgactgattcccagcatgaggcgcacgtcatgcaggtggcggcgaagtctaccagggggactgacgactgattcccagcacgctctctccgccctcgtcccacgtctgaagtctaccagggggactgacgactgattcccagcccgccgatgatgagcagagagtcgccgtgaagtctaccagggggactgacgactgattcccagcccgccgatgatgagcagagagtcgccgtgaagtctaccagggggactgacgactgattcccagcgtcgtcgcctacggccgcgacctgattggaagtctaccagggggactgacgactgattcccagcctgcgggggcccagcacggcggcgtcgagaagtctaccagggggactgacgactgattcccagccgggccctccggggtagcgggcagtccggaagtctaccagggggactgacgactgattcccagcgacgagcatccgcctggcggtcctgctcgaagtctaccagggggactgacgactgattcccagcgtcttccccgtctgcctcgggatgctgagaagtctaccagggggactgacgactgattcccagccgggacagcaccgccctgtggactgccgggcgtgtctcgagctgtggttgatcgtgttgctcaggcggctttgttattatggctggaattaaacgaggtcggtgtgtggttatgtgactggcaggtgctcgaagtcgtggtcgaaggtgcggttggtgatgtaggcggtgaaggccgcgaaggtgttctccaggacgagcgcacggggctggcggtattgttcctggcggcgtcccgtacgcgctctatgggacccggggttgggggcgtagggggcatgtagatgggcgtgattcccctggggcccgaccgggagcgtagaggtcggtcagggccctgggcgtggtgaaacctggcgttgtccaggacgaccgcgatcttctttccctcatcggtctcgcgcgccaggcgccccatcatgagggcggatctgctcggcgtcctggtctccctggatcgggtagatcctcatcttcctggtcgtcaggcccagtgccccgaagaacaaccggctcgccttcgcccggtccacctacagccttgtcctctttccccctgggagaggccacatctgcctcgtctcggcctcgcggcgggcgcggacctcgtcgacggcaccaggcctcccagccttcttccaggagaccggcgacctgaccccggatctcggccacccgcctggtgactgcctcctcgtcacggtccccctggacgggtcgggcagcagaggctcatgcccgacaaggcgcatgaacagcaagtcaggaggagcccgacccgtaccgggcaccgaacctgatcagacacgacgtcctcaaggagccgcaggcgccccagaactcggccctgacccccgcctccgacggcggtttaccaagaacctcctccagctcctccttctgcgccctcctgagccccgccgcactcccgcccacggcatgcgcggtcaccacgagggcccagcctggtccgccgccactgcgacagccacttgcgcaccgtcccctcagccggctcaaccatctccgcgacagtatccaggacgacgccacgggcggcgtacacaaccgcctccgcccccagtcctcaccagcctgcagggcgtccgagcgcctccttcacctgatgaggacgtctcgctcctcgtccgtcatatcgatccgcacgagacaaccctcatgcgagatccccggcaaacgccaaccaggaatcccgcagcagccgcccaggaataccgtcttgtttaattccaaccatagatcacggtccgagatgcaccaggcactccgcgcgccccagcgatcgcccctccaggcccgccgccgcaccgcaccgcgccgctgaccgtcaccgtccccgcccccggtgtctgccggcctccacggaggcgggcataccggccgctgcgggaacagccgcgtcggcagccacagcgaccggcgcaccgggcgcccgccagccgacaaccgtcgtcgtgccgtgctcgcccgccgcggcgtggtcctgcacccgccacagccccggcaggccgaccgccaggggcagcagcctgatcacgctgacgagccaggtcaccaggtgcccaggctcagggagccgatagagtggcccagggcctggcgccgacgtagaccaggagggcggcggcgagaaccatgccgacgccgaagacacgccggccctggcgggcgagtgcgccaacgcttgcgacgatgaggctcggcgtaggggcggggcgcgtcgtcgtcgacggtgctgctgccgtcacgctgcggaacgcctcccgcccgcagcccggcgcgccgctcagaacacccaggccaggcgggacggccaggccgggcgagccaggacgagagccgtcaggaggatctgcaggatgctgtgtctatggcggaggcgggagtgaatctgaatatgcggcatgctctcgaccgtacgcgagcggtctcggaaagggaacggggaggactcccctggtagaggaactgtggcggaggcgggacggcggggtgctcggcgcggtgggcccgctcggtggcccgccgggcgcacgacaaccccgcttgacgacctcgcgccgagcgctcggcagcgtggcggtatcggttgatatcggtcgatgtcggcctcccgggggcctcctggggtctcggagagtcccggcggggctggtggaggcccaccggcgagtgcccgctgagccccttgaaccgatttcgagccggagtatgaccgatctcggtgaaggagaccgcgaagtgggcggaggctgtgagcggaggttgtggcggaggctgtgagcgggctgagtgggcggacgctcggacggagcggagcgggccggaacgtgaacgtaccttcccaacgtcaacgtacctttctcccatccttctgggggtagacctcagaaggatgggagaaaggtacgttcacgcgacgaacttccgttgacgttgaggcccgccactcacctgacccgccccgcaccttcgcagcgggtctcagcgtcgggcggcccggcggccgccgtcgaacgacggtgggctacaactaccggcctcgccggcctcggtgctcgccgacaccctcatggcagaacaggtgccgtcagtgaagagatcgggcctatcactctatagagtgacgccttcactgtagaaactatgcttctcactctacaaagtgacgccctcactgaggtacagtgacgtcgtgaccgacgacgaactgctctcccacatcgcgcgcatgcgccggcagcgcagcgacgacgccctcgtggaggcgaaggccgctgttcgagatctcccgaagagcatctgggacaccatctccgccttcgccaacacggacgggggaaccgtcatcctcggactcgacgagcgcgaggactttcaaccggccgaaggattcaccgagtcggttgccaaccggcggatcaacgccctgatcaccggactcaacacctcgccgcaggggagcgccaaagtgctccccgtgccgggctgccgcccggagcgcgccaccgtggacggccgccccgtggtcgtcctcgacgtgccctccctgcgcgagcgcccggacctcgacttgccgtgtcatgtcgttgccaaggggactcagaacggcagcttcaaacgcgtcgacgaccatgacgtccgcctgtcctcctacgaggcgtacgtgctggcaagccgtcggatcgaggaccgcacagatcgtgagccggtgaccggcacgagtctcgaggacctcgatcctcggagcgtggaccgccttctcaccgagcttcgcagcagcagctcccacatcctcgatcatatcgccgaggacgatcgagaggccgccctcaggcggctcaacgtcctgacgtccgacagcgtccccaccttcgccggatacgtcacgctttccccgtacccgcagcaggaacttccacgactggttgtggatgtctccgttcatcccggcacccagaaggcccaggagggcgacgtgcgcttcctcgatcgacaggtgtgcgacggtcctattccgctcatggtggaggatgccgtatccgcggtggcacgaaatctgcgccgtcgccggatgacgaagggggcgttggcagaagatgttctcgagattccagaagacgtgttgcgggaggccatcacgaatgcggtgatgcaccgcgactactccgcgcacgctcagggacagacggttgctgtggacatctatcaggaccgggtcgagatcgggaatcccggtggcctctacgggggcagaaccgtagccaatcttgacgagggaattcccgtctctcgcaacaaggtcctcacgaaccttctgcgcagcgttccccgcccctatggcagaggcgtggtggccgaggccgccggcacaggtgtcccgcgaatgatcggctccatgcgccagcagggtctgcccgcgccggactacgaggcgacgacgatcgaccgcgtgacggtcaagctgtcccgcttcggccttctcgaccccgatgtgcgggcgtggctcgactcccttcccggcggaccgcgaggtaccgcggcggactccgttctggcactggcgcgcagggacgggaaggtgcgggccgtagacgtgcggaggaatctcggtctcgactccgacgacgtgcgcgacctcctcggcgagctcgttgcggaggggcttctggtcggcatgaacgacggaccctacgtactcgccgaccttaggctgcgcatggcggccgctggggccaggtgggcggtcctgtctgtcctcgatacccggaagccgctgaagatccaggacatcgccgagcggacgggcaagtcccccaccgcgctccgaccgcttctgcgcgcgctggtcagcgatgggctggtgaccgcgacggcgccgcccaccagccgcaaccgcgcctacctgctcgccgagtaggacgtccaaacaatcgattccgagggtggtgagtgggccggccgcttctcgcccgcagctctgccgccccgccgccccagcggccccagcggcctcctttcgccgagatcggttcacttccggctcgagatcggtcgagttccgcgtcgagatcggttcgaagcgcccgccgggcgccaccgcgccccgggagatgaaggggaaccgcaagcgcggcccacgcctgctcgaatcaatcacccaggagtccatccgcccgtctcgacggcgcagacacttcccgacgtcggcgaccgcgcaggccccttcgagcaggatccctcgggatcgcgccgaccccgcggctgcaccggcgccgaaccgcagctgcggacagggtctcgtttctccatccagtatagatcatgatctatactggatgagtggcgtgggaggtaatcctgtgggaggacgtggagtcatggctgctgagcctcgacgacgcctcctacgacctggtcgccgccgccatcgatcacctggcggtagtcggaccggcccttggacggccacttgttgaccggcccatcggttcccgctatcacaacctgaaggagctccgtcccggatcctccggacgcagcgagatacgcatcctgttcgccttcgaccctcgcagaagagccgtgctcctcatcgccggggataaacgagggcgctggcggaagtggtaccgggaaagcatcccgctcgccgaactccgattcgatcaatggctgagggagggcattgatgacgagaacgagtaactgggaggccgtgcgccgccgccggccgccgcacgagagtgctgtggccgagcaccgagcgcgcttcgcggcagagcagacggcataccggctccgggagatccgcgagcagcagggactgacacaggccgaggtcgccgagaggatgggcctgacccagccgacagtctcagcactcgagtcgggcgacctgagccgctccggtctggcaactctgcacgcttacatcaccgcgctcggcggaactgtagaggtgaccgccgccttcggggaccagcgtctcatcatcgcaacctgactgcgcctgcccgcaccatctcgacggcgcagacacttcccgacgtcggcgaccgcgcaggccccttcgagcaggatccctcgggatc

SEQ ID NO: 4404 - DNA, 15943 bp, synthetic construct
  misc_feature 1..15943: note = Synthetic
  source 1..15943: mol_type = other DNA
acagcggcaccttctcgggcagccagaagttgccggtgaggcggtcccagacctccaggtccttgtcgtcgatgaggcggttccagttgatggcctggacgcggtcgatgagcttgatcggctcgggcatgggggctcctcccggacgggtgcggctgacgccgtcatgctaccgacggcgggtggggaccccggcgcgcccggttcccgcgacgaaccgattgatgcggtgatgttgtgatgcgatgatacttgcatgcgcaccacgctcgagatcgacgacagggtcctcgcagttgcgcgcgagcgggcgcgccgcgagggagtctcgctgggcagggccgtctcggacctcgccctccggggcgctggcggggggacctgggctgcgagcaggcggggcgtgccgcttttcacgccgcgggccggcgaatccgcaccggtggtgacgccggagacggtggagaggtatcgcgatggcgaggagtgacgccccgctgcggctcctcgacgtcaatgttctgatcgcactgtccctgccgaaccatgtgcaccacgggctggtgtccaggtggttcgacggcgttgcgcgttgggcgacctgctcgatcacgcagtccgcgtacatccgcctcctgctcaatccgaaggtgacgggttttcccgttgccgccggccgggctcgtgaggggctcgcgcagctgtgccgggtcgaggggcacgagttcctggccgacgacgcgcccctggcggagcccctcatcgacatgacaggactcgtcggattccgacaggtgacgaaccttcatcttgtcgatctcgcggcgcggcacggtgccgttctcgccaccatcgacgggcgcatccccgacgccctggtcgcgggcgaccgccggcacatcgagctcatcgaggtgtgaggcacgcggtctggagccggaccccggcgaggtcgcggccattccccgagtccttgccgacagggaacgggccatcgtcattggagggacggtttccgatgccgacgatgacgctcctggcaatgcgatggcgccgcagcagcgccaatcgcgcaggcggcgggatgtcgggtcctggaagtgcgtacaagcatgcccgtaaactcaggacagagcctcttcgatgatcctgcggctatagttgttggtgtccttcatgggcccggtaatgactccgtccgacatggacatcatgagccgctctggatccggatagtggccccccgagggatcctcgaggatgatcgtgaccttctcgataacgggagccccctggatagcccgaataagtctcacagccagatcgctgccattcccctggtctttaccgataggaacgctttcaccgccgccatctataatgagcccgggaacgtcgacctggtcgtccaacttcataaaatacccgttcccctgcgacgccgaatcagggacggaggagaatatcctctcgaaggggaaacccgacagatcggtgtcggtcgccccccagacggtgacgccccaatcaggaagctgaatccactcccgaaatccacgcagccctccatcttctccccgcgggtatgcgagaacaaaatcatcgggcagcctctcctgcgcctggtacgcaatctccatgtcaggaactctgacgcgcgtcacgctcccctgcgagagctccaccgcccattcgagcagatcccgaaaaactttcgtccggtcatcgtcaacccattcatagagattatagtcttggcacgctattgaggcgccgttgcaggtccagccgaacagaagccaggtctcctgattactcagtctgcccaccattttatgtgcagcgccccggagcatatcgacaatggcgtcagtccccgtatcatccttgagggtgaggtcaatatcgatcgagctctcgaactccgcgccgcggcggtagtccacctgcgatcgcgtgacgatatcctgctcggagaagtaagccttgaaggcgcggtactccggagtatcctccggatcggagaagacgcaccctgaagcaccccaggcaagccccagggcgaatcccgtcaggacggtcctgcgcgtaggtcggggaaaaaggaagccgaaaccacggcaggcaccctaacggcacggtcccacggcctccatggggacacctgcccgtcaccctgttggtggtcctggggccggaccggcagagccggcagagccggccctgggccggcatgacggttcgccgccgcccgtagatgatccgggggcgagaaggtggcccgggcagcgcccgcctggccaccgcctccgctgccggcggctgggccggcggccaggcgggcgctgcgattggcgcatgtgtcggcggaccggttggtgccgcgacacgctgtcggaaaactcatcggaatctcccggcgacggctcgccgccccgctcccatcgggctggcagacaccgcaagtgaccgccccatctcccgggaggccggactgaggatccgatgctcgtgttcttgtcgggcgccatggcatggtgctcctgtccctcgccgggtgcggctgacagcttcgcaaacagcgctgacagacggtggacggccgccagacaatcgcggacggtccggccggagccgccagcggcatgatcatcggaacgtctggagctgagcgagcggactcctgactcagcccaggatctccgtaaggagccggcggctgtagtcgtcggtgtcgaacgtcggcccggtgatgacgccgtccgccatggatacccagaaggactccgtctccgggtagcggggtccagcggggtcctccaggcagatcaagaccctctggaccacaggagccccccggatcgcccggatcagcctggcggcgaggtcgcggccgttccccgaacccttgccgatgggggacaggccgtcgtcattggattgacggttgccgatattgagataggggccgtccttggcattccagtaggtgtctaccgccaggcgatgtctcaatccctgagggccggggtcgggaatggaggagaggatcttcttcaggggaaagtccgacatgtcgtcgtcgcttgtggcctgaatatcgacgtcccagcccggtagggcaattctgctctcgaacttaacgcgttcactatcaaatttctgcgcattgagcacaaaatcctcgggcagctcgtcctgagcctcgtacaggatgctcatcgaaggaacatcgatgctctggacccttccctgcgcgatctccgtcgcccattcgagcagactcagctcgtgcggcttcttctggtcgacatccttccacagcccaaggccggtagtggcgtagttgacgagggcgccgctataatgccaatcgatccagatcctgacgtcggcctcctcccccaccttgcgagccgccccctggagcatactggcaacggaatccggctcggcgtcgttcttgagacgcagatgagcctcaataaaactcgccctgtccacaccgaggttgtatttcacctccgctttctccacgatttcctgcccggagaagtagcccttgagggcgaggtagtccgggttggtgaccgcgcaccccgaggcgccccagagaatgccgagggcagagccgaccaaaacggtcctgcgtgcgggcttggcaaaacgtgcagtggaggccatgacggagaacctatcggagcctccccgcaacctccacggggagatctctccactcagggcctcctcgcgaccgcgcatcaggcgggacaatggggacatgaatggagatgcaggcccttccccgcgactcaccggcgaggctccgatcctcctgactgggctggtcgagcgcctccgcgagctcctgacggccgacggcgcgccgccacgccttgtcgtcggcatcaccggaccgccgggagcgggcaagtccacgctcgtcaccgcgctggagacggcactgcgtcagcgcggcctgctggcgggaatcgtgcccatggacggcttccacatgtccaacgcggtcctcgacgagctcggccgccacgggcgcaagggcgcgccggacaccttcgacatcgacggctacctggcggtcctggaccgggtgcggcgggcgggcccgggcggcgaaccccgcgaggtcctggcgccggtgtaccgccgcgacctgcacgagccggtggcggcgggcacgcgcgtcaccggccgcgggatcgtcgtcaccgagggcaactacctggcgctggactcactgggctgggagggcgcccgggagcggatcgacctgctcgtcatgctggaggtggacgaggaggagctcatccggcgcctggtgacccggcacatgtccttcggccggcaccgggccgacgccggtcactgggtgcgcgccgtcgacctgcccaacgcccggctcgtgtccgcctgccgggaccgctgcgacgaagtgtggcggatcatccggtagcgcagcgccggggccgcccgcgcgtcccccgacgtcagacggaccgcccgccccggggctgtggcgggcgcctgggaccgggcgcgggcagccccgggggcggtggaacgacggcttgagccgcagtatatccgcagtaaatggcatgaggtgggctcgcgcggatcccgatctgcgcgggcctgtcaaggtggggcgaatcggcaccgggtctccgcgcgcccacggcgtcatgggcgggttgcacatgggagaaacccggcgcccccgcatcacagcctgattttcgcggaattatgcggaaaacgcgatacgcccgccagccggcagtcggctcccatgtgcgcagaccccctgtacgcacatgggaactcggcaaccagtgttgacgcgcgcggtaaaaccccgagattccaacgaaaatcggcctcggtagcccgatcgtgcgtttctcccatgtgcaaccgggccgccgcggcccgcgggcgagccagcgcggctccgccgccatccccctaccctggcaccccggcggcgatatcccgctgctcatcatggcgcggctccgccgccatccccctaccctggcaccgaagccaaaaccacggcaggcaccctaaggcgcggttccgccgccatccccctaccctggcaccatgacgtactcgcagccgcacaccgtcacccgccaccagatcttccagaccagcctcatcaccgccctggcccagggcgtctacgaggatgagatgacgctggccgagctgctcgggcacggctccttcgggatcggcaccttcaacgggcttgacggcgagatggtgatcctgggcggcacctgctaccggctgcgcggcgacggctcggtgagcgtgccggacctggatgagcgcacgccgtacgccgtcgtgacgaacttcgtgccggccatccgccaggaggtgggaggcgggctcagccgaaaggagttctccgagatcatcgacggcctcgtgccgagctcgaactacatgtatgcgctgcgagtgacgggccgcttcgcgtgggcgagcgcacggaccgtagtcaagcaggagaggccctaccggccgatggtcgaggccaccgacggcgaggaggtcgtgcggcgcggggacttcgaggggaccgtggcgggattccgcacgcccctgtacgagcaggggatctccgtggccggttgccacgcccatgtcattgacgaggaccgcacctggggcgggcacctcgtggacttcgagctgacccggggcgtcgccgagctctgcctgggcaccgacttccgtctgaggctgccgctgagcgaggagttcagggcggcggacctgagcgaggacatgagcgaggagatccgccgggtcgagcactactgagcggagctgtgcaggtcgaacgcgacctccaccatgactccaggacagcgacaggacggcttcttgccaaaacgcgacacaacccgtagcatgcccttgactgattcccagtaagcctcgccgtgattgcgaggttgaatgctccgccggttcgccggtcgcgtctgcccggttctcgtctggatcgggcagacgcacacacaactaccacgacccagccgcggatgtggttaaatacactacgtgactactatgcgcatccgcgtcggcattgacgtcggaactaattccgttgggtgctgcgccctcgtcgtcgacgaagcgggaacccccacaaagattctgtcctgtctatccttgatacatgactccggcatcggcgaagacggccagaaaaccgcttccagtcgccgcgagcagtccggtgtcgcacgtagagcacgccgcctgctgcgtcaacgccgtaaacgcctccgacaactggacgcccttttagagaaacggggatacccgatcgtggacccctctgcccagaaggacccctacctggtgtggcgggtccgtgcccagctagcgcaggagacccttccggaagagagccgcagatacgctctctcaatggcactgcgccatatcgcacgacatcgaggatggcgcaacccgtacgctaatgtccagtccctcctgctcccggcacctgagtccgaattcatgaaggcaatgcgtcaacgaatcatggagaagacgggcgagatcctagacgaaagcatcacacccgggcaggccatgaccgaaacggccctgaccaccacgatccccatgcgagggccgaatggggttctgggcaagttgcaccagacggacaacgccaacgaaatcaggcgaatctgcgagaagcaggggatctctggtgaagagtgcaaagaactccttctggcggtcttcgcctccaagtctccccggggctcctccctaggccgcgtcgcatctgacccgctgcccggacaaggcggactcaagcgggcaccgaagtgtgatcccgagttccaacgcttcagaatcatctcgatcgtcgccaacctgcgtgtaaccgagcaggagacgggcagtcgaccactatcgcccgacgaacgcgaacgtgtcgtgaactttctcctcgaatcgacatcagaagacattgcatgggcagacatcgctggactgctcggcatccgtcgccagaacctgcgtggaacagccacaaccactgcggatggagaacgcgccagcgcccagccgcctaccgacgtaacgaatcggattatgagcggctgcagcgtcaaagcattgagagcttggtggaagaaagcggacgctgatcggcgcagcgcgatgatcggttacctctacgaaggcgcagaagactcggagtgcgccgacttcctggggagtctgacggagaaagaacagggcaagctggactcgctgcaccttcctgctggccgtgcagcctattcacacgactcgctggcgcgtttgagtgagcggatgctgcagaccgacgatgacttgcatgctgcccgtatgcatgttttcggagtcgacgacgcatggaggcctccggtggaagccatcggcgcccccgtcggcaatccctccgtggaccgcaccgtaaaaactgtagcacggttcctgaaggccgtggataatgtctgggaacatcctgagtccatccagatagaacatgtgcgcgatggcttcgcgagcgagaaaacggcgcgagagctcgaccgagagaataaccgcaggttcaagcagaaccaggataccgtaaccgaaattcagaaagtttacggcgttcagggggaagttcatcgcagtgacgtcatgcgctacaccaccgtgacgcaacaggactgcacttgtgtctactgcggcattaccatcacctacctgacctgtcaacttgaccacatcatccctcaggcgggaatcggctccaacaatcatcgggagaatctcgttgccgtgtgtgagccatgcaaccggtccaagtcgaatcttccgtttgcagtctgggcagagaaatgcaatgctccaggagtcagcgtggaagaggctgttgcccgagtccggaagtggaggaacattcaacctgggcgcgcccaggccactcgattgaagaaactacagaaagatgttatcgcccgcctacgacgtaccgacgaggatccggccatcgatacgcgcagcatggagtcagtggcctggatggcaaatgagcttcatcagagggtaaagtccgcgtatccgtcggccaaggttgccgtttaccggggttccataacggcgggagccaggcgagcagcaggaatcgactcacgtgttgatcttcttggcgagcgagggcgcaaggaccggttggaccgtcggcatcatgctgttgatgccgccgtgattgcgatgatgtctccgggcatcgccaagactctcgccgagcgttcaaacctgcgctggtcggaatggctgtccggcaaggtggagacctggaaatctttcaccggcgccactcccggcgcacgtgagaacttcgaggcctggcgtcagcatatgcttcgacttactgagctgcttaatctcgcgatcgcagaggaccggattcatgttaccgagaacttgcggttgcgactcgggagtgggaacgcccacgacgagaccgtgcgcccgctgatactgcaccgattaggagaaggtttcacctcagcacaggtcgacagagcctcctcgcccgccctgtggtgtgcgttgacgagagagccagattttgatttcaaaacgggactgccggcatcggaaaatcgcgttatccgtgttcatggaaaaagactgaacgctgacgacactgtatcatttttttcaaagaagtccggagacgactccaaggagagacctttcgaggcaatttctgttcgaggtggattcgcggaggtcggctcaacaattcatcacgcacgaatctatcgcatcaatagcacgaagcccatctacgctatgttgcgagtcttcacccaggatctccttccccatcgacactccgatcttttctcggcacccctcccgcctcaatcaatcagcgtccgctgcgctgaaccgaaaatgaaggccgcactttcgacggggactgccaattatctcggatgggttgtcacaggtgacgaactcgaagtccccatggaaggtttcacgacgggacagatcggggaattccacaaggagttcccaacgatcacgcgctggaggatacggggcttcttcgataagacacgccttagactgcgtcccgcgcttctggcatcagaaggacttcgtgacgcctctgatcccgtaaggaaaacgctgtctattcctggatggcttatttctgtcaatggaatttgctcgacgcacccgacggtcgtccggcgagactcactcgggcgggctcgcaactcaaccaattcgggcctgccgacaagctggacaatcgagtagagcgacatcatggacacagcatggcgtattgtcgactgctcttctttagaagggatgctcacttcagaacgtggctctattttggtacgtccagacaacggcccacccacgagaataccggtggccgacgtcacggcccttcttttaggtccgcgcgtatgtttttcagacgcggtcttacataggcttctgcactcggatgtcgtcgttatgttctgcgactggcgcggcgtgcccgagggcgcggcctatccatggagcagtcatacacgtataggtgcccgccaactggctcaggctcgcttatcggttccacgacagaagaatgcgtgggggcgaatagtgaaggcaaaggtattagggcaatcgattgttttgggccgcgcagacgctcaggccgcctgtcgccttcgtgaaatgtctcggaaggtacgctcgggcgacccggagaatatcgaggctcacgcagccagactgtactggtcgagaatatttcagggtgaggaacgctttcttcgtgatccttcagcagaagacaacagaaataactgcctcaactacggttacggagttctgagagcgcacggcgttcgggcggtcgtcagtgcaggtcttaatcccgccctgggcctctttcatcatggacgcagtaatgcattcaaccttgtcgatgacctcatcgagtcttttcgccctgcagtggatgacgctgtcctctcgctcgaaccaggtgattcacttgaggatcgcgctgtgaaacaacaactcgtggccgctgtccagcagtctttcaattctacaggagcgagtcttcccaccgtgctggaacgtcttgctcagcatctgggtcagtattgcgaaggagaccgaaaccgtttggaagttccttcgtgggagggcccaaggagaggcgacgatggcagatgatccgatgtggtgccttgttatgttcgacttgcctgttctgactaagcggcaacgcagggaggcgacgcgtttccgtcactttcttctcgacgaaggattttggatggcgcagtacagcgtgtatgtgagatactcgccgaccgtgtctggcgagcctcggcgaattcgggcgatcaagacggccttgccggacggcggtgaggttcgagtgttgtatgtcacagatcgcgagtggtccacgatgctctgtttccgcgacgaagcccctatcgcgcccgaccccgcgccccagcagcttacgattttctaaccatgacagagtgcgctttcgccgggatcgcaacgatcagacccccctggcgaagacttctggaagtctaccagggggactgacgactgattcccagcatgatgacgcactcgcaagcgcttcagggaagtctaccagggggactgacgactgattcccagcggacacgtcgatgccgaaagcccgcccagaagtctaccagggggactgacgactgattcccagcggggcggccttgttaccgcccgggttcggaagtctaccagggggactgacgactgattcccagcgcgtcgcgcaccgacaggctcactgccagaagtctaccagggggactgacgactgattcccagccgggacagcaccgccctgtggactgccgggcgtgtctcgagctgtggttgatcgtgttgctcaggcggctttgttattatggctggaattaaacgaggtcggtgtgtggttatgtgactggcaggtgctcgaagtcgtggtcgaaggtgcggttggtgatgtaggcggtgaaggccgcgaaggtgttctccaggacgagcgcacgggggctggcggtattgttcctggcggcgtcccgtacgcgctctatgggacccggggttgggggcgtagggggcatgtagatgggcgtgattcccctggggcccgaccgggagcgtagaggtcggtcagggccctgggcgtggtgaaacctggcgttgtccaggacgaccgcgatcttctttccctcatcggtctcgcgcgccaggcgccccatcatgagggcggatctgctcggcgtcctggtctccctggatcgggtagatcctcatcttcctggtcgtcaggcccagtgccccgaagaacaaccggctcgccttcgcccggtccacctacagccttgtcctctttccccctgggagaggccacatctgcctcgtctcggcctcgcggcgggcgcggacctcgtcgacggcaccaggcctcccagccttcttccaggagaccggcgacctgaccccggatctcggccacctgcctggtgactgcctcctcgtcacggtccccctggacgggtcgggcagcagaggctcatgcccgacaaggcgcatgaacagcaagtcaggaggagcccgacccgtaccgggcaccgaacctgatcagacacgacgtcctcaaggagccgcaggcgccccagaactcggccctgacccccgcctccgacggcggtttaccaagaacctcctccagctcctccttctgcgccctcctgagccccgccgcactcccgcccacggcatgcgcggtcaccacgagggcccagcctggtccgccgccactgcgacagccacttgcgcaccgtcccctcagccggctcaaccatctccgcgacagtatccaggacgacgccacgggcggcgtacacaaccgcctccgcccccagtcctcaccagcctgcagggcgtccgagcgcctccttcacctgatgaggacgtctcgctcctcgtccgtcatatcgatccgcacgagacaaccctcatgcgagatccccggcaaacgccaaccaggaatcccgcagcagccgcccaggaataccgtcttgtttaattccaaccatagatcacggttcgagatgcaccaagcactccgcgcgccccagcgatcgcccctccaggcccgccgccgcaccgcgccacgccgctgaccgtcaccgtcccagccccggtgtgcgctggccctcacggaggcaggcatacggccggtgcgggaacagccgcgtcggcagccacagcgaccggcgcaccgtccgccacgaggaccggcgcaccgagcgcccgccaaccgagcaccgtcgtcgtgccgtgctcgcccgccgcggcgtggtcctgcacccgccacagccccggcaggccgaccgccaggggcagcagcctgatcacgctgacgagccaggtcaccaggtgcccaggctcagggagccgatagagtggcccagggcctggcgccgacgtagaccaggagggcggcggcgagcaccatgccgacgtcgaagacgcgctggccctggcgggcgagtgcgccaacgcttgcgacgatgaggctcggcgtaggggcggggcgcgtcgtcgtcgacggtgctgctgccgtcacgctgcggaacgcctcttgcccgcagcccggtgcgccgctcagaacacccaggccaggcgggacggccaggccgggcgggccaggacgagagccgtcaggaggatctgcaggatgctgtgtctatggcggaggcgggagtgaatctggatatgcggcatgctctcgaccgtacgcgagcggtctcggaaagggaacggggaggactcccctggtagaggaactgggaggaggcgggccggcggggtgctcggcgcggtgagcccgctcggtggcccgccgggcactcggcaaccccgcttgacgacttcgccgagcgctcggcagcgtgtcggttgacgtcggttgatgtcggcctcccggggtcctggggcctcctggggtctcgaagagtcccggcggggctggtggaggcccaccggcgggtgcccgctgagccccttgaaccgattccgagccggagtacgaccgagctcggtgaaggagaccgcgaagtgggcggaggccgcgagcggaggccgtgggcgagggctgcgagtggaggccgtgggcgggctgggtgtgcgggcgctcggacggagcggagcgggccggaacgtgaacgtaccttcccaacgtcaacgtacctttctcccatccttctgaggtctatcctcagaaggatgggagaaaggtacgttcacgcgacgaacctccgttgacgttgaggcccgccactcacctgacccgccccgcaccttcgcagcgggtcgcagcgtcgggcggcccggcggccgccgtcgaacgacggcgggctgcggctaccggccccgccagcctcggtgctcgctggcctcggtgctcgccgacaccctcatggcagaacaggtgccgtcagtgaagagatcgagcctctcactctatagagtgacgctctcactgtagaaactgtgcttctcactctacaaagtgacgccctcactgaggcacagtgacatcgtgatcgacgacgacctgctctcccacgtcgcgcgcatacgccggcagcgcagcgacgatgccctcgtggaggcgaaggccgctgttcgtgatctcccgaagagcatctggggcaccatctccgccttcgccaacacggacgggggaaccgtcatcctcggactcgacgagcgcgaggactttcaaccggccgaggggttcaccgagtcggttgccaaccggcagatcaacgccctgatcaccggactcaacacctcgccgcaggggaccgccaaagtgctccccgtgccgggctgtcgcccggagcgcgccactgtggacggccgccccgtggtcgtcctcgacgtgccctccctgcgcgagcacccggacctcgacttgccgtgccatgtcaccgccaaggggattcagaacggcagcttccagcgcgtcgacggtcatgacgtccgcctgtcctcctacgaggcgtacgtgctggcaagccgtcggatcgaggaccgcacagatcgtgagccggtgaccggcacgagtctcgaggacctcgaccctcggagcgtggaccgccttctcaccgagcttcgcagcagcagctcccacatcctcgaccatatcgccgaggacgatcgggaggccgccctcaggcggctcaacgtcctgacatccgacagcgtccccaccttcgccggatacgtcacgctttccccgtacccgcagcaggagcttccacgactggttgtggatgtctccgttcatcccggcacccagaaggcccaggagggcgacgtgcgcttcctcgatcgacaggtgtgcgacggtcctattccgctcatggtggaggatgccgtatccgcggtggcacgaaatctgcgccgtcgccggatgacgaaaggggcgttggcaaaagatgttctcgagattccagaagacgtgttgcgggaggccatcacgaatgcggtgatgcaccgcgactactccgcgcacgctcagaggcagacggttgctgtggacatctatcaggaccgggttgagatcgggaatcccggtggcctctacgggggcagaaccgtagccaatcttgacgagggaattcccgtctctcgcaacaaggtcctcacgaaccttctgcgcagcgttccccgcccctatggcagaggcgtggtggccgaggccgccggcacaggtgtcccgcgaatgatcggctccatgcgccagcagggtctgcccgcgccggactacgaggcgacgacgatcgaccgcgtgacggtcaagctgtcccgcttcggccttctcgaccccgatgtgcgggcgtggctcgactcccttcccggcggaccgcggggcaccgcggcggactccgttctggcgctggcgcgcagggacgggaaggtgcgggtcgtagacgtgcggcggaatctcggtctcgactccgacgacgtgcgcgacctcctcggcgagctcgtcgcggaggggcttctggtcggcatgaacgacggcccctacgtactcgccgacctcaggctgcgcatggcggccactggggccaggtgggcggtcctgtctgtcctcgatacccggaagccgctgaagatccaggacatcgccgagcggacgggcaagtcccccaccgcgctccgaccgcttctgcgcgcgctggtcagcgacgggctggtgaccgcgacggcgccgcccaccagccgcaaccgcgcctacctgctcgccgagtaggacgtccaaacaatcgattccgagggtggtgagtgggtcggccgcttctcgcccacagctctgccgccccgccgccccagcggccccagcggccccctttcgccgagatcggtcgagttccgcgtcgagatcggttcgaagcgcccgccgggcgccaccgcgccccggaagatgaaggggaaccgcaagctcggcccacgcctgctcgaatcaatcacccaggagtccatccgcccgtctcgacggcgcagacacttcccgacgtcggcgaccacgcaggccccttcgagcaggatctcgcggaatcgcgccgatcccgcggctgcaccggcgccgaaccgcagctgcggacagggcctcgcttccatccagtatagatcatgatctatactggatgagtagcgtggaaggtaatcctgtgggaggacgtggaagcttattcagagggtggttttgaatacgtagagtgagagggcggcggtgatg

SEQ ID NO: 4405 - DNA, 13805 bp, synthetic construct
  source 1..13805: mol_type = other DNA
  misc_feature 1..13805: note = Synthetic
tcgcacattccgccgcgcgcgaaggcgtcctcgtcacgcctccaacgactatgagcactgaccccttgaatgtggcctcaggtctccgtatctgcatcggacgccctgatccccgtcaactcgaacgtgggcttgctcggctccggaaagtcattcagaagacgctcttagcgcgaagaacgcggagaaggccaaggggctcctgaatggtcaatgacggaaacagcgtcggaggggagttgagtctgtgaacgattctcgagccgcacgactcggtgaggcatcctatgcgatcacagctgaggtggctcattgtgcgtcaactcccgagggatactgcaatctcctcgcgccagggccttcggaagaaagctggtcgtcagggttgagcacgcggcatgtattgagtgagagacgcccacaaccgatgcaccccactagttctttttcaagacgttcaagttccctccgccgcacctcaagtcgttcatgccaacgtttggagattctgtgccagtcggtctttcctggcatccgattctcagggagtgagtcgaatactcgggcgacttcggccagtggaatgccgaaacggcgggcggcggtgatgattccgatccggcgaagcacataacgcggatacctgtctcttccctgagggctgctcgtgcgggtgcccgctcacgtcgatgcgacaggagcagcggtgagcttgtgtccgtccaacgcaaagaggtgtccgctatcggcaaccatcactgcgtagcgtgaactaaggtacgcctaacttggccgccggtcgtccttccccggagacacccgatcacgtcctgagaggtcccatgtccgttctgcgtcacaccagcgcgctcgtcacactcgccacattggcccttgtggccgccggctgctcgtccacacccgactcgagcgcagcccccgacggggcggcggcgacggaatcgagttaccctcgcacgatcgaacacgcgttgggcgacacgacgatcccggagaaaccggagcgcgtggtgacgctgagttggatgaaccacgacatcgtcgccgcgctcggcgtcgtcccggtcggcgttcccgagacgtggggcggggacgaggagggcttcaccccgtggttccgtcaccagatcgagaacgagctgaacgcgcagatgccggaggtcatcaacgtgaccgaggacggccctgactacgagcagatcctggccctccagccggacgtcatcatcggcgtgtactccggcttcaccgagacagagtacaagcggctcagcgagatcgccccgaccgttgcatacatggaacggccgttcactgccggcacctggcaggagcacaccgagatcatcggtaagatcctcggcgaggaagacaaagccgccgagctgatcgaacagaccgaggcagccatcgccgaggaagccgcgaagtaccccaacctcaaaggggcctcgttcctctacagcacgaccttctcctcgggggcaacggagatcaccgcctatatcagcgaggatccgcgcgtgcggctgctgcacgagttcggcatggtcgacactccgcagctcgctgcgaagaccgcagacgtgccggcggacacctggtacggcggcatcagtctcgaggagctcgattcggtggaggcggatgtcgtcctggcgtggtcgtatgccgacgccgacaccaagcacacgctcgagcacccggtcttcaaccggtgggacccgatcgcgaacggccgctacttcatcgccgaggacaacacgctcggcatggccaccagcggtcctgacgtgctcagcatccagtgggcgattgagcagggctacatcaaggacatctccgcggcgatcgacggtggcgccgtcgtgcacacggctgagtgacacggtgtcccaggactcctcccatcgatccggattcgagcaggtgagcgtcccgacagtgacagccgcccgtgcgctcgaggagcgggcggcaccgtccggtgtggcccgctccggggcgtttcgactggctggtctcggtgtcgcgactgccgtgcttgctgtcgttgtcatgctcagcgttggcgtcggagctcgagctatcgcactgccgacgatctgggacgcgctgtgggcgtatgaccacacgatcgatgagcacgtgataattctcgagctgcgcgtgccgcgcacagtcgtcggcttggtcgtgggcccggcgctcgggatgtgcggggcgctgatccaggcgtacactcgtaaccccctcgctgatcccggcatcctcggcgtgaatgccggggcgacgttcgcggtgacgatggcggtcgggttcctcggcatcgccgcgccgctgggctatgtctggttcgcgttgctcggcgccggcgctgtcacgatactcgtgtacgcgcttggcgccgtcggcggcggcaaagccaccccggcgaagctcaccctcgcgggtgtggcgatcagcgcagtgctgggcggcctcaccaccgcgatcgttctcggcaaccgcgatgccttcgacgacctccgattctggggcgtcggatccatcggcggacgacagctcgacatcgtcttctcctttgccccgctggttttattcgggcttctgcttggccttggtgccgcccgtgcgctcaacgccctcgccctcggagacgaactcgccgcctcgctcggcgttcgcaccggccgagtgcggatcatcgtgatcatcgccgtcaccctgctcgccggcacggcgaccgcgctaacgggaccgatcgggttcgtcgggctcatggtcccgcacgtcgtgcgctggttcgtcggtcccgaccagcgatggatcttcgcctacacgttcgtcgtctcaccgattctgctgctgctgtccgacatcctcggacgagtcatccttcccagcggagaactgcgcgtagggctggtcaccgccgtcattggtgcccccgtgctcatcctcctcgcacgacgacgggtggtgagcggcctatgagcaccagcacccgccgccgcgccgggcgcgacaccttcgaccacggataccgcgcgatcgccattcgcgtgccccgggtctcgggagtcgtgagtgtgcgtgtcctcgctgtctgcaccaccctcgcactgctcaccctgatcctcgcggtcgtctccctcacgctcggcacctaccccgtacccctcggcgacatcgccgccgcgctcaccggcaccgccggcaagcagacgcacatgctcgtggtgggatggagactgccgcgggcactgttcgccatcgcctgcggcatcgctctcgccatcgccggcgccatcttccaaaccctcacccgcaacccgctcggttccccggacatcatcggcttctcctccggctcctacaccggcgcgatcctcgtcatgctcctgctcggatccacccgctacctcgacatcgccgcaggcgccatcctcggcggcatcatcaccgctgccatcgtctatctcctcgccacggtgggcggatccgtgcaatcgttccggctgatcatcatgggcatcggcgtcgccgccctgctctcctcgctcaactccgcactcatgctgtccaccagcgtcgacaccgccatgctcgccgccgtctgggcagccggatccttcaacgcactcggccacgaccagctctggcccatgtcagtgctcctgctcatcctgctcgccgccgtgacgatgctcgccccgggcctgcgccagctcgaactgggcgacgacgccgcccagtctctcggcttgcgcgccaatcgaacccgcgcgctctccgtggtcctcggtgtcgccctcactgcgctcgtcaccgctgccgccggccccatctccttcatagccctcgccgccccacagatcgcgcgccgcctggtgcgcggatcggggctgctgctcgtcccatcggcgctcgtgggcgcattcagcctgctcacctccgacgtcctcgcccaacgtatcgggatgcccgtcggagtcgtcaccgtctcactcggcggcacctacctctcttggttgctgatttcggagttccggagaaaaacatgattaccaccagccctgccactcacaccactgctgtggacgcagtacgcgcggtcgccgtgcgcgccggatacgacaagcggatcatcgtcgacggcgtcgacatcaccatcgcccgtggctcctacaccgccataatcggccccaacgcatgcggcaaatcaaccctgctacgcacgattgcccgcgtcctcccgtccctcgacggtttgatcctgctcgacggagacgacatccaccgcctaccgccgaaacagctcgccacccggctcggcctgctgccgcaaacctccctcgcaccggacgggatacgcgtcgccgacctcgtggcccgcgggcgctacccgcaccagggcatgttcgaccggtggtccgccgaggacgaggccgccgtcaccgccgccctcgaagcgaccggcaccgccgacctgtccggaaggctcgtcgacgaactctccggcgggcagcgtcagcgcgtctgggtcgcgatggccctcgcccagcagaccccggtcctactccttgacgaaccgaccacattcctcgatatctcccaccagtacgggctcctcgaactgttcgagaccctccgcagccagctacgccgcaccatcgtggtcgtcctgcacgacctcaaccaggccgcccggtacgccgaccacctcatcgtcatgaaggacggcgcggtcgtcgcgtccggtgcaccagaccaggtcctcaccgccgagctcgtcgaggacgtctacgaccttccctgcctcatccaacccgaccccgagaccgggacacccctggtcatccctcgccgaaccgtccgacgatcgcttgctgactgaaacggccacttaccagggctctcagcgacatcacaccgggctcgttcaccccgtcgggaatcgcttgcccacgtccccggagaaatgtcgcgaggacgacgatagctgtccgtcaagcgaaaacagcgacggatagcgtcggaggtaagggttaccttatcccgctgaatcatctctactcgtgaggactgtccatgctctctgcctcccgccgcgccgcgctcgccgtgctggccttcgcccttctcctctccggatgcgcgtctgcgccgccgcacgcgggggccgagcagcgcgttttcgccgagccggaggacggcgcgtatccggtgacgatcgaccacgcgtacgggtcgaccgaggtcacaacccagccgaagcgcgtcgtcgcaatcggctggagcggcgccgatatcgcgatccagttcggtacggttccggtcgcgcaaggtaacgcaaccggaatcgagggcgactactacccgtgggtctccgaagcgatcgggaagctcggtgcaccccttccttccctaaacccttcgctcgagcgtggggaggtcgacctggagtacgtcctgatgcagcagcccgacctcatcgtcgccatcaactccggaatcaccgaggccgagtataaggcgctgtccgacatcgcaccgacgatcgccttcccctcggagccctgggcgaccacggtcgatgagcacattcagatgatgggtgccgcgctcgggcgcccgacctacgcgggcgagatcaagaaggagaccgccaaacgcgtcgccgacgtcgcagcccagcacccggaattgtcgggagtcacgtacctgcacagcttcctgccctccgacgacggacaggtcgtcgtcttcggctccgtcgacccccgagcccagattctcgaagctctcgggcttgagcccctcgccggaacgctcgaactgcagcgcaaggcaggcgaccccgccagcttcaccgtcagcatggagcagttcctgtcgctgagccccgatgtccacgtcgtcatctccgatgaggacacctggcgcgaagccgttgccgcgaacgccgcattccagagttgggcgcctgtgtcggacaaccgggtcgcactgatcgacgaccccgccaccgggcttgccctcgctaccgcgaccccgctcggcatcgactggggcatcgacgccatcgccgacaggatcagccgcgtcgttaccgagacccgcggggaaggaggcgcatcgtgacctccgatacgattcgggaggtgccacgtcaggtcgggctgcgccgcgtactggctccgttcgtcgttctggctctcgcgctgtctttgacggcgtgcggatcatcggcaggcgaccgcccgacctcagggcagcagccgggccgcttcccgatatccgtaacgcatgcgcacggcgagacgagtatcccgtcaactccagaacgagtggttgtcctcgggggcagcgccgaagacgcggtcgccgcgctgggcgtcgttcccgtcgcggtccccaaagaatacggcacgccggacggatatagcgattggttccgagagcatgtgactgtcgaactcggtgccgaactgccgccgattctctcgccaggaaaggacggtgtctacgacccggaggagatcctcagttacgccccggatctgattttcgcgccatactccgggatcaccgaatccgactatcagcggctcagtgaaatcgccccgacgatcgcctatgcgcgcacaccgtggacttacggttcgtggtcggacatcgtcgagctcgcaggcaccgtgctgggacgccctgagcaggctgcggaactgatctcacgaacgcaggcagcgatcgattcagcgcgcgatgcgcaccctcagctcgaagggaggaccttcatcttcggcgagtggctggaagacggtttcacggaccttgccgtctactcgccggatgacccccgccctacactgcttcgtgagttcgggatgactgacgacccgtccgtcgttcaggaagtcggctcatttggggacgactactacggctccgtcagcctcgagagactggatgcgctcaccaccgacgtgttcatcggatggtcgaactccccagacaagatcgcgcagactctcgcccatccgctgatgtcgcggtgggctccgattgccgagggccgctactactacttggaagacccggagcttctgatggcagtcactactccctccgtgttgagtgtcccctgggccattcagcacggattcctagatgacatcacgtccgcgctcggggccgatgcggtggtgcgcaccggcgacgaatagcggtcacgccgagcagtgaacgctggcgtctgccgcgacgtggatggtggagatgacgtcatcgtgaatgggtggaagcagacggtgtgatgtgactcacgatgatgtttcgcagtcgtcgcaggacctgttccagccgtcgagcctcgcagcgtccggtacagacccgaagaccggattccgtggcggacggatgggtgaggatcgtcctgagtggcgtgacggtaagaacctcccgtgccgcggtgccgtcccgaacccaccgcgtgacgagctccgccatgagtgggctcaccgccatggttgtggcatgaaggatcgcgtcggcgcgcgcgtgctgccgctccgggggcaccagcgcgccgacccgcaggctaggactgagcacacgtcgaacaacttcaccacgcaggcacacgcgatctatcagcactcgtcagcgcccatctcccggaggtgaacccgccacgagaagccgatgtgcgttcatgcgtcacgcacgcgtacacaccgtcggatacaaagccgatcgagccgacaagcgggccgccaggctggagagccgccacccacgcgtctgaaagctcagcgatacgcgagggcttcggcgctgtatcccttgctgctcgtagactggagacgcgcaaaagcagacgatcacaggtgggtgtgtttggggcacctcggctaccccgtctcgccatatttcgatccggtaatccccgcttttttcggcgacctcgtgctcgagctcggcgacgagggactcgggcagggggagggtgcgcacgcgcgaggtggaaacgtccgtcggtgacaggcctaatcggcgggcaaggcgattcgcgggcaggtcggggtcgtcgatgtcgcgatctccggggatgtcggcctccgcgaaaacgagcgagcggcaagcgccgacgaagcccggtggcgcgagcgcctcgtgggtagtccattgctggtcatcgccgaagtcgatggcgaggcctgcggtctcgtggccggggacatcgaacgggacacgggtgagccgatcctcatctcgctgtgggtcaatccgcgcttccgtggccgcggtgtcgcgaaggcgctcatcaccgaggtcgaggagtgggccgccgccgaacacggcgaactctcgctatccgtacgcgacgataacgccgcggcgcgcggcctgtacgaggacctcgggtacgaagttgtcgggcccacgccgctggccgatgatgagcatcccgaggtcaccatgcggaagactttcgagtcctaaatgtgactgaacgcccgacgaagggcaggcgaccggaaagtaaaacgggggataatagggggagattttctttccggaggagcaacgatgacgtcgcgcgatacccgcaccgcagtcgataaagccatggcgctcttgagggcctttggtgacgaagggtccgttggtgtgggagtctcggaacttgcccgtcggtgtgacctgtcgaagtcgacggccttccgcctgcttgggatcctcgcgaaaaacggcgcggtcgagcgtgccggaagctcctaccgcctcggccccatgcttttcgacctcgccgagccgcagccctcgccccatatcgacctgctcaacgaagtccttacgccctacctcgcaaaactttttgaggtgacgcgccagaccgtgcacctcgcggtcctcgccgggcacgaggtcatgtacctcaacaagctgcacgcccagttcaaagtctcctcaccctcgcgcatcggcggccgcgcccccgcctactgcacggccgtgggcaagatgatgctcgcctacgatcacgacgcgatggaacaggtgctcgcaggtgacctccaggcgtggaccccgcacacgatcaccgatcccgcgaagctgcgtgccgagctcgaggaaatccgcgaaacgaacgtcgccttcgatcgccaagaaatcatgatgggcctgaactgcatcgccgctcccgtcatgagccccgcacgcatcccgatcgcctcgttctccgtctccggacgcgtcggcgtgatggaccccgaacgctacgagcagctcctgcgcaaggtctgcttcgaggccgccaaggcgattgccgcgcgccggcgccgcccgctgccctaatgccggacctgtacatccagcccggccccgggaacccggacggcctcatcatccccggccacgagatcaccgaaaagttttcgcgcgcctccggccccggtggccagagcgtcaacaccaccgattcgcgcgtccaactgagcttcgacgtgcacaactcgggcgctctcacccgcacccagcgccagcgcatcatcaagcacctcgcgacgcgcctcgttggaggagtgctcacgatcgaggcctcccaggagcgcagccagctgcgcaatcggagtgaggcgcggcaccggctcgcggagctcctgcgcgctgcgctcatgccgccgccaccgaagcggcgcgccacccgctcgacccgcggctcggtcgagcgtcgtctcgcggcgaagaaaaaccgcgcggcgatcaagaagaaccgccagcgcccgccgcgcgacatctagattaaagcgaaactgttgaccggtactgacaggcgaggttatgatcttagtgactgattcccagtaagtttcacctcgtttgtgaaaccgaacgctccgccggcccttcggggccggttttcatttacagggcatgagcgatattcgcctgctagtcttcatttatggctgatctcctgccctatgtagtgggcatcgatgtaggtactcactcgattggcgcagtggccattgaggttgatgagaaaaacaatccgatatcgattctcaacgccgttgtccatatccacgactcgggtgtagatccggataagcgaaagaccgcggagtcccgactaaagacagccggtgtagcgaggcgaacgcggcgattgacacgtcgacgtcggcgccgtctgcagcagcttgatgcgctgttagagcatttgggctatcccttcccggatctggcagagcgaccagacccccacaccccgtggaaggtacgagcgcgcctggtccgcgagacgattgcggacgaacacgaacgtaaaaccgccatctcgattgctcttcggcatatcgctcgacaccgaggctggcgtaacccgtactctcgtgtggaatcccttctccatccggcagaagactcgcagcagcttctggacctgaaagagcgcgttaaagagattaagccagaacttgatctggccgccgcaacttcggcagaagttatcacgtccgttgacatgtacaacgtgaaattccgggggcctgagggcatgttgggtggaaagctcatgcagtctgacaatgcgaatgagatccgtcggatctgcgagatgcagggcgtaccagatgacgaggctcgccgactgattcaagccgttttcaaagcggagtcaccacgtggatccagtgcagagcggatcggttttgatgcccttccgggccagacacacatgcatagggctgcaaaagcacatccgtcattccagttgttccggatgctctcgatccttaccaacctccgaatccgggagggcaaaggacagacccggcgcctatctgtcgatgagctccaactcgcggtcggccatctcacgacactcaagccgaaggtggttcccatttgggctgatgtcgccgaagtccttggaatcgaacggtcgcagctcgtaggcaccgcgactccaaccgttgacggcgagcgggcggcggcgcgaccccccgtcgatgagactagccgccgtatgcaagctcatgccccaaagtccgtgaaggcctggtgggtggaggcttcagacgaggagcaggcaggcttcatcgagcaggtcaccgacggcatcccgagcgaaacccccgcagtccgggatttcttcgattcgttagatgacgacgatctagtggcgttagatagcctcacgctcaccggcgggcgagcggcctactcggtcaactcgctcgatcggctgagcgaaagaatgctccacaccggtgaagacctccatgaagctcggaaatctgtttttggagtggacgatgactgggcgcccccggtcccgtccatcggggaaccggtgggaaacccagctgtcgatcgagtcctacgccagatcgcgcgatggctcctcgccgtcgaaaagcgttggggcgagccaaagagcatcaatattgaacatgtgagggacggtttctccagcgaagcggtctcgcgagaactggaccgccagtacaacaagcgaagagagatcaacgagcgctacgcgaacgacctgaaggaacggcttaacctctcaggtcctgtgacacgttcggacatcatccgttactcagcagtcgagcggcagaactccgcatgcgcctactgtggacgcgagatctcattcttcaacgtggaactcgaccacattgtgccgcggcgagggctcggcagcaccaaccgccgcgacaacctcgtagccgtgtgcgaacgctgcaaccgctccaagaagaatatcccgtttgtgacctgggctgcaaaagcagatatccccggtgtaagcctcgaagaagcgatctcccgggtgaagttctgggtgttccctccggggcagatgaacgcgcaacagatttcgtccttcaaacgagaagtaatcgcgcgactgaaacagcgagacttcgacccaccgctcgatggacggtcaatggaatcggtcgcatggatggctaatgaactccatgggcgggtcaaagcgcacttcgcaggggccagtgtccgagtgtttaggggcagcattacagctgcggcacgcaaggcatcgggcctggagcgccagatacgtttctttggtgagcggggcaagactcggttggaccggcgtcatcacgccttcgacgcagcttgtgtcgcgatgatgcgtccgaaggtcgcagagatcctcactattcgctcgaatctgcgggagtcacagcgactgtctcgggaaacagaaacctggaagaactactcaggtgccgatgctgccgagcagttcatttacgctaactggctggaacagatgcaggccatgggagatctcttcaacgacgcgctggacaaggaccaggttgttgtacgagagaatctgcgactgcggttggcgaacggcgccgcgcacgatgcgactattcgcaagcttcagcggaagtttctaggagaagaattctcagtcaacgagatcgataaagccgcgacacctgctctgtggtgcgcgctgacacgccatccggactttgacaataagaatggactggtggcaaatccagaccgtgtgatcagggtcaatggaacgactctgcgggcaggcgacgatgtcgagttgtttgcacagaacagtgcgtcaatcaaggtccgcggcggatcggcagaggtggggaactccattcaccacgccagggtttatcgaattgataaaggcagtcgagcccccgcctacggtatggtgcgagtcttccaacaggacctgcttgcacaccgtcacgatgacctcttcactactgaactgaaacctcaatcgctctcctttaggtacgcggatgccacagtgaaacgtgctatctccgaggggagagctacctatctcggttggatcgtcgttggcgatgaaatccgtttggatgcgagccaagtcgcggcaggcaagatcgctgagttcatgaaggagtatccgaccatacgttcatggaggctggatggcttcttctccaacagcaagcttcgtctgagaccaatactgcttgctgcggaagggctcagcgagaatgcgtccgaggcatcaaaggcaatcatcgaccggcctggttgggtgcctgcagttaacgttgtgttcgggcaacttggtgcgcaaattgtacgccggacgactcttggagagcttcgcactcgggaagtttctggaatgccgatttcatggtcggtgtgatgtggcagacgcatggcgggtactggatttttccgaattctcaggccgagtgaggggtactcatggtggaatcgaggtctcaaaccaggagcggacggtctatgtgccgacgatcgacgtcgctgttgtgctatttggagtgggaacgactctgagtgcaggcgtactccatcgactcatgtcaggagggacttcagtagtcttctgcgattggaagcgcgtccctattggagcagcctacggatggtctcatcacggacgagtaggagcgcggcagagatgccaagcgactctttcagctccgaggcagaagcatgcatggcaacagctagttaaggcgaagattgagggacaggccaataaccttagaaactggcatttgcctggcgcacagcaagtagcttctctgagcgctcgtgttcggtcgggagatccagctaacgtcgaggggcaagggtcaagtcccttgtagtggtgtaacggcgttttcctctcgtttggggttttagcttgctagtgcgggcgtgtcggtatcggtcatggtcgt

SEQ ID NO: 4406 - DNA, 24839 bp, synthetic construct
  source 1..24839: mol_type = other DNA
  misc_feature 1..24839: note = Synthetic
gcgccgagcgtcaacaacggaaaactgtcgcgcccagtgccagcgccgatttcaagaattttcttccctttcacgtcggtaactttgacaagattccgtacaacgcgatcggagttggaatacacttcggcaacattatgcttttcagcccaaaaggtttcccagtgttcaagacgcgattctttcataccctctttcttaaaaaataaaccacagagtgacagaaatgttgtgattccaatctgtgaatctgtggtaacaacaacggcatgattatttttttacaatagaatctttagacgaattcttcatcgccagccgggcctgcatctgtgccttctgcatattgacccactgcggcaatccttgcacggtaccatagtagtcggcgttgatcttatcgagaatcgctatggccttatcatattcctctcggttttggtacaaggtatacagcatatagtatggatgatactgattctggaacggctcagtgacaggctgtttaatcatctcttccagttttgaaatcaatgctcgcgaaacattatcatagcgttctttattgccggcgtaaaaatagaaattcgtaacatcaaactccacgcggtaatccattggcagaacattagtaggcatcgttgccatcatcgaatcgagcaccgccaccgccattgcattgttacgttccacattgagatagtgaagagccaaccgcatgaatgcgttgcggtagttcatcaccaaccgcgttacattttcgtcataatgaacggtggagtcctgcaaaccacggaagagatatccgcgctgaaatgttttgctgatctgtgacggtttgttcaataaatttgctccaagaatttttggatctattactccttcgtctgttggagcagggtagggaataagtttcattgccaatccgtccatgcggaagtagcggtcgagaccgattttcgcatcaggcgttgatgtaaccgccatgtaaatcggccgttcccagttgttcgtgcggataatatcgtacgccatgatatcctgtgcacgaatggctttaatgttgccaaattgcatagtgtttggcataataaatttaatttgtcctgcttttgccgctgtatcaccgccagattgcggttgcaccggacgatcggaattgaacatttcatactctttcatgacatgagcaggtactggtaaagttaattcccgcggttcccactgcatgggtccaatctgttcaatttcctgatcgctgaggctgatcgggactttctttgctccgtatggcatttcgtgctttaactgcttgatgtaccaggatgtattgactaaactcaggtttacaattcgtacatcacgccgcacaccttcaacatcctgcaagtaccatagcggaaaagtatcattatcgccattagtaaaaagaatggcatcaggttcgcaggtttgcagcaggttgtatgaataatcccacgcaacataatcacccgagcggtcggatggcttgtaatttgtgtagagcatattacccggaatcgcaacaaatagaacaagaagtactccgtatgttgcgaacttttttacctgttcgttcttcagcgcctcttttatagaatcaacaatacccaatgcaccaataccgatccacaccgaaaagacaaagaatgccccgacataaaagtaatcacgttctctcggctgcggattttgcatgttgaagtaaaatgccatcaccacactcatcagcaaaaagaagttgaagaacacccaccacatcactctatcttttttgtaatggtagtaaaatccaaatagaccaacaaagagaggaatgccccacagttgtttccaattaacgcctgcgccttgccaatcgccttcacgccctacgtactgccacaggaaatagcgaagtaacatttcatccaattgataacgcaagaaataatcccaatcgcttttatagttggtgtagatgccttgatgttgcggttcctgactccaccgtcgttgcattagtggggcgtcaccgtactgttcgcggttgaggtacgaaacgagtttttccaatgtgctggggtcattttcattcatcggcgggcgggcgttggcacgaataatgaccattgtgtacgttgaatatcccaatacaatcaacagaaacgacatcgacgccagatgtagcatctcgtttttgttttgaagagagcgccagacaccgtacactgcggcggcgataaccgccaaaggaatcattgtccagaaaatacttttcgtttctttcccgctgccgatagcatactttccgtcgagtaaattgggaagttctttgacaataccgggatagacaacggcaaaaattccgatggcgatcatcccgaagatgatatagttacgaattgaaaattcgtaccgacggaaaaagacaatgatcagaaacggaaagatgaccaacaatgccaacaagtgtacgccgagagacaaaccgatgagatacgcaatgagaaaaatatatttttggtgcgatggagaatctgcccgttcattccaccgaagtgccagccatgtaaccagggcaacgaacaacatactcacgccgtacacttcagcttcaacagcgttaaaccaaaacgtagcgctaaaagtgagcgagagcgcccctattgccgcagcgccgtacagtgttattttattccacgcatcttcggtgcgagggcgccagagaataatcaattttaccaacgaaagatagagaaacatcaccgtcaacgcgctcgatagagcggaaataaaatgcacacgcactgccggatcgctatagaacggtatcattccaaaaatttttcctactaacaaaaacagcggtgagcccggtgggtgcggtacttgtagcaaataagcggcagcgataaactctccaacatcccaaaagacaactgtatctgccagtgtaaggatatacacaactaacgaaataaggaaaactattccagcaacgagtttattcagtttggtatgctccatgtagaacctctgaaataaaaaaacattgacaaaaagtaaatcaatatactttgaaagtggcgattttcaaaagaaattctatgagttctgtagcaacgtcgttttatccaacaatcttacatcataagtcttcttgcgatctcatcgcacacggcatatccttttcctgtcagcgcaataacgttgttttgacgccgtagcagtccattccgttccatttcatcgagcagaactgtgttttgttcaaaaaggtcattgccaaacagttgtttcactttcgtttcatcaattcctgcgctgcgcaaaccgagaaaaatctcttccgaaagaaatttttgcgaatcaacttcttcgtttccgactacaggaaactcaccgcgttctatcgcatcgcagtagctttgaatactgcgcacattccaccaccgctttcccgttaccgttgcatgtttccagaatgaatgagctgatggaccgaacccgatgtaattggagtgattccaatagttgatgttgtgccggcattcatacccaggcagagcaaaatttgaaacttcatattgacggtagccatgtgtagtcaacatctctatagtaatctcataaagcgcggcatcttcttccggaggaagcggggaaacacggttctctttcaccatcgaagccagcggagtattctcttcaacaattaaggcatacgctgaaatatgtgttggttgcagcgctatcgctttcctcagattctctttccatcgctcaggtgtctggttcggcaaagcaaagatgagatcaatatttacattgtcaaagccggcgcggtatgctttctcaactgcccgttgtgcttcgtccgaagagtggatgcgcgtgagaaatttcagatcatcgtcaaaaaatgattgaataccgaaactgatgcggttgaaaccgactctacgaacgtcattgagtttctgctgttctactgtgccgggattactttcgcaggtgatctcagcgtttgactcgacgtggaaacatttgtgcaaaagatgaaaaattgtctccagttgttttggtgataacaacgatggtgttccgccgccaaagaatattgtttcaatagtttcttccgaagcaaactcttctgcgcgtcggataatttctctctcaagcgctgaaagaaactgctccatcgaagtcatattctcaatggaatagaaatcgcaatagatgcatttatgttcgcagtacggtatgtgaatgtagagcgatgccataacgtttatttcaccaccgttccgattctttcccagcgaattccgtcggcatttcttgcccagtaaatcatcattgctttgccaatgatgtttttttccggaacacaaccccagtgtcggctgtcgtaactgttctttgcattatcgccaacaacaaagtaataattcattgtaacagtatatgagtgtgtcggtacatcattcacaaaaattgtattgccattgcgcgtaacactgtttccttctcgttgaataaacacggtccactgcggtaatgtctgctcgttgagttgaactgtcattcctttgtatggaacaataatccgaaacggcacggtatcaaactgggaaaacgaatttacagcgcggtagccattcacaatgagatgtgactgcgctatttcaactgtatcaccaggcagtcctacacaccgtttaattaacaagcgatggccgatagggtacacctcggttggctcacccggaaaattaaagagaacaacatctccccattgcacggaagatagtttcggaaagtgaaactgcggtaaggcaaggaagaggaatcgttcaggcatgcgagcgccatagataaatttgttgatcagcacataatcacccgcttgcaatatagatgacattgaatcggtcggaattttcacagcatcaacaacgcacgatttaacggagaaagcaataagtattgtgaagaacagtacggcaacaatatcgcgaactcttttccatcccttgttactggcgccaatcatacacagccgagaagctcttcttccaatttattaactgatgacattaccaatgcgatgaaattggatcatttccggattgaagatgacaagaaaaactttcgcaacaaaatcaagaacaaggttatgtcctgaaaatgttgtgtaaatccattccatgcgcatccgctctccctgcatagcaagtcggcccgcatattcttccgtacccatcaccgagaaatagacgaacatgggcgtgccaacaacatagtcgcgcggaatgaatccccaaaatctgctatcaagcgagttgtcacgattatctcccatgccgaagagataatctttttcaacaacgtatgtatttgttttaataccgtcgatcaacaccgtgccatcactcaacaacgtcggcaggtgtccgtctcgtttaataaatgtttcccattggtggaagtttgcagaagttatttccatcttcattccttttttaggaatcacgattggaccatagtgatcctcgttatacggcgcgccgggaggaaaaattctcggatcggcatagcccggaggttttggaggaaggttgaatttcatgtttttcggcagtggcgccggctggccgttgacgtacacaactctgtttctgatttccaatgtatctcctgccaacgccatacaacgttttaagtaaaacgtaaactcttcaggatttacttcatccctgtaaccgggaaattcgaagacgatcacgtcgcctctttttacatctttaaatcccggcaacatcgtccatggcaaccgaatatttgtgaacatgatattgcgcggagtcgacgcaccatagatgaacttattgaccataagaaaatcgcccgtcattacttcgttttccattgaaccggtcggcaccagaaaagaggcaatgacgaaattattcagcagtaaaaatcctccgaagacaataacaaattctttgatttgatgtttgagtttttctttgaaagttttcggctgctctttcaattcgtcttttgtttttttctcttcctgctttgccatagattaaaatcctataggatgttttggtttgtgttcttctactttacaaactacagcacaaattgcatactcttaatcttgaaatcctgtaatcgtgaaaatgtggtatcgttattcctctcccatctgcaacacggcaagaaatgcttcctgtggcagttccactttgccaacctgcttcattcgtttttttccttctttctgtttttcaagcagttttcgttttcgggaaatatcaccgccgtagcatttcgcaagaacatttttccgcaaagccgaaacggttgttcgcgcaatcaccttactaccgattgccgcctgaattgctacttcaaacatttgtcggggaatcaattctttcaatttcgaacagagcttctttcccatttcgtatgacttatcccgatgcacgatggttgaaagcgcatctaccggctcaccgttcagcaaaatatctaactttaccaaatcagattcgcgatagtcgagatattcatagtcaagtgaagcatagccgcgcgtaagagacttcaatttatcatagaagtcgaaaataatttccgacaaaggaaattcgtatgaaatatcggcgcgagtcgggtcgaggtaactggtgttcttccaaatgccgcgtcggtccatcgccaatttcataatgttgccgatgtactccgtcggtgtaatgatttgcgctttgatgtacggttcttctatatgatcaatcttcgatggatcaggcatttctgccggattatcaaccgttacaatttcgccgttggtcagaacaactctcaattcaacattaggaacggttgtaatcagcgattggtgaaattcacgttccaatcgttcctgaataatttccatatgaagcaatccaagaaatccgcagcggaaaccaaaccccaacgcactggaggtttccggaacatagaccaacgacgaatcgttgagtgaaagtttttcaagcgagtcgcgtagttctgcaaagtcatctgcatcagtcggatacaatccgctaaagaccattggctttacctctttgtaaccagccaatggctcgttggcgccgttatgtagagtagtaatcgtgtcgccaacttttgtatctcgaacgttttttaatccggctataacatatccgacatttcccgcgactaattcaccggtgcggtgtcgctccatatacaacacgccggtttcttctacttcagcaactgttcctttgttgataaatttaattttgtctttttctttcagcacaccatccaccacccgcacgtacgcaatagctccacggtatgaatcaaactttgaatcgaaaatcaatgctcgtaatggttttgtcggatctccctttggcggcggaattttggtaacgactgcttctaaaatttcttcgataccaattcctgcttttgcactggctttaagaacatcaccttctttgcaaccgattaaattcatcacatcatgcataaccgtatcgatcattgttgcggcagagggaaggtctattttattcagcacgggaataatctccaaccccgcatcaatcgccatatagagattgctgagcgtctgtgcttctattccttgagacgcatcaaccaccaaaatggctccttcgcacgcggctaacgagcgagatacttcatatgtgaaatctacatgaccgggagtatcaatgagattaaggatgtaagtttttccatcttttgctttatactccatttgaatggcatgcaacttaatggtgataccgcgctcttgttccagatccatatcatccagcacctggtttacaaccaaatcgcgcttcgtgatgcggccggtgtattccaataaacggtcagccagcgtggatttgccgtggtcaatgtgagcaataatgcaaaaatttcgaaagttgtccattactcttaccagaaaccagaatatatacctacgaatgatgagggatgaagtgcgaaagttttcttcttctagttattcttcgtcattcgttcttcatacgttgaaaacaaaaatccccgccgaaagtaactggtggcagggcttttcgcacaacaaaatactaagaataggcaggaagtgcaagaaatggaggttgaacttgcaggaagattttaataggttgaactttgtttgtctttctggagttctataacacaagcgcactgtgcccgaacatcaaccattacataagaataatcgtatgtctgccaatgctcagttttttgtatggatcagcattatgttggtcacacttagtgtcggtttcctctacatcggctggcggctgattgtaccgtttcacctgcaaagtccctacaaacaaatagcgtggattggacttgccttcatgtatctgattccgttcagttcattcttcctcattcggtttgccgaagagtggagcgatgcgctatcgtggattgggtatctcagtctgggattgctttcgtttctcttttcattgttaattattcgcgatgcggtgtggttactgatattcggcggacaaaagatcgtttcttttcttttttcttcaccgccgtttgtcgatcagacaaagagagagtttctgttacaagcaacaaaccttggtgttatcggaattgccggaacactcacggcatacggtgtgtacgaagcgcgccgcaaaccagaaattgtttcacttgatattcctatcgcatctctgccaaaagaatttgacggattcaaaattgttcaaatcaccgacattcacgccggactaaccattaaacgcgactggattgaaactgttgttgaagaagtaaacaaactatcaccagatttacttgctttcaccggcgatttagccgacggttccgtacgtcatttgcgtaacgatgttgctccactggctgaacttactgcaccgtatggaaaattttttgtaacgggaaatcatgagtactactccggggttgaacaatgggtacaccatgtgcgtgaacttggctacgatgtgttactgaacgaacatcgaataattgcaaaaaacggttcatccattgtgctggcaggcgttactgactacagcggtggtggattcatgaagtcacacacttctgacccacacaaagcgctcactggcgcaccgactaatacgacaagaattctcctggcgcatcaaccgcgcagtttgtatcaaacaaacggtctctatcttgatcttgtggtaacagggcatacacacggcggacagttctttccgtggaatcttgttgccacaatcggtcagccgtttattaaaggattgaacaagtggggagaaaaaacctggacgtatgtgagcaaaggaaccggttattggggtccaccggtacgcgtcggcgcacgctcagaaattacagtgttgacgttgaggaaggggtagagattttcataaacttttgtgtattggtaaatatgtttgtattggaatagactgacaacaaaatttattgctaaaatctcagctttatacataatagcattattcagctttctatcgctaacttcgctttattgaccttttctaattttttttgtacttcacagctattgtttatcgcacaagttctgtaattccccttttagagtcagcagaatatagagagttctacttaaaaaaattatcagcacttaaagtataaccgacctgtgccttctattagcattagttaaccagagatttcttgctcatttaagtttgtacaattttttggtcgagcgcgggaaaagttggatggtttatcggaagaataaaaaatgccccgctaagtgcgaggcgaacttattgagcaaagctcactacggaataatccttattgtgatttgcttcagtaaaaatttaattgacaaatttatcattgtcaaggaggaaatatgaaaactgttcttggattagatataggaacaaattcaattggtgccgcactcatacaactacccgaaactcttcaggattatggcacaaacggaaatatcaaatggattggaagcagaataattccggttgacggggaatatttacagaaatttgaaagtggtgctcaagccgaaactaaagctgcattacgcagaatgaaacgcagctcaagaagactaaagcaccggtacaaactgcgaagaagtcgccttattagtgtgctaaaaatactggaatgggttaagaatgattttccgctcgataatccaaaacaaatcaagaatatcattcgcgaaaacaatggtaagtttcaatttaaaatcagcaattatttaccctttagcaaagaaactattgatgaggcaacagaacttttaggtgtgaaaggcaaaaaaaatgaaaagggtaatattattatacctgaggactacattgtttattatctaagaaaaaaagctcttactcaaaaaattactgtgcatgaatttgcgcgtattctttacatgatgaatcaacgtagaggatttaaaagcagtcggaaagatctaaaagaaacatctatcctaagttacaccgacttccaaaagaaaaaagaagacattgatgccggaaaatatcctgaatacaaagaaggaaacggcgaagaacacaaaactcaatttgtatcaattacacgtattaaatcaattacgcaagaaggaaaagaaaaagacaagaaaggaaaatttacttttcgtgttgaaaccgaagatagtagagttaaaccttggtttgtaaaacgtgaaaaaaaacctgaatgggaagggaaagaatatcggtttattgttgaacaaaaaataaacaaaaaaggtgaaataaagcaggatagtgatcccaaaatgccaaaaccagatgactggaatttattaatggtggctcttgataatcaaattgatgaatcaggcaagcaggttggagagtttttttgggacaaattggttgaattctcgaagaaaaaagaggtgtacaaaattcgtcaaaatgttattcgcagagaaaaatatcaaaaagaattgcgagctatttgggataagcaaattgaactacgaaaaaaagaaggaaccgaagaagagctgcttaattcaaaaaaaattccactcattgcctctgaactctataaccataatcacgttaaacaaaacgaattaaaagaaagaggcttatatcatatacttgccaacgatattatttactatcaacgagatttgaaatcacaaaaaaatttaatttcagaatgtcgctatgaaaaacacgtcggaaaagaaaaaaattcaaatggagaatttgtaacaaccggtatttatggtttaaaatgtgctccaaaatcaagcccagaatttcaagaatttagaatttggcaagatatccacaacctccgtatcctcgaacgcgaaaaaataatcgacaatataaaaaaggttgatgtagatgttacacaagaatggattgacgaaacaacgaaggaaaaactttatgaacttttcgacaacgaaacagaaatcaccgaaaagaaaatctttgaccttattaatagtattaaacccgaagcaaaactgaccgatgaaacctatagaattaatctttttactaaccgcaaatcactaaagggaaatgaaacaaaaagtttatttagaaagatatttaaacaaactagttatagtactgaaggcgaaaagcttttgcagaataaagactctttgtacaggttatggcacattatttattcaatatcctcatctgatattacaaaatctaccaagggaatacgaacggcgctaaaatcgttcaacctacccaacaacgtagtcgatgctttcaccagaattgaggaaataaagaaagaatatgctgcgtattcttcaaaagccattaaaaaattgctcacggtaatgcgttgcggcaagtattggaattggcaagaaattgaacaaactgaaattaaaactccagaatcacctattgacaagccggaaaaaataaaattatcagaaagaatagacaaaattattgatgacggttgggagcgggatattaaggtggataaacgaacgggagaaattatcaatgagcgtcagtttaaaaaacgcgaacaattctctggtttacctgtttggttagcaggctacattgtgtatggccgtcatagcgaacgtgaaagcaataagaaatttacacaagaagaaattaaaagacttgatatcactaatcttgtaccacataatagtttacgcaatccaattgttgaacaagtcgttagagagactcttgcagttgtaaaggatgtgtgcaatgagtacggacagcccgatgaaattcatatcgaaataggaagagacttaaaaaagaacgcagaacaacgacaagctattgcagagaataatacaaaaaaccttgaagaaaaattacgtgcaaaaaaactcttacaagaattgcttaatggtgccttcgaacattacgatgagtatggcggtaaaatcaaagcgcctttttccgttaaaccaaaccccaacagtcctatagatattgaaaagtttagaatctaccaaagccttgcacggtttgaatttgataagaaagaaaataagtcagaaaaccaagtacagctcgatgctcttttccgtgaaggtaagaaagaacgagttccctctagtgctgaggtaaaaaaatacattctctggctatcccaaaaatgtatttcgccttacaccggtaaaattattccgctgagcaagctttttgacgaagcatattacgaaatagaacacattattccccgttcaaggatgaagtacgatgcaacagacaatctcgttatctcagaaacaggtgttaacaaggcgaaaggaaatgaacttgcagcaaattttatcgctaaatgcaacggcaaatgtgaatatggaggaattcaatacgaactgctcacctatgaagcatacacaaagcactgcgaaaacacctttcgtagaagcaactataagaagtataaaaatctaatggcaaccgaagtgccaaaggattttattgaacgacaaattaacgacacacggtacattgggaaaaaacttggtgagttacttttcccgtttgcaaaagataaagaaggcattgtgtttacaataggaagcattaccagcgaactgaaagcaaattggggattgaacaaaatatggaaacaacttcttaaacctagatttgaacgattggaaactctcaccggtaataaatacatgttccaaaatgaaaaagatcaaactgatatcgtattcgatgtacctgaagtaagagactttgatgctaagcgattagatcatcgtcaccatgcgcttgatgctttggtgattgccgcaacaacgcgtgaacatattcgctatctcaactcattaagcgctgccgataccgatgatgaattgaaaaaagtcaaacgcgctttagtaaaaaagaaaattagagaatttgaacttccgtggaaatcctttacgcacgatgcaaaagaaaaactaagcgaattggttgtgacgtttaaatccaacaatcgtattatcactaaaccttttaaccgctattggaaatggatagaaacaaaagacggaatttttgaaaaacaaaccgttattcagtcgcccaataaacggtggttagctgtgcgcaaatctatgtttaaggaaccacaaggtattgtttggataaaagaaaaacgtaaagtaccaataaaagaagcattccaaatccaaatagaacgtatgcaggttgaacatgacaaagaaaaaagaaaaactgcttcttacgtttatgatcagattgctcgaccaataataaaagagattatcaataaaacatcagaaatcgctggcattccgttaacaaaaactaatgagcttcttgcagcgattgagaaaaactatttgaagaagaatgaaaagaaaacctcctcaggcaaatgttattccttggaaggtaaagaatatgaaaaaatagaaattgcagagtttgttatgtacaaagctaaacgcgttccacttgatagttcgtttaaccataaaaaaattgataaaattccttattcagcaacttctagaatacctactctccttcacaatcacttacgtgaatacgaaaaaagagggttaggtagttcagaagctttctcaaacgaaggattagaactactggcaaagaagaataacaatatgcctattacaacagtaacaatattagacggcgagttgaaagatgagcatttcgataatttgtttggaaataaatatatggaatcggatgccggttcaattgcatactttataatctacgaaaatgaaacaaccaaagaacgaactgatatgtactccctctcaactcataaagctattgagcgtatcatacaaggcaaacctattgccgaagaacgagaaggatacaaaactattattctttctcctaatgatctggtctatgtcccaactgaaaacgaatggaaccgaatcaaagctggtgagaaaaatgtaattgattggagcaatacaaaagctattagcgaaagaatttacaaaatggtaaaatgcactggaaagcaatgctattttattccagcaaacatttccaaacttattataccctacgatagcgataataaaattggtgaaattgaaagtcagaattgttctgaaaatacaatatttgatgaagaaaaaatttcgataaaacagaattgtattaaacttactgttgaccgacttggcaatataacaccaatgttatgataaaacgcaccattgccataacacagcgcgcgtatgtttccaccagcaacaaccagttgctcatacggatagatgaaacagaacattccgtaccgattgaagacattggcaccgtggtggtagaaagccatcaatgtaccattacacaatcggcaatcagtgcattactggcaaacaacgccgtcatcatcagttgcgactcacagcatcatccagacggtattatgcttcccataagcggtaacattcttcacactgcaatttttcgtaaacagcttaccgcttcgcggccgctacgtaattcgttgtggaagcaaaccgtgcaacaaaaaatccgcaaccaagccgctcttttaaaacaactacaccacaatgaaacgccactgttaacaatggcaaaaaaagtagtaagcggagataaaacaaacgttgaagcgcgcgcatcggtgtattactggcaacatgtttttgatgatccgcaattccttcgcgatccggatggaccaccgccgaacaatctgttaaattacggctatgcgattgttcgtgcggcaatagcgcgggcgcttgttgcttccggacttcatcctgcttccggtatttttcacaaaaaccagtacaaccccttttgccttgccgacgattgtatggagccgtaccgcccttacgttgacgcacatgtacatgcgttgtggaaaaaaggtattgctgaactgacacccgcagtaaaaaaagaactgctttcgcttttagtaagcgatgttatgatggatggcgagcgaaaaccgatggaacttgcagtggcaaaaacagcaagcagtattgcgcaatgtttttgcaaagaacgaaaaaaaattttgtatccgcagttttaaaacccttgaagggttacttgaatttagcagtatttctcttccataagcggaaacaatttatatagataactcattatctaaaaaacccttcaagggtttgggaagaacatgctatgccagcactgccatttcctccattagagccagattgttcctatcacatttacaaccgcgcaaacggaaacgacaatatctttcgagaacatactaactatgaatactttttaaaactgtactccgcctacattcctccaattgccgatacatttgccttctgtttaatgccaaatcactttcactttgcagtgcgagtaaaaccggagaaagaactggtaaactattatcaaaagaaaggaaaagcacttgaaagattacaaaccgttcatgcactcattgaatataacagccaacaatattcaaacctgtttaatgcttacgcgcaggcattcaataaaaaatacgccagacgcggcggattatttatcagcaactttaaacgtaaaaaagttacttctataaactatttgctaaaccttattcattacatacacaacaatccggttcatcatggttttgtcaacacgatagacgagtggaagtattcatcttatcacacactactttctaacaggaaaaacattattagcgagaaaagagacattggaattttttggcggctacaacgagtttaaggagtttcacgtacgagaacttgacaaagagtttttgcagactattgaatttgaatgactgttctaaacccttgaagggttgcttaatttcttttagttcagactgtcaacagtcaaaatgctaaccaactgacaagctactaccacatcagtaaacccttcaagggttaactggttgatgaaataccatcattatgcgactaaacgaatatagaattatgtggattatggtcttcttcgatctgcccacagagacagatgctgataagcgcgcttatctaaaattccgaaacaatttgctgaaagacggttttcaaatgttccagttttccatttacatgcgtcactgtttcagcaaagaaattgctgacgtacacaaaaagagagtgcaaagttttttaccatcaaaagggaaagttggaattttaggagttaccgataagcagtttggtatgatggaaatatttgaagggcgagagaaagccgaagtaaaaccgccgccgcaacagttagagttgttctaatttccggatataaacaaaaaagtcccgtctaaaaacgggacttttttattgtgtatttctttgagtaacgttttatttttcaatgggttaagtaaaaatctattcaaagaactatacccaaagaaaaaatcgaaagcaaatcacaacccgaagcgcgctaaagttcgatcctcaacaattcaaagaactatacccaaagaaaaaatcgaaagcaaatcacaacaaacgatccgaactgcttcaataaataagaattcaaagaactatacccaaagaaaaaatcgaaagcaaatcacaacaaacgttgataattggtataactggatgggattcaaagaactatacccaaagaaaaaatcgaaagcaaatcacaacagaagaaattgtttcacgatgacctccttaattcaaagaactatacccaaagaaaaaatcgaaagcaaatcacaacagggcaaaaagcgcacacattgtaatttttattcaaagaactatacccaaagaaaaaatcgaaagcaaatcacaacagcttccaaaacaaccttcataagttcatattcaaagaactatacccaaagaaaaaatcgaaagcaaatcacaacagattccgttttgacgtaaacattctgctgattcaaagaactatacccaaagaaaaaatcgaaagcaaatcacaacggagatgattacagactaacatcgcgttgaattcaaagaactatacccaaagaaaaaatcgaaagcaaatcacaacacaaacatcaatcaataatcacgggcttgaattcaaagaactatacccaaagaaaaaatcgaaagcaaatcacaacgggcttgacttcggaataagcgacccgacgattcaaagaactatacccaaagaaaaaatcgaaagcaaatcacaacgaaagtgtcatatcttcccctataggttgtattcaaagaactatacccaaagaaaaaatcgaaagcaaatcacaactcggacgctcgcaatggcaaaagacttgacattcaaagaactatacccaaagaaaaaatcgaaagcaaatcacaaccattcggctttccacgtaatgagcatatctattcaaagaactatacccaaagaaaaaatcgaaagcaaatcacaactcggtgctcgacttcgtcgagcgatgctccattcaaagaactatacccaaagaaaaaatcgaaagcaaatcacaacaagatattaagacggactatttaatcgacgattcaaagaactatacccaaagaaaaaatcgaaagcaaatcacaactgcacctactattgacttttaaatttccttattcaaagaactatacccaaagaaaaaatcgaaagcaaatcacaaccgcttgttttttggattcaacaattgaccgattcaaagaactatacccaaagaaaaaatcgaaagcaaatcacaacctaccgcctcacgtgaagatcgttccgattattcaaagaactatacccaaagaaaaaatcgaaagcaaatcacaactcaggtaaacaatgaaacaaatgcaaaactattcaaagaactatacccaaagaaaaaatcgaaagcaaatcacaaccaaaaacggtatgctgcgcaaccgcgccgcattcaaagaactatacccaaagaaaaaatcgaaagcaaatcacaaccaatagcgatccggaggcgcgattgacattcccttcaaggctgcttacattaccgctgagttgctgcactgccttttgcgcatcagccgcatcgagttttagtatgagatttattgttgacatatatgtagatgctaaaccgacaacacgctacagagcgcgattcatgctgacatggattgccttcttcattcttgcgtgcctgcttgttgcccaattgcctactgatgtaactttttggttcttacttcttgtcattggttcactcgttccaggatacgtgtgggcaaaattgaaagactattcacaactgcgctaactcgctgttgatggcgtcaatccgcttgagatacgccatcatatacacctcttcttcatccatcataaaaattttttctgtttcagatactacaccgttgctcaactggaacgccatcatcgtatagacatcattcaaagaactatacccaaagaaaaaatcgaaagcaaatcacaacttagtcaatgatgcttccatccgatcgttgaccaagtttcaattcgccgtggactatggctctccagcgttccgcttcttcaaaactgcattttttcacatacatccagaacactatctcttcttcacgcgttaacttctgtttttccattctacttgcataatcgttcataatgctggttattatttcaacattactttttgataatgatgttaacttatgacgttctaccaaggattgtatttctttcaccgtcatgtgtcttggttccattgatcacaatcataccaccaccagccattctttgccagttcgggttcataaatgtagaactgaaggtctttatccaatagttttttgtttgctgcaagtgttgaacgcaattccttccacaatattacattctccgtttgttcaacatcgcgcaactcaagaaatatcagttgcagttccgctggacctcgttccggtctccagtgccgcaatatctgtatcgctcgttcaagagtttccttctcgtgatctacactcacctattcgccacacccgttaaaaaatacatcaccgccagcgcggcaagacttgcagttcgaccgtcaatatcatacttcggattcatttcgacgatgtcaatcaatttcgttttgcggcgtttaccggcaaacaacgcggcggtcagaaattcttccgttgtcaaacctgtcggaagcggcgcactcactcccggcgcatcggcgcttcgaacaacatcaagatcaaaactgatgtagagcgcatcaaccgaggttgtcgccaattcgtacgcaagatcgagaattttagtaataccctcttcgcgcacatcgcgcagtgaaaagatggttgcgcctcgttctatcaactcagaataatgttcgtgagcattggcaaacgactgcgcccccacttctacaaaattcatcgcattcaaaggactgtgaggatgatcgagcatctgacggaacgatgttccgctgttccgtttcgggttcggtttccggtaatcaaggtgcgtgtcaatgttgacgacgccgacatttttcttcccttttgagaatcctataaagttcggataggcaatgtcgtgccccccgccgagcacaatgggaataatatccgatgccacaagcgaatgaacggtttcagcaagcctatcatgggtttcttcaagtgttttgccaatcttgatgttgccgaaatcgaatatcgaaagtccggaaagagaattttccttgccgataacaaatggagtgcgtttatacagttcagttcgtattgcatcgggtccccccttagcgccgacacgcccgccgttccgtttcactccctcatcggtcggcacaccgatgatacctatggtaacttcagaagagaacttcttctcgcctcgaagaacaatgtcccccatccgcgggtcggaagtgttgtgccgcgagtagaaaagtttttcatcggcgggttccagatatttgaacatcggattcatgcccctaaattaggaaagttaccatcagaagcaagaaatgtttttttgtaatgatatgctatacaaaccaatttttaactccgctatttatggcggagtttggcattccttcaacacttggctttagccgtgacaatcaaggctaaagcccatacagggactagtgggcataaaaactccgtcttaaaagacggagttaaccttcattttttttgcaagttaagaagacaattgtttttggtttgtcaaagaaataatcaccatgtttttccggctatgaacttgcctgtgaatgtgaaaatttccgtcatcgccgagcaagactacgactcgtagagagttcggcgttacatcactctgcataacttcagtcattaatacgtcatgatgggcaaagccgaaccatgatcctgctgatagtcatacttagactccgctcaccacgacattgctttctaattgagatactgtccgaattgcttctttttatattttacgctactttcacaacagcatgcctgcaggcagacggacattactgtgtagaaaatcaataaccgatgcaaaaacatcttcgcctcgtactcatttcgctcattcttattacagtgcaaacgacggtcgtaacattcatgtcggtgctaaacattgtgcccgatgtgatgctgatttggattgtgtacatcgccgtcacacagggacaaattccggcaacggtgtacggtttcagtattggtttggcattagatcttatcagcggacagtttctcggtctcaccgctttcacgaaaacactggcaggatttttagccggctacttctacaacgaaaataaaattgactttacattaagtaattatcgtttccttgttattgtcggcagtacagcgttggttcacaacgttatctactttattttgtttacgcagggaagtgatgttggattatttaccgctatcgttcagtttggtgttttttctatgctgtacactactgctctttctgctattcccatgtttgctgcaaagcgaaaagggcaattacgttaacgcaataacttatgaatgacgaatttggttcacaagaacgacgacgtgttttgaaaatcatcattgcggttgggtttatccttctggtgggacgattatttcaattacagtatatttacggcgatctgtacggcaaagaagccgagcaaaattctatccgcaacgttcccaaagttcctattcgcggttatatgtatgatcggaaaggaactcttctggtagataatcgcccatcgtacacagttatggtaacgcctattgacttcaacgcagaaaatcttccgcttctttcttcaattctcggaatgcagcaaagcgatatcgtcgctaagattaagcaggcacagcggtataatccgttcattcccacacgcatcaagcgcgatatttcatttgcagaactctccatgctcgaagaacaccgtgacaaattgtacggtgtcgaaatccaaatggaagccaaacggtactatccaactgccgttcgcggcagccatatgcttgggtacgcacgcgaaatttccgatgcgatgttggagaagaacaaagagtactaccaacccggcgatctggtcggcagtgcgggactggaagcaaagtacgaagaacaactgcgcggtgtgaaagggtgggagtttatttcacagaatgcaaagggacaaatcatcggcacattcgacaacggcaagcacgacattccgccacaagatggatttgatttacagttagccattgatgccgatgttcaagcgcttgcagaaagtttactctcagataaacgcggcgctgttgtcgccattgatccccgcaatggcggcattattgccatggtaagcaaaccggattacgatttgtcacacttcagcggcgttacaccgccagacgtatggcgtgcgttgaacgccgatgaaagcaagccattgttcaatcgtgcaacactcacacgctatccacctggttctacttttaaaatgattctcgcattaacagcgttagagaagggtataattgatgaacattggactgttacctgtcatggcggattcagatacggcaacaaaatgttcaaatgcgaacatgttcacggcgctgttaacgtggtggatgcaatccatcgttcctgcaatattttcttttatcaacttatgctcaaagtgggattagacgagtggagtgcgatgggacaacaattcggcttcggcaaaccaacgaagatagatattatggaagagaatgcaggtcttttgccaacacgcgaatactacgaccgcgtacatggaaaaggaaagtggacacctgggtatctcatcagtttagcaatcggacaaggtgaagtgggtgtttcgccgttacaaatggcaaattacgccgctattctcgccaacaaagggaaacactatcaacctcatattgttaatgcggtgtatgataaacgaacaaaaaaattagaaaaaatagttgcagagcaacattcactttcattatctgaccacacatgggacttagtgcgcgaaggtatgcgtcgtgcggtaatggcgcctggtggcacaggaacggcagcgcgcattcctggtattgaagttgcgggaaagacaggaactgcgcaaaatccacacggcaaagatcattcatggtttatcggctttgcaccgtttgacgaacccaagattgccatttgtgtactcattgaaaatgttgggtacggcggttcgtttgccgcgccggtggcaggtttgtgcatggaacaatatctctacggcgaaattatccgctatggagcaaaaaagaaaaatgcagatgacgctatcgcggcaaaggaataatgataaagtgatttcaggtgataatgccttacatttttttgaaagagtgaacaaaacttattgataaaagaacgtgaatacattttttaacgaatactttgatcgcgttacattctttaccgtacttggcttggtgggcatcgggttactatctgtgtactctgctacctttgatgcttatgaaggaagagatttttatcgtcaactgctgtgggcaggaattggttttacattaatgatgacgatgatgctgcttccattgcgctggatgcaacgttctgcactaccattgttttttgcctcattatcactgttgatactggtgttgcttgttggaaaacgtgtgtacggatcgcaaagttggcttggtgttgccggattaggtattcagccatctgaattcgtcaaaatcactaccatgcttgctgttgcttcgtatttaagtcgaagcgacgtaaaagcaaccgatttgaaagaccttacaaaggccagtattctcgtagcactcccgatcattcttattatgcttcaaccggattttggtacttcgttgacatttctggcaatgttcattccggtgttgtactgggcaggcgcatcaaaatttttaattatcattatcattgcaccggcttttgtagcggccgcttctattatgggaacaacgccctttcttattgtcttgctactactcggtggtgcattgtggacgatgcggaatgaaaacagatttgttgccgcgctggtatttggcgccaatgttgttattggatttctggtacagattatctacgataaacttcctctgtaccaacaaaaacgcattgccacatttctcgacccgaataacgatccgcttggcgcagggtacaatgtcattcaggcaaaagtggctattggctctggtggaatgttcggcaagggatttatgcggggcacgcaaacacagttgagtttcattcctaaacaatggactgatttcatattctgtgtaccggcagaagaattcggatttgttggcggcgttgttgtactcggattgtttgccatactgctctatcgcggcattcatctggcctccattgccaagaacaaatttagttcccttgttgccatcgctattgtttcactttttgcatttcacatttttgttaacattggcatgtcggtaggactaatgccggtcattggtattcctcttccatttctcagttacggcggctcgtcacttgtttcatacatgatgatggcgggtttattgatgaatgtgtacgctaatagaaaagagtactaacttacactgatagcattatcagcatcctgatatcagttaaaaaataccaatctctccgatttcctttcttattttc

SEQ ID NO: 4407 - DNA, 22775 bp, synthetic construct
  source 1..22775: mol_type = other DNA
  misc_feature 1..22775: note = Synthetic
gagcttcttgcaacggaaattagaaacgaactcgaaaaactcgttactccccgcggaataaggatagaagcttctccgctgcgacagatagtcctgccctccggtcttacagccgctattgaagaaaaattaaaagccgagcaggaaagccagaggatgcagttcgtactcaaacgcgaagaacaggaagccgaacgcaaacgaatcgaagcaaaaggaatagctgactttcaggatatcgtatcgcgcggcatcagcgatcaattgttgaaatggaaaggaatcgaagctacggaaaacctgtcgaaatctcaaaattccaaaattattattatcggctcgggtaaatcgggacttcctgtaattttgaatccgtaattataattaagacaagaagtatattaggattgttcggttcggcgttcaatgttcttggttttggagttcaacgttcgttgtgtaattaggaggcggggattaggaattagtggttagggattcttggccagaaattattttttctttgttatatgtagatatacaatggctgatagttttgacgtataatatgcgcctctttttaacgaagaacattgaacatcagcgctccgaacaacgaacgcccacgtctttgcgaccccagaatgcggggggaaacaaacactaaactaaacttcgtctttgcgaggagcgagcaaaagcgaacgacgaagcaaactcttataaataccagtgcgactacttcgccccgctgtaagcgtggctcgtaatgacaaatagcgatacacccactacgggaaaaagaaaactctgaaaggacagccagtcgtctttgcgacaccgcagaacgcgggggaaacaaactctaaacaaaacttcgtctttgcgaggagtgagctttatgcgaacgacgaagcaaactcaatttaaaccgcagagcgcgcgaagagcgcaaaggacacagtctttccgaatcagctaacattaatgaagataatattccacgctgtctttctgaaccagccatcggcgggtgaagaatctcaaaaatctgccgtacggatttttttgtcattccgtcggtgtgtattacttcgtagtacgataacattacagagacgagtcaaatatcgggcaaatttaaatggcataaaaaatcccgcaaatgcgggattttattaattctatacttgagaaatttatcagtcggaaacgacttcgattgcgggattgacttcgcgtttgagtaagttttcgattgcaatcaaagtgcctcgaatagcgctcgggcagctgccgcatgcgccctgataacggattttaagcgtataaccttccaatcctcttatttccaatcctccgccgtcgcctgcaagcgcgggacgaacgcgagtgttgattacatcattaatttttttcaaaagctcggtttcttcttccgaactgactcccggcaattccgattccggcggaatcagggatttgtcgaaattcttgatgaattcaaccagcggtttctggatttgtccccaagacgccgaaggctctttctcgatagtaatgaatttatccatataaaagaccgaaacgacgcccggaatttcgaatatcccttttgccagcgggtcgttctcggcttcttctttgctctggaaactgcgcgtttctttttgaagcagtttttcattcaatatgaatttaagcgcttgcggattcggcgttaaatcgacatcctgaaccattaacatttttatctctccgttttttatactaaataaacgtccgcaattgtgcgaaagttctcatttcgttaactgcaatcatatgaaaaatcggacacctattcaaggaattatcttctgttatcaataatcaagacaaattcgcctttgagattacgcgatttggcgacattcagcgcttctcctgcagtgcctcttataaactcttcgtctttttgagttaaattatacgccagtacgacctgtttggaactcccgaaatgcattgttacgtcttccagtattttaacaaggcggtaaggagtttccatcaaaactatcaattcttttatttctttcaatctcatcaaatcgcgccggcgtaaatcttttttgggcgaaatccagcctgcataataaaattttttgaagtcgaatccggaaccgaccaatgccgccataagagaattgctgccgggtacgggaataacttcgattccgttttttattgcaagctgaacaagcaaagttccgggatccgaaaacaaaggcgtaccgcaatcggaaattaatgcaaccgattcggcctgccgtattttctccaaaagcgtatatgagttttcttcttcgttatgttcgttgagcgaataaagttctttcttaatgtcatattccgaaagaagtcgattggcttccctgtattcctcgcatataataaaatcgcagccgcgcagtattttcaacgcgcgaagcgtaatgtcttcgtaattgccgataggtgtcgaaacaatatataacttcggtttcattttaccttttgaacgggagagggaaagcgggaagacgcgttactcttcccgcaataaaatttatttgtcgagcaattcttttaatttatccttcagttcgcttaattgaacaataattttttcgccggactgacgaattttcacttccacatttccatttttcaaattcttctcgcctacgattaattgaacgggcatacccagcaggtcggcgtcgttgaatttgaatcccgcgctggcgtcgagtctgtcgtcgaaaagcacttcgtagcccatgcttgaaagttctttgtacaattgctctgaagtttccgacacggtctggtttttcatattcaatccgataagatgtatgttgaaaggagcgagaggttttttccagatgataccgcgctcgtcataattctgttcgaggaaacaagccagaacccgttcgactccgatgccgtagcttcccattacaacgggatgttcttttccgttttcgtcgagataattcacgccgagcgcctcggaatattttgtgccgagtttgaatatgtggcccagctcgattgctttaaagacttcgagtgtggaattgcaccggacgcatttttctccgctttcgaccgtgcgcagatcgaaatattcgatttgaggaacgtcgcgtttaagatcgatgccgccgatatgataatcgtttttatttgctccgctgtataaattgttggcgtcttttaacaaattatcggcaatgattctgtgtttgaatccgaccggtcctatcgagccggcgtcggcgccggttatctctttgagttcttcgggatgagccggtcgtacgtttccgccgagcgctgcctgaagtttggtctcgttaacttcgtcgttgccgagcatcaataccaggacgggtttgccgtcgcagatataaattctcgatttggcggtttcgtgttcgtcgattttcaggaactcgcacagttcgtcgatcgatttaacgccgggcgtatgaatttcgtaaatttctttcgattcttcgtggcgtttggcaggcgcggcaatcgattgagccacttccacatttgccgcatatccgcatttttcgcaataagcgactgtatcttcgccggcgtcgctgcgcaccataaattcttccgatttgcttccgcccatggctccgctcgacgcgcctacgacaaagtatttcagtccgcacctgtcgaatatttttctgtatgctttgtcgtgcatttcatacgacttgtcgaggtcttcaaaagaacggtcgagcgagtaagaatccttcataataaattgcctgccccgaataacgccgctacgcggacggggctcgttccggaatttcgtctgtatctgataccagatttgaggaagttctttatatgatgcgaccgcgcctttggcatgccatgctactatttcttcgtgagtgggcgctagcacgtaatctctgtttttaatgtgaaacataatatcgccgaaagcttcaactctgccggtctgttcccatatctctttcggattcaatgccggataatggaattcctgtcctccgattgcattcatctcttcgcggataatgtccataactttcctgagcgctttgtatccgagcggcagccacgtataaatgcctgctgaaagttgtctgacaagaccggcgcgtatcatcaaaatatgactcggtataaccgcctcggcgggcgtttctttcaatgtgggcaaaaacgatttgctgaatttcattttattccgttccttgtgaaaaacttaagtgcaaagataaaaaataaatggaaattggagtttaatattttttaataaatccgttgaggaaacataagcaatgcgagccaatgcgttacatttattaataaaccgggaggagagtataaaccggcaggcgcggcgtcatagtaattttgattgagttgccgttaaacggacccgtttatttccgtctcaattattatattagcgataaaataattacggaaagagtgttatgaatttcgacccggttataaacgacccgaaacattatgatccggattatccctcgtcgatgattccggtcgcttttgagagcaaaggttccagactgcttggaacgtattttacggcagcgggaaaaggaccgcatccggttatcattctgcttcacggattcccgggcaacgaaaataattttgatttggctcatgttttcaggcggcagggatttaacgtgctgacgttccactacagaggatgctggggaagtcagggcgactattcctgggaaaacctgccggatgaccttggcgccgcaatagaattcataaagtcgaaccggggtaatgaaaaattaagagccgacaccggtaaaattatcctcgccgggcacagtatgggaggttttgcttcgctctattattcagtttttagcgatgaaataaaaaacgttatttcgatggcgggatttaatgccggggcattcggcgagctgcttaagattaataaggaaatttacaatctgagcgtcgagaaaataaaatttgccgctacgatagttaataacgcatcggccgaaggtcttctaaatcagttgataaatcatatcgatgactggaatctgttgaaatattcgagcaacctttccttgaaaaacctgctgattatcggagcggagtacgatacaacggcgccgttggaaatccatcacctgccgcttatagcctcgctgaaaatgacgggcgccgagttgcttgaagaacatattctccgctgcggtcattcgttcgccgacagaagaattgaactggcgagaataatttccaattggcttacaaaaacgaggttttaaaatgcccaaaagaatatcggacatgacgccggaagaattttccgccgccggcaagcgggtaatcgaatgggcggaacgttatttaaaagatatcgaaacgtatcgcgtgctgcccgatattaaaccgggcgaaattaataaacggatgcccgactcgccgccggacttcggcgaagagtttgataagattcttgaagacgtcgatcgaattgtaatgcccggaattactcactggcagcatcccaaattcatggcgtatttcgcgtcgaccgccagcggtccgggaatcctggcggatatcgtaagttcgacattcaattcgaacggaatggtctggaaatcttctcccgcgctgaccgaagtggaagcaaaaacgctcgaatggtatcgttcgatgctcggattgcccggaaattttaaaggaataatttacgatacggcgtcgataagttcttttcacggtatagccgcggcgcgggattataaatttccagaatcgagaacaaaaggaatgagctcgcttccggctatgagattatactgttccgaacaagcgcattcttcgatagaaaaagccgcgattgcgctcggcgtcggaattgaaggcgttcgtaaaatcaaagtcgattcggaattcaggatgattccggcggaacttgaaaaagcgatcaacgaagacattgcaatggggattgatcctttttgcgtcgttgccacaatcggaacgacttcgacaacgagcgtagatcctgtcgatgcaataagttcgatatgccggaagtacgatttgtggcttcacgtcgacgccgcctatgccggagtaaccgccatgctgccggaaatgaaaatacatttcaagggcatcgaaaacgccgattcgattgtgtcgaatcctcataaatggctcttcgttccgattgacctgagcgtgttttatacaaaacgtcccgaaacactgaaaagggcgttttcgcttgtgccggaatatctcaaaacggaagtcgatgcggaagttgaaaatctgatggattacggcattcaactgggcagacgattccgcgctcttaaactctggttcgtaatcagatatttcggcgtcgaaggattgaaggaaattttaagaaaacatattcgtctggctcaatcttttgccgactggataagagagtcgaacgaatttgaattattggcgccggcgccgttcagcgccgtttgtttcagagcggttcctccgggattgaaagaagaagatttgaacaaattcaacaaacttttgctggagcgtataaattctacgggcgaattattccttactcacacggttttgaacgacaaatttacaattcgactcgtagtttcgggaatccgtcaggaagaaagacacgtcgaagaagcgcgcaaagtaatcaagagggaatacgaaacactcttgaataatcagtgattatcgaaatcctgatgaagattgtctttcagttcaagatattcgccgaatttacgcagcgcttcccacgagtaaataccgtagtcgtatccgtctttccattttatttgaattgcgtaattgccgacgggagtaatgctttcaatctcgtacatgccgggtttttccggacctttcggcggcggggcgtaatgcttccataaaatcgtttcgcctttattgccggcgtcgggcgattcgtccctcaaaaattttaaaggatatttatgaatctttccgtcgtcccactcgatttccaaataatcctgtttgtgtaattctatccttaatggtctcatattatccgaaatttgtttgagacaaaaatatgttattaaatcgaaataaaaaattaccgcgtcaatatgcggcggtaaaacgcgcttattttatgtttgataaaaacgctttatgaagacacgcggaattttactggatgtttcgtgaaatgtttgctattattcaaccgaaagttatatccgtttgtattgccgacagatttttaaaatgaattatatggaaacagtattattcctgatagcgttgataattgccgttaaaattgctaacagaattatcaagccgagcgaaccggattctttccgcaattacgacaacgattgaactctctgatgttgcttctccggaaccttttattaccatagcaatgcagaacatttattgaacagacttatacttatggttgccaggaactgccgcaatttatgacaattaagatttacttttaaaaatgatgtcattattttaactaatattattgaaatgttagggctaataaataggcgggaaataaaaatgccccctgttaagtacaaggggcaaacttatgaagcaaagcttcctacggaatcatccttattgtgatttgcttcgctgtaaatatcgtaaaaaatgatttaaaaaaatagagggaacaatgaaaaaagtattgggactcgatatcggcacaaattcaatcggagccgctttgctgaatttgccggagcattttgagaattatggcaaagaaggaagtattgaatggtgtacaagcagaattattccaacggaggcagactatcttcagaaatttgaagagggcgctcctgttgtaacaaaagccgccgcacgcagacaaaaaagaggaagcagaagattaaaacatcgttacaagttaagaagaaccaagttgattaggttatttaaaataatgaattggctgccggaagattttccgcttgataatacaaaaaaaataaaagaaataattagggaacaaggggcgttcgtttttcgaataagcgattacgccccgatttccgatgacagttatcgtgaattttataaaagtttcggctacaaagatgaagaactaaatgaaataattgaagaaataaaatacagagacacgcataaaggtaaaaagagaaatgatgatattaaactgttgccaaaagattgggccgtgtattatctaagaaagaagggattgtcaaaaaaacttacaaaagatgaaattgttagaatactgtacttatttaatcaaaggagaggatttaagagcggcaggaaagacttggaggatacatcgcttatcgatcgctcggaattcaaacaaagattaattatcgaggacaaaggcgacttttgtgaattccaagttaaagacgaatttaaaaaagataagtgtgaaataaaatttgtttcgataactaaagtaagcagaatcgaggagacgagcgaaacaggaagaaaaggactgaaaaaatttaagatatatctcgaagataaatctattatgccctatgaagtagaaagaaaagaaaagcctcaatgggagggaaacgaatttacctttatagtaacgcagaaaattgaaaacggaaagtttaagcaaaatactccgcaacaacctacggaaaacgactgggctttgtgcacaacggctctcaatgataaaatatcatccaagcatccgggagaattcttttttgacgaactggtcaacgcgcacagagaaggcaaagattataagattcgtcaatatcccgtgtaccgttggcgatatgaaaaagaattggaggctatctggaacaaacagtgcgaactcaacgaagaattgagaaaattaaataacaataaagacctgattaaaaaaataattgagagcttttatccgacgcagtcaaagtacaatttgcataaagctaaagaacttatttccaaagatttgtttcatattataagtaaagatattatctatttccaaagggaattaaagtcgcaaaaaaatcttattggagaatgtcaatatgaaaaaagaaaaggaatagacggcgaaacctacggattaaaatgtattcctaaatcgtctccggttttccaggaatttcgcatatggcaggatattcataatataagattaataagaaaagaatatacggacgaaaaaggcagaagagttctggaagtggacgaaacaaaatcgtacataaacgacaatgtaaaagagaaattgtttgatttgatgaataataaagaaaatgttacggaaaaagacttgctgttggtcattaatgagtgtaacgaatccaaacccataaaaattgatagaaaatctaaagaatcttcgcattatataaaccttttcagaaacagagatatattaaaaggcaacgagacaaaacatcgttacaaaaaactttttaaaaacctagaaattgacgggaattatataatagaagacgaaacgctgctattcaagttgtggcatgcggattattcgcatgatttagccgataaagaaaagtaaaaaaggcattttgagttccctcggatggtctttatcggataacgaaggtaattccgtccgaaatgataattatgaaacttttaaattatcttcggatcaagcccaaaaattagcggaggctctttctaaattacctgctttaaaaaaagaatacggttcatattccgcattggcagttcgtaaaatgttgatgtttatgcgtgtcggcaaatactggagtcatcctcaatctattgttagtcggttaaaagaagaaagcgcaaaagaagtaaaacttaaaataaaaaagagaaggaaggatttttacattcgatagagagcgcgttggatacggccgatcatatattagaaagattaagaacggtaaattttagcgaaaataaaatccaaaatgtatccgacgaagcaatcccgaaacaaatattaaaaagttttattaagaaaaaatcgtacgaagagcttattaagggtttgaacacttatcaggcggcttatttgttatacggcagacattcggaaaaagaagaaattcgatgcgattctccaaaagaatatggaaaggtagtactaaaaatgcttaaaccgggcgagttgcgcaatcctttggtagaatcggtaatgcgcgaaacatgttcgttggtaaaagaagtgtgggataaatacggtaggatagacgaaattcatgtggagctgggtagagaactaaaaaataattctaaacagcgcgaattaataagcaaagcgcaaaaaaataattttgacgaaaaattaaaagcaaaaaaaatattaaccgagctgcttaacgaaacagcgtttgaacattatgacgaagaaggcaataaaattatttcgggatttacagtaaaaccgaatcccgacaatccgaaagacatcgaacgcttccgtttgtggaaagaccaggcgtcggttaatgaacaagactggaacggcaaagttaaatccgaaaaaataccaaccgaacaacaattgaaaaaatatattctttggctgaatcaaaattgtcgttctccttatacgggtaaaataattcctcttagcaaacttttcgacggaaacgaatatgaaattgagcacattattccccgttcaaaaatgaaaaacgacgcaatgagcaatttgattattgcggaacgtattgtcaacaaggcaaaaggaaatgaacttgccgcaaactttataagcgccagtaacggttattgttcttacgaagggaaagatattaagatttttacctacgatgaatataagcattttgtagacgatacatttaaaaacaatcgcgctaaaagaaaaaatctgctggcgactgaagttcccgatgattttatcgaaagacaaataaacgacactcgctatatcgggaaaaaattaggggagcttttgcgtcctgttttggcagagccaaataatatgatttttacggtcggctccattacttcggagcttaaagataattggggattgaacgacgtatggaaaagattgttaaaaccgagatttgaaagattggaaaaaatacttgggcaaaaattaatctatgaatatgaagacgaatacggaaataaaaaattcggttttaaattaagcgttaatgaaaaattagaaaaaaacggcataaaacgtctggatcacagacatcatgctttggacgcgatagtaatagccgccacaacccgggagcatattcgttatttaaacacgcttaatgcctctgatacaaatgaagaaatcagaaaatacagattgaccttatgcaaaagaaaaataagagattttaaaccgccgtggaataattttgcccgggacgtaaaagattcgctcgaatcatgcgtgatttcatttaaagaaaacactccgattgttacaaaaccttataacaaatatgagaaatgggaaataaaaaacggaaaacccgtaaaaataaaagaaaaacaaataaaagacggaaacggaagatggctggctgtgcgcaaatcaatgtttaaagaacctcaaggtattatatggataaaagaaaaacggaacgtgcctgttttggaagctttcaaagttcaaatagaaagaatgaaagttgaacgcgatcctgaaaaaagaagattagccggttatgtatatgatagattggcgcggggattaattaaaaatatcattgataaaattggcggcgatatagaagattcggatagacttttgacagaggttaaaaaatacttgaagaagaactctaaaaaggttgacaccggcaagattaaaaagaacgggaaaaatgaatataaaactgtttacatcctcgataattatgaatttgagaatattgaaattgctgaatttgttgaatatgccgctaaaagagtatcgctggataaatcattcacccatgacaaaataaataaaattccatatgctaaagagggaaaatcgcctttagccgatttattgcacgaacacctctctcgttataatgacaacgctacagaggctttctccggagaagggttagaagctttaacaaagaaggcgggcaagagaattgaaaaagtaactattcatgaaaagaaatcacccgacgataaattcggaaataaatatgtggaagttgataaaggagctatagcctattttattatttacgaaaacgaaacgacaaaagaacgccccgaaaagtattcgttggcaacccataaggcaatagaaagattgatagaaggaaaatcaatagcggagataaaagagggatttaaaactattattttatctccaaatgatttggtttacgttccaaccgaagaggagcaaaagaaaataaaaacaaaccatccttcgccgatagactgggataacaagaaggaaatttctgaaagaatatatagaatggttagtagttcaaaaagcgtctgtcaattcattcagcatcgtattgcaaacgctattataccttcgaatccgaaagaaaaaataaaaggagaaattgattggcatgataaatctcccaaaacaatggacggcaaatttaacattgctgattgttgcataaaaatccaggtcgacaggttgggtaatataaaaccattaatgtgagttagaaaatgataaaacgaacattatatattggcaatccggcatatctttcaatgaagaataatcagttaacgataagatataaagaaaatttagtggaaagcgaaagcaaaaattacggaaccgcagctgcatccgatatagacgacggatggctcgaaaagcgaatgaaggcggcggacgccctttctcatacactaccaatagaggatataggcattattgtgctggatcaccgtcaaattactttaactcacgggttgctcgattctcttttggataacaacgccgccattgtaatctgtaataagtcccatatgcccagcggtttgtttatgccgctggaaggcaataacgaacaaacaaagattatcaatgcgcaaattgaatcgtctctcccgcttaaaaaacaattatgggctcaaacaatagcggcaaaaatccgcaaccaagcaatgatgctgaaaaagaggaatgtcaaaattaataatatgattacatggtctaaaaaagtaagatccggcgacccggataattacgagggcagagcggcggcttactactggaaaaacttcttcccgatgataccggattttataagagaccgatacggagaacctccgaataatttgcttaattatggttatgcaatacttcgcgccattattgccagggctattgtggggtcgggtatgttgcccacattgggaattcatcactctaataaatataacgcatattgcttggcggacgatattatggaaccttacagaccgttcgtcgacaatgtggtttattcgattgtgagtaacggcgaaaatttttatgaattggacagctcaataaaaagacaattgttgaatatcggaactttggatgtaatcatcggaggcaaaagaagtccgttaatgattgccgcgcagagaacttcctcttcgctagcgcgttgttttgaaggaaaggctagaaagattacttatcctgaacttgaaacataattctttaatcaaaatcgggagatatgaacaaaacaaaacaaatattattatcgcttattacaatcccctcgctgtattaatgggggcagttaatgagatttaacgaatatagaatcatgtggattctcgttttttttgacttgcccaccgaaaccgctctcgaaaagaaagcatacgccagattcagaaaggaattgttgaaggacggatttacgatgtttcagttttcaatttatattcgccattgtcccagcagggaaaatatgaatgttcacgttaaacgtattaaaaagatgcttccggctaagggacacgtgggaatacttaaaattacggacaaacaattcggaatgatggaaatattttatggaaaaaagaaagaaagcggttttgtggaacctcatcagctggaattgttttaaaaagccctctctttcgtaaaaagagagggcttattgacattcctgttcccccgtctgatttttttaatcctaaaatcatgctaactcattgaataacaacgagttagttcggggtaccttggttttaatatgtcaaagaaaaaatttgaaagcaaatcacaactaacgtttgcattccatttatgggggtaaacttggttttaatatgtcaaagaaaaaatttgaaagcaaatcacaacaaaccgtttgcaaatcctattgaagagctcttggttttaatatgtcaaagaaaaaatttgaaagcaaatcacaacctaccaagccatcattaacagcgtcgaatacttggttttaatatgtcaaagaaaaaatttgaaagcaaatcacaacatcaggataatctgccatttatttcgctaacttggttttaatatgtcaaagaaaaaatttgaaagcaaatcacaactaataggagattcagtagaaaaagaaattacttggttttaatatgtcaaagaaaaaatttgaaagcaaatcacaacgaagtcccgttggggtctgtttggggcgggcttggttttaatatgtcaaagaaaaaatttgaaagcaaatcacaactgccttgacagtcgcccaccccttctctccttggttttaatatgtcaaagaaaaaatttgaaagcaaatcacaacgatgcgctccgctttgcctctgcgggagtccttggttttaatatgtcaaagaaaaaatttgaaagcaaatcacaaccggcgtttccgtcgtttccgctgtctctatcttggttttaatatgtcaaagaaaaaatttgaaagcaaatcacaacaccatttatagacctcgtctgcccaattctcttggttttaatatgtcaaagaaaaaatttgaaagcaaatcacaacatgccatcaccgttgttgtgcggcaatggacttggttttaatatgtcaaagaaaaaatttgaaagcaaatcacaacgttgcaaaggcgatgaagctcgacatcctgcttggttttaatatgtcaaagaaaaaatttgaaagcaaatcacaacagaatcgacggaggagttaaaattgcttaccttggttttaatatgtcaaagaaaaaatttgaaagcaaatcacaacaccttcgctgagtttgtccctgcctacctcttggttttaatatgtcaaagaaaaaatttgaaagcaaatcacaacgctgttcttctgccctatcctgtgtactccttggttttaatatgtcaaagaaaaaatttgaaagcaaatcacaactagctcccctttattttatattaccgtttcttggttttaatatgtcaaagaaaaaatttgaaagcaaatcacaactcctcttttgcgcaactcatgatagagatacttggttttaatatgtcaaagaaaaaattgaaagcaaatcacaacaatcagaacatttttagcaatcagcttatcttggttttaatatgtcaaagaaaaaatttgaaagcaaatcacaaccttttcctcagtgtcgctaacgtcaatatccttggttttaatatgtcaaagaaaaaatttgaaagcaaatcacaactggcgtaataacataaaacgcaataattccttggttttaatatgtcaaagaaaaaatttgaaagcaaatcacaaccagtttaagcagcacagtagctacgcatacttggttttaatccgtcagagacggacaggtatgtcaaagaaatcccgacaaggttgagagaaagcaaaccattataaaccataaaaagtatagtcggtaaaaaacgcctctaattgttattggattcctatataagaaagattgtacaagtaataaaatcaatttaagtatgcttctgtatcgggcacatgaatgcgtacggaaatatacggaataagtacggggaaatatatgcgtacatgattacgattaactatagaatatagcctggtgagattaacgtatgagatgtaatatacaaaaccgcattaaaaggattggtttggtaaaaatatagccaaaggcttatcattgagagagcgctcattgatctgccgttacaaccgcatgagcatttcttaagaaacggtacagaataacagcgaataatcctttatttaacaaaattaacggactaatataccgaccagacctttagttcaaatgaatattcaattatagtgtaaaaagtaggttctattgacaggtaatgaataattagttattataaaacaacgttttaaagtgcttccgtgagcgtaactttaagacgcccggcggcaggcgcggaactgttaataccgccggctttttatatttaataaaataatattcctttatcgtaaattagcattttcagcgagcttgagcggtaaaacattacacaaaaatttattccgtattaatcccgcttcctgcgggagaaatgaagaaactcttcttttttttattcaagattttgattcgtctgacgcagaaaaaatttattttaaaacatcttgcagagacggacaggtatgtcaaagaaatcccgacacggttgtgaaaaagcaaatcgcaacgtcttctaggttatcatctatttgattttaatgaagtataacaatagatttgtttaccgaccttacggcggctcttgagccatcgccccgcggcgttaaccgtaagcggcgcagtgcaaggcgcgggacttgttaaattcactgcgtttccttttcgatgttgctatgcattattttgtcatactgaccccgccgcaggcgggggaagtatctcacttgtattcatttaggtttgcttcccccgcattctgcggtgtcgcaaagacagctggctgtcctttcagagttttctttttcccgtagtgggtgtatcgctatttgtcattacgagccccgctttcagcgggcgaagtaatctcactggaattcatcagagtttgcttcgtcgttcgctttgctcgctcctcgcaaagacgaagttttgtttagagtttgtttcccccgcattctggggtcgcaaagacgtgggcgttcgtcgttctggtgtgcaggcgttaggagcgctgaggtgcggttgtgcggaagcgctgacgttctttgttgtataactttgaatgacaaaccaccaaccccaaaaccaagaacgttgaaccccaaaacgaagaacgaaaagccttccttcattattttgaattaattctttaatttgttaccgataattattaaaaggggaagtcatgaaaattttacttatgattttaatttcatttacaacgttattcgctcaggatgtcaaagaagaactgaaagctctcaaaaacagcagcgaatcgttggatcatcggctcgacgtactcgaaaaaaagatcgacgatgttatatggttccagcgtgtgggcgatgtggcgtttatcgacaaagtcttcctgacgggacctcctctttggaaagaaaaaaatccgaccggacagggcgcaggcaatcccgttaaattctggtcttatatcttcatccccaaaggaatcgattattcccaaaagtatcccgtaattgtatttccgcacgggggggtacatgcaaacttcagcacttactacacgcatatcatcagagaattgatttatcaaaaatatatagtagtggcggcggaataccgcggaagcacaggatacggaaaatccttttatgaaaaaatcgattacggcggtctcgaaatcgaagacgttaacgccagcaggcaatttgttctggaaaattacgactttgcggacaaagaccgcgtcggtattatcggctggagccacggcggattgattgcattgatgaacgtcttcgaacatccggaaaattataaggtctgctttgcgggcgttcccgtaagcgatctgattgcacgaatgggatacaaagacgacagctacagagctctctattcggctgactatcatatcggacaaacagccgatgaaaacgttaacgaatacagacgacgttcgcccgcgtggaatgcggaaaaattaaaaacgcctcttttgattcatacgaatacaaacgacgaagacgttaacgttctggaagtggagcatcttattaaatcgttaaaagccgccggtaaaaaattcgagtacgaaattttcaaagatatgccgggaggacattcgtttgaccggctcgatacaaaagctgcgcgccaaatcagaattaagatttacggctttctcgataaatatctcgatccgccggtcaaaataaaaagattagaggacatcaacaaagcggcgtatctaccgtaagttttccgtatgccgctttattgatattaaatatacgggataaagtgtgcgtttatcctttgatatttctattcactttgacctgactttttattagattttaggcgaactctccacatcctgatttccaacaaaataagggggtggacaatgaaggttctcggggcatacgaaaaagctcgcatttatattgaaaagcattacagggattcggaagaggcgcgaattcatcaccggaaattaaatcccggtccggtaatcacaatttcgagggaaaccggagtcggagccgcggtaatctgcgaaaagctcgtggaatatttcaacaaaagggcaatcgagggttacgacgattgggcgtatttcgacaaagcattgatagaaaaaataatggaagaccatcaactgcccgatcatttcagaaaatatttacacgaagaaaaacctcccaaaatcgaaacgtggttcggcgaactgctgggagttacgccttcgaaaattcttttgctcagaaaaatatcccagacaatattaaaattagccgacttcggcaatgtaattatcgtgggcagaggcgcaaacatcattaccgccaaaagaaaaaacgcgtttcacattcgactggttgcgcctttgtcttacagaattgaaaacgcatgccgcctttataatctcgattacaaaaaagcggcggactttattcgcgaagaagacgatgcgcgcaaacagtatatctggaaattcttccataaaaatatcgaagacccgcttctttatcatgcagttattaacaccaatttaatgaacccggacgaaatagcagaaatgatcggtcagtgtatcgtgcgtaaattccccaatttcttttccaaggaaaaaattttatctctctcggcataatgaaaaaattattaacgatatttttcttaattgttttcggcaattattgcaatacggaggtggcaatgaaattcgaattgatttcgccggccttcgaaaacgaaggcatgatacccgtccgttatacatgcgacggagaaaacgtttcgcctcccttgaaatggaacaacatacccgaaggcgccaaatcgcttgcattgataaacgacgaccccgacgctcctgcaggcgactggatacattggatattgtataatattcctcccgagatcgattatcttcccgaaggagcttcgaacaagaaacaaattcctccgaattctgtcgaaggactgaacgattggggacttaattcgtacggaggtccgtgtccgccttcaggaattcatcgttactatttcaaactctacgcgctcgatacggttttaacagccgacgataaaatgacgaagaaaaaactgctcggattgatgaaagggcatattttaggcgaagccgtactgatgggaaaatacaagcgagctcgttgattaataaaatatcccctttctaaaatagtaacgctattcttatatttcacttacttaatgaacaatttatcggaattagaatgaagacaagaaactttctgttaatcctcatctttctgtccgggcatgttttacatgctcaatcggacaagctgaaacaactcgacgaatacattcaaaattcaatggcagactgggagatgcccggttttgcggtttcgatagtaaaagacgattcggttatttttgccaaaggatacggagtaagagagttcggcaaagacgagaaagtcgatccaaacaccctttttgtaattgcttcctgttcgaaagcatttacaaccgcagcgcttgcaatcctggtagacagagggaaaataaattgggacgacaaagtgatcgactatcttcccgattttcagatgtatgacccgtgggttacaaatgaaattacaattcgcgatcttgtaacgcaccggagcggattggctacattcagcggcgattttctgtggctcggttcgaattacgatcggaaggaagtcattcgacgagcgcggcgccttaaaccggtttcgagttttcgttcgaaatacggatatcaaaatattatgtttattacggcggcggaaattatcaaagccgtaaccgatacttcgtggggagattttataaaagagcatttcctggttcccttgaaaatggtcaacacaaacacgtcgtacaaagaacttgccgtttccgaaaacaaagcgagggctcattacaaaaaagacggcgagattaaagtttataccgacattcaaaaagacaatgcaagcggcgcgctcggaatcaattcttcggttaacgatttggctcagtggattcgtcttcagctcaatcgaggtaaaatcgacagtctcgtaattttcagcgaagagcagtcgaaagaaatgtggtcgaatcataccgcctttggcgaaatgaattacggcttgggctggtttataagataccgaaacggaaaacggatgctctatcacggaggcggtatgccgggtatgatttcgaccgtggcgctaatacctgaagaaaatttcggctttgccctattgagcaatatggaaacgggaatggtatccgccatacgcgattatatagtcgatttgtttacgagcgtagaaccgaaagattataataaaataatgttagaaaaatgggaagagcgccttcaaaagtacgaagacgaactcaaaagacgggaagaagtcagagttaaaaacacatcgccttcgcttccgctcgaaaaatattgcggcaaatacgaagataaaatgtacggcgaagccaaagtaagcatgaaagacggcaatctctttttgcaatttattcccacgcctactttcaggggcgttctgaatcattatcattacgacactttctttatcgattgggaagacgaatttttgacgcgcggttggataaaatttgacatggacttcgaaggaaacgtaaagcggttcaccctggaagttcccaattcccccgattttattttcacggaattattgttcgaaaagaaaaattaatacgctgaaaccaatttaatcaacaatcatctaacggtagccatgaaatatttaaaaatcaaaaacagcaacgacgaaattccgattggaaaaatcgtctgcgtaggcagaaactatgccgcccacgcgttggaactcggaaacgaagtgcctgaatttccggttattttcctgaaaacggcttcgaatgtgatttattcgggcgataaagtaatccacccggattattccaataacctgcatcacgaagttgaactggttttattaatagggaagaccgttaaaaacgcagacgactcatccgccgaagacgctattgcgggatatgccgtagggctcgacatgacgttgagagaccttcaaaaagaatttatggaaaaaggcgacccatggactctttccaagtgtttcgataccgccgcggttctgtccgaatttgtattgaagaaagattataaacttagaggcgacgaaacgatcaaactttcggtcaacggagaattaagacaaaactcatccataaaaaatatgatgttcgacccggtaaaaatagtaaaatacatctcgtctaaaatgactctcgaaaaaggcgatcttatatttacaggcacgccggaaggagtcggcagagttgtgccgggagataaaattcacgcagaactcgaaaatatcggaaccatcgatacggaaataatcaaataaggagaatcatacatgccagtttacgaatacaagtgcaatgattgcggaaaaaaatatgagatttttcataagtcgataaccaatcccggcgaggttgaatgccccgattgcaaatccaaaaattataaaaaactcctttcttcattcagcgcctcgacggaaagcgcttcattcgactcttcggcggggtgttccgacggcagctgcggcgtaccttcgttcggcggctgcacaaccggaacttgcggactcaattaatttgaaaggcttcgtcgtttatccggcgaagcctttcaagttattcgcccagactcttttgtttcactttttgatttattttaatcagctccggcttcttctcaaataatttgagtacgtcttcgaaataaaagagcttattcggcttatacagatttttataaatttgtttcatcagttcgtaatcgtcagcagtatccaccgtccacctgtgaaaagaaaaatcccgatcgttttcgtaactgacaattttgaagacgtcggggcgctgataaatatacggagttacgtgttcgcgct

SEQ ID NO: 4408 - DNA, 17131 bp, synthetic construct
  misc_feature 1..17131: note = Synthetic
  source 1..17131: mol_type = other DNA
attccttcaccgctcattgaaacgtactttgtaaaaggacaatggggcattgaagtagtacccaccaaagtttccataaccgacctgaatgacaattttcagaacatgctcatcaggctcgacagtgtggaatttcagccggccgataccaatcaggcgtatgccaatgcagctttacaacaatctgttaaccgaacgttaaaagactgcaatggtaacagcattatacttcgcagcagcggctatgccagttttgctacttcgcttaccccttcgggcaacggaaccctgattgccatttatcaggtttttggttcaaccaagcagctttacattcgtgatttgggtgatgtgcaactcaacaacacccgctgtggtggcggaggtggcggaacaacacttgtttccattgcaagcatacggactatttattccggcagcaccacaacagttcccgccaaccggaaaataaaaggcattgttatttctgaccgcatcaaccagaataccgatacacgcaaccttattattcaggatgcaacagccggtattgtggtacgctttacttccaatcatacttttgatctgaatgatgaagtagaagtagatgtaagcaaccaggaactcagtacctttaacagtttgcttcaggttaacaatgttccgaatgcaaatgctgccaaaaccggcacaggctcagtaacgcctcaggttctcaccattgcacaaatcaattccggcacatggaccaatcttgaatcaaccctggttaccattaacaactgcaccataaccggaacacaacccatcagcggttcaaaaacattgaatgacggaacaggtacctatacgctcttcacacgctctcaggcaacctttgcttcaaccaattatcctacaggaacagtaagtgttaccggttttctcggaatcttcaatactaccaagcagatttccatacggagcatgagcgatattcagtaataaaagattacatcttccgttttcttttttcaatggctgaaaatgccattgcctacttttgctttctttaattctctacatgaaaaagatttttctgatatcggctgtttttatttcagttgtatttaaccttaaggcacaagaccgcgatcttgttcagttctcaggcgttgtagttacctccgacagcctgcagcctgttccctttgcaagtatcattgttaagaatacttaccgcggtaccatcagcgattatttcgggttcttttcattcgtagccaagatgaaagacaccattgagttttcatccgttggcttccgcagggcggcatttattattcctgataccttgacagaaaaccggtattccctgattcaggttttgatgcgtgataccgttttattgaaagaagccgttatttatccatggccaaccaaagaacagtttaaacaagcattcttaagtctttctgttccggatgatgatttgctgcgggcacgaaaaaatctggagaaacaacgcctgcaggaaattgccgaaaaccttcctcccgatggtagccttacttacaaataccagatgcagcagcaatatgcacggctatataccgtagggcaattgccgaaaaacaatttgctgaatcctattgcctgggcgcagtttatcaaagcctggcagaatggcgatttcagccgtaagaaagataagtttgacgaataagcactgaacagaaaggaatgctttgtaattcatttcgcaccaatgcagcgctgtggtttgctgtatttgtttccctgtttctgataaatgcttcagcactgtttgctcagtcagcagaagtctttggagttgttaccgaccagaaaaaccagcccatgttcggagtgaatgtagccattgtgggcgaagcaggcggaaccattaccgatgaaaacggaaagtatctgctcaaagtaaaacctaaccgtgaggttacgctggctttctcttatgtaggattcaaccttcagcagattattgtaagactgaaagaaaatgagaaacgggaactgaaccgccagatggagcccggctcacaaaccttgccgcctgtggaagtaaccgataccaaatctcgcgaatcgggactgactcgcattaacccgaaaaccattcagcaactgcctactgtctcagggagctttgaagatgtattgaaaacattgcccggtgtggtggccaataatgaattgagttcgcagtattccgttcgcggaggaaactttgatgagaaccttgtgtatgtaaacgactttgaaatttaccgtccgttcttggtgcgcagcggccagcaggaaggattgagttttataaacagcgatatggtttcgtccgtattgttttctgccggtggatttgaatctatgtatggagataaactctcttcggtgcttgatgtgaaataccgcaagccaaaaaaattcgcaggtacggttaatggaagtttgcttggcggaggtgttcagttggaaggaataaccaagaataaaaaacttacttaccttaccggattgcgctttaaatcgaatcaatacctgcttaaatcattagacaccaaaggcgaatacaaaccttcttttctggatgtgcaggccgatgtacattatgcgcttacaccgaaaaccgatttgaatttcctcggcaacttttcgcgcaaccgctataatgttgttcctgctacacgacagaccgaattcggaaccatcaatcaggcattgcgcttgaccatttattttgacggacaggaagtaaacagttatgaaagcatgatgggcggattatcgcttacgcattatgtcaatgaaaacctgaaactgaaattactgggttcagctttttatactgatgaacgcgagtcgtttgatatactcggacagtataaccttgatgaactggagcgcgacctcggcagcagcgaattcggagaagcggcttttaaccgtggcgtgggctcttttcttgaccatgcacggaatacattgacagcacaggtgtataatgtggaacaccgcggctcgctgcatcgcgagaatgatgatgtacagtggggaattaaatttcaggctgaagattttacggataaactgaacgaatggaagtatgttgattcggcaggttactccctgccccacccgcgtgataatcccgggcaaagcgggccatacaatcagcaaattgttttgcaggatgttttgaaaacaaaaatcgggttgaacacctggcggctttcggggtttgtacagtttgaccgctcgctgggcgctgaaaaggagtttgccttcaatggcggctggcgcgtgcattattatgatttgaacagcgaaattgttaccgggccacgtgttatgttttcatggaaaccaacgtggcgaaaaaatctcatgttccgtgcggcagcaggattttattaccagcctcccttctaccgcgaattgcgcaatcttgacggcaacatcaatcccgatttaaaagcgcaacgctctattcattttgtggcaggtaatgattatcagtttctcgcgttcgggcgtgagtttaaactcgtttcagaactgtattacaaaaagctggataaccttattccctataaagtagaaaacctccgcatccgctattttgccgaaaacatttcaaaaggctatgcagccggagctgatttaagaatcaatggcgagtttgttccgggtactgaatcatggataagcctgtctgtgcttcagactaaagaagacattatcaatgacttctattatgattattacaactctgacggagaaaaaatcgttgccggatatactgcgaataacattgctacggattccatccgcgttgaaccgggttacattccccgtcctaccgaccagcgcgtaaccttcagtatgttctttcaggattacattccgaagtttcctacttggaaggtacatctcagtttgatttacggaacaggattgccatttggccctccgggaagaaacaaatacaatgacatactccgtgtgcctgattaccggagagttgacataggcttctctaagatatttattgatgaagacaatccacgcaagtcaaggctaaggtgggtgaataacatcaaagccttctgggtaagcctcgaagtgttcaacctgctgcaggttagtaataccgtttcgtacatctggattgccgacatcaccaatcgctattatgccgtaccgaattatttgtcggcacgaaccattaacctaagattgaatgtgaaattttaaaataacattttatgaatccggaatttatcaattacaataaagccctgaacaaaacagatcaagaaatctgtaatgccttacttgaaatcatttctgaaaatatgccggaagcagaaaataaaatctggcaccgtcatccggtttggtttcttgatggtaatcccgttgtcggttacagcaagctgaaaaacagcatccgcctgatgttctggagcggagcagattttgaagaagaagacttaaaacccggttcaggaaaatttaaagatgcctccattgatttcacttcttcagaacagataaaaccttccaaactgaaacgctggctcaggaaagcaaaaacgatacaatgggattacaagaatgtagttaaacgcaagggtgtacttgtccggttaaaataaaaactgctgatttcgctgctctgttcttcttatgcggtgcatgtgggttccatcccattacagccagcattatgaaaaaagccaatacataagccagggctacatgccatcctgcttttaaatacttaaatgtatttttagcttcaggaaagatgttgctaagcgcaacccctgccgatgatccaaaccatatcatagaacctccgtacccaacggcaaaggcaagtattccccaatcatatccgccttgttcaagacaaagtttggtaagtggtatattatcaaacacagccgaaacaaatccaagatgaaaagccgtatgccacgaagcagcgggcaattcattaaccggcattaatgaggcgcatagtacaagcgatagcagaaacacagttccctttaatgagctttttacttcatgccacggaattccggctaatgctgcgcctgcgggaatagccagccatacaccggctgccggaaagtcaagcaaggtattgccaagtatagcgcctgcaagaatcatcaacacaacaaccatccttctccaatcaggcttaacggcaatcgtacttctgctgatggccggctgatagcggtgttgctgtatggctgctacacttccgaaaataaaaaaggctgccagcgaacctgcataagcatgggttacatcgagtgcattaacgccatcaatccacatcatggtagtggtggtatcgcctactacactaccggctccgcctgcattgcttgccgctatgataccggcaatatacccgatgtgtactttacgattatataccgactgagcaatagtgcctccgataatggccgctgctatattgtcaagaaaggatgagagaacaagtataagtgcgagtaaaaccaggcctcccttccatccgtcaggaagaaaagaaggcagcatttcgggtatgtgcgaatcttcaaaatgacgggcaagaaccgaaaagcctgtaagcaatccaaacaaattaagtatagttctccattctccctcccccgtattgctgccaaaaagatgatgcaccaaatcaaaagatgaatcaaaaaataatttaatcagcagtagaattgtcagaccggataaagccacctttatagtatgctgatgaaagatggctatgccggctaaggtcaaagcaaagatgacaaactctgctcttattccataaacctcaggaacattccctgtagtataagcagttccataactcataacaggccataccagtaacacagccgataaccaacacgctttcttcagcctgctgattactttatatccatcctcctgctgatgcacagaattccatgcgaaagttttttcgaacgacatagatacgatgattattttgcctttattaccttgtttatcctttcagcccagcgggatgcaaactgatgttcatccagcaatatcaaatcattcttcgaatcaaaaagtttccagatcaattccggcttgtccttatcggcaaacgtaaatatccattcaatcttatctgttgactttgcagctccggaggcagtctttctttctgtttcggatgtaacacagcggcagtgccttacattatccagattcagactttccattaccttttcatggggagtagatttataaaaaatgatgatttttctgtccgtatccagaccaattataaagtctccaccagcctcatattctctgataatgcaatgatgttttgatgcaaaaccgtataaggcctcaagcaattcttttgttttattctttttaccgattcccatcagtacaaatgggacggcacatattataatgatggctaagccaactaaaattatttccaagttcattgttttatgctgtttaaagttcaataaataaaatgatccatgccatgagtgcatggataaaaaatcataacggacctgaagtgcctcaggcggttattttgattttaccggaaataatgaaaggggaataagatgaccgctataaataagcggaacactgtacttgccggttgattaccgtaaaagcggatcgctgaattaatcaagccattattgatttgttgaagcagcgctgaatcttttgaaaaatttctgaactggattgcaattaaagtattaagtctgctgaatacatcatccgtgcgcaaggcagcactcagcaaattaccggaggcttcactaataacagcaatggggttgtcagttgtacttaccttaagcgaaaccgtatctgtattggcaggtatgaatgaaacaaggctgtaagaagctaataacagacagactaacagatcccttaatatggtattcacgatgcaaaaataggcgaataaccgactatcttatttcctgtaaagaaataaaaataagtatgctgaagaagtcattgaacaatgactgaaattactaatgataagaaaaagtagtaaaccctgacgctattctgcacatcaatgccatttggtaatatccattactttgctgcatataattcgctttatttgctcaaatcaaaaaaccatgcctaccgtcaacgtttatcttaccttcaacggcaactgcgaggaagccttcaatttttacaaatccgtttttggcggtgagtttccctacttcggccgttttaaagatttgcccccacaacccggtcagaaagccatgcccgaaagtgatggcaataaaataatgcatgtatccctgccggtaagtaaagaaaccatgctgatgggcagcgataccggaggggaatgggcttcctctttcaaacaaggaaacaacttttccatttcaattaatgctgaaagcaaagatgaggcagaccggttcttccggcaattatcagccggtggacaaaccattatgcctatgaataacaccttctggggggcctacttcggaatgcttaccgataaattcggcattaactggatggtgaattactcggagcagaagggcatgtaattaagtttgttgactaaatcttcggcataaataccaaatcatcaactcttttccttcctgcaccctgaacttaaaaagggaacagcgcgaaaaaggcgtgcatcatcaattcatataattaaatacaagttatttggttacctgctgtcaattttaataaacctttttactgcagcacctttgtttttcagttttataatatatatcccttccattaattctccaaggttaatgtgtaacggactttcaagtacaggaacaattttaatcagtcttccatccacattataaatcagcacttgttcttcgagcggaatcccggcaaatttcagtatcactgtttccgttgcaggattcggaaaaaggctccattcattcatttcattgcccttgcctgctcccagcgttccgcaatcataggtaactgaaacagccgttgtatctgccggacaatccgaggccgggtttaccaccttacattcatacttgccttcggctgtaatgaacagcgtatcctcattgatcatccaactgagcagcgtatcatttttaaaccaataaatatgttcagttcctgtaagcgaaccgcttgcatgaagcacggcaaaggctaccgtatctccaatgcagggattaccaatagcatcaaaataataacccgaccatggaggcatagcataaaatggttgcgataactccgtgcagccgttctgggttgtcagtaccgaaaaagacattgccgtatactgcgcataatcagccaggtatggcagattttgtgcaacagggtatccgttattcagccattgaatgatagtagccggctgagtccatagtgtatcataagcacaaagccagggattagaagtgtaaaccgttggcgtatgactgcaaaactgaatcaccgtatccgtaaaactgatgtgcaatcccgtgtaatcgcaaacggaggtagtcagcgatatggtataactgccatctgcgatccacgcatgcgatggcgcagcagtagttgcagtactgccatcatcaaaatcccaaaaataattttgcttgattccataatttatagccgtaaaatttatctggttattacccgctccggcttcgtaacgaaaatcagaaacaggaagcaccctgaaatcccagagcggaagactgtcatatactatcgttttggctgcatttcttatcaaggctgcatcggcagcatttaatcctgcattaaaagaaatcatggcaggattttttttaaaaatggctgcataaaaactacaggctgccgcataagtaccttctgctgaaggatggctttcatcaggatggtacaactcaattgccgggtgatattgcctcaggtaattccatactgaagaaaccggagacacttctgtattaagtgcagcagttatgttcatgtaccgtacccgtaaggttgaatccatactttgataggtacacattaccggaaactgtgcgcaattggcggcatctccgttttttctgccccagctcatgtaaggcattaccactgcacacggattatactgctttaccagattgtacaatgaattcgccccgctgtaaaactggctcatctgaataacaggctcctgactttgcccctgcagcaccacaaaatcccacccgcctgacataatcttgctctggcttattgggtcctgaacgtgatcaataagctgataccctcccggtgtatgactgtcgaaaataagagtatctcccgctgacaatgccaaatcatgaaccaactgaggaaggttgtttacataagtgtaactgttccccagaaaaagcactttgtaagttatctgcgcatccatttcgctgaccggaaaaagccctgagaaaatcagagccaaacccattagaaatttattaccggcaaaacgaaatccaatcatcaaaagccgtaacagactcaatttttttttgcgtttcatttatctgatttcatgcttacatgcacctgactgctacaatcattaatgaagaactgcttacaaatgtaaaaaaatcctgctgctctccttcccggctccccaggttgttaaaagaagcctataccggttcgcattgccaatgcagtttatacaaagcactcctgcagaagtaaaatgatatgattaacggaatttggaggattaatacaaattactttatttaggggcgatgatttggatggtatggtagtcaataaaaaagccccgctgttaagtacaacggggaggaaacttgatgagcaaggctcactacggaataatccttattgtgatttgcttcaacgcaaaaataataatctatagttaattatcattatggaaacaaaaaaaattctcggtttggacatcggaacaaattcaattggtgctgcacttattaaaatgcctatctcaatcaatgacttcggaaaagaaggcgaaatactgtggcttggcagtcggattgtaccttttgatacagaatataccaaagcctatgaagatgggcagaatggaagccctcaggtgaagacacccgcagcaaacagaaggttaaaacgtggttcacgcaggttaaagcatcgctataaactccgtagatctcgtcttattaaagtactgaaattgattggctggctacctaatgattttccgcttgataatccacaacaaatcaagaatatcattcgtgaaaacaacggacgatttgatttccgggtaaatccttggttgcctttttccactgaaactataaatgaagccactgaacaacttggtgtaaaagggaagaccaacgaaaaaggcagaccaattattcctgaggattggattgtatattatctacgaaaaaaggcattgacaaagaaaattactgttaaagaactcgcacgcattcttttaatgatgaaccagcgtagagggtttaaaagcagcagaaaagatttacaggataatcaaattctgagttatgtagaatttgaaaacctcaaagccagaatagacagtggagagttgcaggaatataaaagaggggaagggcaggaaagaaaaacaagatacgtttctaataccattattgaaaaagtagaacttaaaagtgatgaaaaagacaaaaaaaataagttgacattcataattaaagcagctgatccaataattataccttgggaagtgaaaagaaaagaaaagccagagtggacaggaaaagaagtgaaactactggtggagcaaaagataaaccggaagggggagataaagcaagaaagcgatccaaagcaaccgaaagaagatgactggacattaatgatgactgcacttgacaatcaaattgatgattcagggaaatttgtcggtgaatttttctgggataaactcgttgagaatgctcaacgaaatgagatttataaaatccgtcaaaatgtaattcgcagggaaaaatatcagaaggaattggaggccatctgggaaaggcaagtagaattgagaagagttgatggaactttagaagagttgctgcatggtgataaattagaaacaattgctttagctctttacagaaataatgctgcaaaacagaaagaattaattgataaagggctttatcacaccttagctaatgatattatttattatcagcgcgacctgaaatcccagaaaggctccatttcagaatgccgttatgaaaaaagaatcggaatagaaagaagtgaaaatggtgaatatcaaaaaaccggaatttacggtttgaaatgcgctccaaaatcaagccctctctttcaggaatttcgaatctggcaagacattcacaatatccgaatcttacaaaaggagcaaacaacaaacggaactacaaagattgatgtagacgttacgcgttgttttttgaatgaaaacaataaagattcattatttgatttgtttgattcacaggcagaaattacggagaaaagactttttgacaaactcaatgaattgaatcctgaaattcatttaaatgaagaacaattccgaatcaatctttttaccagtcgcaaatctctaaaagggaacgaaacaaaggatgaattcaggaaagtattcaaaaagtttaattgggaggaaaaaggtaattccattttaaaaaatccggaacaattctttggcctttggcatatactatactccatttcttcatccgactttgaaaaatctaaaaaaggaattaaatctgccttgaaaaagcatttcagcgaaatgcctgatgaaattgttgaagccctttctggacaaaaagaatttaaaaaagattatgcttcctattcttcaaaagcgttaaaaaagctactcaccgtaatgcgctgcggaaaatattggaaatgggatgccattgaaaactgccaaatcaaaacacctgaatcaccaattgaacatccaaataaaatcaaattgtctgatcggattgacaacattatcaaaaacggatgggaacgcgacataaaggtggataagcgcaccggtgaaatcatagagcaacgcaagtttacagagcgcagacagttttccggcttgcccgtatggttagcagggtatgttgtttatgggcggcacagtgaaagagagaattctgagaaatataccgctgcgcaaattcaacagctaaatgtgctgcaacttattgaaccaaacagcctcaggaatccacttgtggagcaggtagtgcgtgaagccgttctcatggtaaaagacatctgcaacacctttggacaacctgatgaaattcatattgaattaggcagagagcttaaaaaaaatgccgagcaacgggcagctatcgctgaaagtaattcaaaaaatctcgaagaaaaaaatcgggctaaaaaattactcagcgaattgctgaatgattccttcgaacattatgatgagcaaggtaataaagtgtcaaagaatttttctgttaagcccaacccaaacaaccccgttgatattgaaaaattcaggctatataaaagttgtgcacattttgagtatgatttaaaagaaaagaaacttgatgaccaggtttggatggataatatgtttcgtgatggaaagaaggagcgtgtacccacgaacgcagaggtgaaaaagtacattctttggttgtctcagaaatgtcgttctccctataccggaaaaattataccgttaagcaagctctttgacgaaaactcttatgaaaaggagcatatcataccacaatctcgtatgaaatatgatgctatggacaatttggtcattgcagaggctggtgtaaacaaagcaaaaggtaataaactagctgcaattttcatattagaagctaacggaagttgcgaacatggcggcattaaatacccgttgctcacttatgatgaatttgccacacattgcaaaaaaacctttcgtggcaagaagtataaaaacctaatggcaactgaagtacctgatgactttatcgaaaggcagattaacgacacacgctacattggacgcaagcttggagagttactttatccttttactacctcaaaaaggattgcttctgaaaaggaagccaatgacattgttttcaccatcggcagcattacttctgaactaaaaggaaaatggggattaaataaaatatggaagaaattgatcgaatcacgattcagaagattagagaagctgaatggcaagacctatgtttacccgaatcaaaaagatgcaaacgacattgattttaatgttccggaaattcctgattttgataacaagcgcattgaccaccggcatcatgcactcgatgcgctgattatcgctgcaaccacccgtgaacacatccgctatttcaatacccttaatgcggctgatacaagcgaagaatggaagaattttcaacgcactctttgcaaaagaaagataagggagtttaattcaccctggcctactttcgttaaagatgctagagaaaaacttagcgaagtcatagtaacatttaaggcaaacagacgagttgtttccaagccgttcaaccgttatataaaatgggtaaaaaggcaagatggaataattgaaaagcaaacactcagacagcaatctaataagaactggctgtctgtacgcagatcaatgtttaaagagccgcagggtataatcttgataaaacaaaaacgtgccgtgaaagttgaagatgccatccggacacaaattgagtggatgcaggttgagcatgatgaggaaaggcgaagaactgctccgtatgtatatgaccagactgtgcgcccgataatgaaagaaattattgaaaaaacaatagaatcgaccggaatacctctttcaaatacagataaattgttgaaagctattaagaattattatttgaaaaaaaacaagcaggacaatgcttatcgtatcggtaatcagctatatgaaaaaattaccattgctgaatttgtacgctataaggcaaagcgggttaaacttgacaattcgtttgacgaaaggaaaatttctaaaattccatacgctgataaatcacgaatcccactcttactgcagcagcatttaaatgaaagcggttcaaaagatgaagccttttcaccggatggtcttgaaaaactatcccaaaaaaatcaaaataaacctattcgtaaagttaccattatggatggcgagttaaaagaagaactgcgcgataatctttttggcaataaatacattgaaaccgatgccggtgccaatgcctactttgtgatatacgagaatgaaaaaacaaaagagcgcagcgttatgtattctatcgccacgcataaaatagttgaacgaattaagcttaatctacccgttgctgttgcacaggaaggaaataaagtaatcttgttgcaacccaatgaccttgtatatgtccctacaaatgaagaatgggaaaaactgataaatggtgaacaaaatgtaatagactggagcaacagaaaagaaataactcaaagaatttacagagtggtaaaaagcacaggcaagcaatgctttttcattccggcaaatatttccaaactgattcttccgtataaaaattacgatggagataaaaaattcggtgaattcgaaagccaaaactgttctgaaaatacgattgatggagcaattcaaataaaacagcggtgtattaaacttcgcattcttgacagacttggcaacattaaaccagcttaaatgataaggtgcttctataacttcaaactatcatggacacccattcttgaaacatcaacattaaaccaatgcaacccctgcttcccggctgtacttaccacatttacaaccaagccaacagcagcgataatatctttcgcgaagtaaaaaactatcctttatttcttcagaaatacgaaaaacacatagcccccattgctgaaacttttgcatggtgcctgatgccttaccacttccatctgctcttaaaaatccataacgaaaatactttattaaataaatttccaaaccttcaaggtttcaaaaaccttgaaggtttggaacaattaatcaaccgttttatcgctaaacaatctcccaatctcttcaacagctactccaaatctattaacaaagtttactcccgcagaggctctcttttcaaccctcggttcaaacgtaaattgatttcttccgatgaccagttccgtgatacctttctctacatccatcttaacccggttaaacatggttttactgatcatgaacataactggcctcattcttcctttcatatttacgcctcctgcctgtctgacagttttatcaacctcaaccattccatacagatgttcggcaattaccggaaccttctttactgcatgaataaaaaaagaaataaaatactctcgttaaaagaagagttctactaatccataaaaacgtaggttttgcaaaccttggatgttttaattgttggataaataatttttaaataggttcgtaaaccttaaatttatttaagcggataaaaaataaaaaccgatgataaaacgcactctctactttggcaatccctcctacctgagccttaataaccggcagcttattgtacgcctgcccgaagtcgagaaaaatgacacacttacagaatccttccggcaacaatcagcagcttcaatccctatcgaagacattggcgtgctaatactcgataaccgtcagattacccttacccatgccctcctctctgccctgctcgataataatacggccgtcattacctcagatgaaacccatttacccaatggccttttcctgccattggccggtaattcggttcaaaccgaaaaattcaaacaccagattgaggcttcagtccctcttaaaaaacagctttggcaacaaactgttgccgccaaaatcaacaatcaggctgccattcttcaaaatcaaaatctcccccaccagaatatgattcactgggcacagtcagttaaaagcggtgatgccgataatcacgaagcacgcgcctctgctcactattgggaaacgttgtcttctgttttttataaaaaccagcccggcaaaactttccgaagacaccgtaacggtgaacctcccaataatttgctgaactacggttatgctatactgcgggccataattgcccgcgctcttgtctcttcaggcctgcttcctacactcggcatctttcaccggaataaatacaatgcctattgtttggctgacgatattatggagccttaccgaccggtagttgacaaactcgtaattcagtatgtacagtctgatgcacctgtcagcgaacttgatcttagcgccaaaaagcatctgctttccatcacgactcttgatgtattaatagaaaatgaacgcagccctctcttaatagccatttcaagaactacggcctcgttggcacgatgttttgaaggtacccaacgtaaaatatcatatccttctgtggcctgacctactaatactttcactttcatacttcattttctcatgcgcctaaacgaatacagaattatgtggatacttgtcttcttcgaccttccggttattacccaaaaagaaaaaaaaatcgctgccagttttcgaaaagaaataatggccgatggattttctatgtttcagttctccatatacctgcgtcactgtgccagccgcgaaaatgccgaagtgcacataaagcgtgtaaaaaaaatcctcccggaaaaagggcatgtggttatccttaccatcactgacaaacaattcggaatgatggaagtctattacggccgtaaagaggaaaagccaccggccgggcctcagcaactggaactgttttaaaataaaaaaagccgcttaacagaatactgagcggctttttattcactgattttgcatgctgattttcgctttactttactggcttttagcattttgaggcaacctgtagtgtagcaaatatcagtaggtcaaagaatgaaagcaaatcacaac

SEQ ID NO: 4409 - DNA, 8831 bp, synthetic construct
  misc_feature 1..8831: note = Synthetic
  source 1..8831: mol_type = other DNA
tgtgagattcgcaccggaagtatcgcactgccaaatgaaagtatcactgttgagcaaaattttatcgttaaaccatgccggaagatatgttttgttgaaaccgagttcgtttcggttatctccatcactgtcacaaattgcagcgcgaacttcattgttggagtaatcaatagcagtaaagatgattttagtctgggaatacaaaatcgctgtaagtaaaaaaagatatgtgactatgaattttttcaaatgataataattctccgatcgtaaatgttgtattatctattcacaagtgtagggcgaccagtctggtcgccctactaataaaacacatgataatttagtaatagctaaacaactttcccaacaacaaccggtttttctccaaagttttgagagatcgtaatcaacttttctttatcttttttcgaaacgattgcaatcaagccgatacccagattgaaaacagatcgcatttcttcatccgtaatttctccagcagtttgtatcagcttaaaaattttgggtatgcgccaattattccaaaaaatattcagcgacaatcccttgtaaactaatctcatcgtattcccgacaatccctccgccggtaatgtgggaatatcctttcaccgaaatatgcttatttagatgtgtaatcaattttaagtaagatttatgaacccgcagtaattctgctccaagcggttttgaaagaccaggtagaattgttataagtgaatatttcacaagcaatacttttcttgcgagcgaataaccgtttgtatgtaatccatttgatggaaaacctatcagaacatctcctctttttatttttttcccgtttatcagattattcctctcggcaataccaacaatagttccggagagatcataatcttcaggagaataaagtccgggcatttcagcagtctctcctcctattaaagcgcagccgttttccttacaagcaattgaaaaacctttaataatttgctctgctttttggggattcaactttccaaaggcaaggtaatcaagaaagaatagtggtttggcaccgcaaacagctatatcatttacgcagtggttaaccaaatcctgaccgatagtatcgtgcttgttcaactgaatagcaatttttaatttcgttccgacaccatcaacggaggaaaccagaacaggctgcttatattttttaagatcgagtttgtaaaatgcgccgaataatccgatatcggaaaggacatttttattaaatgtcgctttcgcatagcccttgattcttttaaccattgcttcaccggcatgaatatcaactccggctgatttgtatgtagtgctcaaagtaaactcctgtaattctgtaaagcattgaaaataagctgcataaaattcgttcaatcgtttattcaaagttaaatgaaattattaagaaatttaaaaaagatatttaaatcttaaataaataaaagtaaattaaagccatgtttttaataacagcttaaaaacagcaatcccgccgttaagcgggactactgaatatgttttcactgcgggaaattgtttgaatataaaaaagcccctgttaaggacaagggcaaaaccttttgaagcaaaagcttcactacggaataatccttattgtgatttgcttcgagagtaaaaataagacaatatataattaacaacaaataaaaaataaattatggaaacgaaaaaaattttagggcttgatcttggcactaattcaattggtgcttctttggttaatattccaaaatctattgatgattttggaaagtatggcaatatagaatggctgggaagccgtattattccagttgaaggtgattatttacaaaagtttgaaagtggtggacaagcagaaacaaaagctgctgcacgaaggattaaaagaggatccaggcgtctgaaacataggtataaacttcgaagagatagattaataaaagtattcaaaatattaggttggctaccggatgattttccattagataattcaaaacgtataaaagaaatcattgctgaagtaggaaaattctcttttaaaataagtgattatataccaatttctattgaaagctatagagaattctataaagagtttggatacaaagatgaaaaattagaacaaattattgaagaaattaattttagaagaaagacgaagggaaaaaagaaaaatcccgatataaaattactgcctgaagattgggttgtttattatctacgcaaaaaagctttggcaaaaaagattacactagaagaacttattcgtattatttatattcttaatcaaagaagaggatttaaaagcagcagaaaagatttgaaagatgataatgtaattgaaattaagaaagcatacgaacttgtaataaaatctgttgaattaaaaagcgaagaaaaaaataagaaaggacaatatacttttattattaatcccacaatttctgaagttgaaccatgggaagaaactatgtataaaaaaccagaatgggaaggaaagaaaaataagtatgtagttacttggaaaaatggaaaacaacttaagccgcaaagggctactgctgatgattgggaagttgtagttgttgcattagataatgaaatagaacagaggaaccagcatccaggtgaatttttctttgatgagttactgaaagataaaaattataaaataaggcaattccccattttgaggaaaagatataaggctgaattagaagcaatttggaatactcaacttcaattaagaaagaatgctaataaagagcaagaattattgaataaagataaacttgaattaattgcagctactttatataaacacaacattgtaaagcaaaaagaactaaaagaaaaaggattgctgcatatcatttctgaagatattatttaatatcaacgagaattgaaatctcaaaaaaattctgttggcgaatgtcagtatgaaaaacataaaggtattgatggagaaatctatggagtaaaatgttctcctaaatcaagtcccgaatttcaagagtttcgtatctggcaggacattcataacatccgaattttagaaaaagagcaatgcgtaaatggtattacaaaaattgatgtagatgttacaaaacaaattataagtgaggaagctaaagaaaaactatacgaattatttgataattcaaaagaagttacagaacaaaagatttttaatgtacttaattcactaataccagaaaaaaaattaagtactgatacttataagattaatctttttgcaaatagaaaagagttattaggtaatgaaacaaaagaagtattcagaaaaattttaaagaaatacaattatgaagtggaaggagaaaaacttttatctgataaaagtatctttaaaagattatggcacattaattattcaatcaattcatcagactcagacaaatctaccggtgggattctttctgctttaggatggaataatgaagggaccaagaaatggaaaaaagaaggagaaaaaaatttcaactggaatttatttaatctgcccaaagaaatagctgaagcatttgcaaagctgcctgaattgaaaaagcagtatgcttcttattcaaccaaagcaattaataagcttttgcctttaatgcgatgtggaaagcattggagctgggatgttctacataatgaaactaaagacagaatagaaaagattataaatgaaggttgggattttgcatacgataagcgaaccggtgaactgattaaagaaagagaatttgcaaatgaaaaacagttttcgggtttgcctatttggatggcttgttacgtagcttatggaagacacagcgaaagagcaaatgataagaaatatactacagaagagctaaaggatttagatgtaatgaagctaattccgaacaatagcttaaggaatccaattgtcgaacaagttgttagagaaacaatgtttctggtaaaagatatttgcaataaattcggtcaaccagatgaaattcatattgagttaggcagagaattaaaaaagaatgctaaagaaaaagaaaatgcttctaaaaatgttgcaaaaaactttgaagaaaaacagagaataaaaaaattgctttatgaattaatgaatggagatttcgaacattatgatgaaaacggagaaatcataaatagatcttttgaagcaaaaccaaacccggaaaacccgactgatattgaaaagtttcgcatttataaatcttgtggtacggtaacaagcgatgaagaaaatacgaactgggaaacaatgtttaaggatggtaaaaaagaaagaatacctactaatacggaaataagaaaatatgctttgtggcttagtcaaaaatgttgttcaccctatacaagaaaaataatttcattaagcaagttgtttacagaagagtatgaagtagaacacattatcccaagaaaaaaattaaaaaacgattcatttgaaaatcttgtaatatgcgaacgaggagtaaacaaattaaaagataatgatcttgctatggtctttatcagtaaacataacggttccgaattatcctatgaaggtaaaaaatataagttgcaaaccattgatgattacacctctcattgcaaaaaaactttcaaaggaagaaaacttaaaaatcttttagctacagatgtgcccgaagattttattgaaaggcaaattaatgacacaagatatattactcgcaagattagtgaattactttatccagtcgcaaaagataagtctggtttggtttttacaattggaagtattactagtgatttaaaaaacgaatggggactgaacacagtttggaaagaaattttgaaacctcgtttcgagcgtcttgaaaaaattactgaccagagaatgattattaaggatcaagaggatgataacaaatttcactttcacatccctcaaaaccctgaactagaattaaaacgcatagaccatcgccaccacaccttggatgcagtaattattgcagctacttcaagagaacacatccgctatctcaactcattaaatgcagttgataataatgccgaattgcagaaagtaaaaagagcattggttaaaggtaaaatacgagattataaattaccttgggaagattttacaaaagatgcaaaagaaaaattgaatgaaaccattgtaacattcaaatcgaacaataaggttgttagcaaaccttttaacaaatatattaagtgggttcaaaacggtgatagcagctgggagaaaaaagaatgttatcaagaatcgaataaaaaatggatggctgtccgcaaatctatgtttaaggaaccgcaaggaattatttggttgaaagaaaaaaagaaggtcccagtcttagaagcattcagggttcaaattgagagaatgaaagttgaaaatgatagcgaaaaaagaagaacaacaagctatgtgtacaaccaatatgcaagatcaatcataaaaaatattattgaaaatattggaattgatcttgaagacacagaaaatcttttaacagcaattaagaaatacttaaagaagaacagcaaaaaaattgaaacaggtataattaaaaagaatggtaaacctgaaaataaaactgtgtatatgcttgatgattatcaatttgaaaaaattgagattgctgagtttgttgaatatgccgctaaaagagtaaaattagacaattcctttacacatgataaaatagataaaatcccttatcagtttgccaacgaaggtaaaattaacattgccaaattgcttcatcaacatttggaagaatacgaaaaagatgaaaacaaaaaagtatcagaagcattcattggcgagggtttagaaacattagcaaaaaaagtagggcagagaattgataaggtcacaatttatgaaaagaaatctgctgaggataaatttggaaagaaatatgtagaagttgataaaggtgccatagcatattttataatttacgaagatgaacaaacaaaagaacgaccggaaatgtattcattggcaactcataaagtcattgagagattagttcaagacaagccaattgcagataaaaaagaaggatttaaaacaataattatttctccaaatgatttggtttatgtgccaactgaagaagaatggaataaaataaaaacaggagaagaaaatgtaattgattggagaaataagaaaaaaattgccgaaagaatttataaaatggtcagtagttcaaagggagtttgtcaattcgttcagcatcaaatttcaaatgcaattattccttcaaaaccaaaagataaaatcaagggtgaaattgattggcatgacaaatcaccaaaaactttggatggccaaacaataatttctgattgttgtattaaaataatagttgatagattaggcaacataaagtcagcattatgattaagcgcactttatactttagcaatcccgcatatcttagtaaaaaagatgagcagctagtcatcacttatccttcggatgataaagatgaagataaagagcaagaagaagacaagtataaaagtaggttgaagcagaattctgtgccgattgaagacataggaatagttattttagataatcaacagattacacttagccatggtttgattgcatcccttttagaaaataatactgcacttgtaacttgtgacaacacacatcatccaaccggattattacttccacttgaaagcaaccaggttcaaagcgaaagatttcaagcgcagattgaagcttctgtcccgcttaagaaacaattatggcagcaaacaatatctgctaaaataaataatcaagccggattgttaagaaagagaaaagttcaatacaagaatatgttgtattgggctaaagaagttaggtcaggtgatcctgataattttgaaggaagggctgcggcttattattggaaaaatgtattcccatcagagcttgaatttgaaagagacaggcatggccttccgccgaataacctgcttaactatggttatgcaattttgcgggcaattgtcgcaagagcgcttgtcggttcaggtttgctgcctactctcggtattcatcatcataataagtataacgcttactgccttgcagatgatattatggaaccgtacagaccttttgtagatgaaattgtttacgaaattatcgacaacggcgaagactttgaagaactatcgacttcaattaaaaagcagcttcttgaattaccggtaaaagaaataataattgcgaatgaaagcagtcctttgatggttggggttcagcgcacgacagcatccttagttaaatgttttgaaagtgataatagaaagataatctatcctgagatttttcatgggatttaacgaatacagaataatgtggataatggttttatttgatctgccgactgaaactgaaaaagaacgaaaagtttacacacgttttagaaaagagttgatgagagatggtttttcaatgtttcagttttcaatttatataaggcattgttccagccgcgagaataaaaatgtgcatgttaaacgggtcaaagagattcttcccgaaaagggtcatgtcggcattttatcaattaccgataagcaatttggtatgatgaaaattttttatggcaaaaagaaggaggaggggtttattgaaccccaccagcttgaattattctaaccctcttatctcctcccctttactaaaggggaggattaaggaggggtttccttaacaaataaaaacaaccactgcgtaacagaataaaaacaagcattcccattttttcaatcctatttcagcagctaagttctttattttcaatgacatgatcatgggtacgttgttgtaaatcttgtcaaagaaaaatctgaaagcaaatcacaacgccatattactacggaaactctggatcgttgttgttgtaaatcttgtcaaagaaaaatctgaaagcaaatcacaacagagttctaatttgttcttgttgcaatactgttgttgtaaatcttgtcaaagaaaaatctgaaagcaaatcacaacagctactggcttgtttgctttgtccaaacggttgttgtaaatcttgtcaaagaaaaatctgaaagcaaatcacaactatgagtaatcacatagcacaatcacccgtgttgttgtaaatcttgtcaaagaaaaatctgaaagcaaatcacaacctgataaaagagacggtaaaatcagtattgttgttgtaaatcttgtcaaagaaaaatttgaaagcaaatcacaacaaatgtttgaatgcaaccgggaaaaatttagttgttctaaatcttgtcaaatcctccagaggcggacaaggaaaaatctgacctgtcccgattcatactgattgcgtattgtatcgggaaaacaaatcatcccgattcaaagctttatcgaggtgtatcgggatcaaagaatcggtttgaggcgcagaaagctaatcacaacgtggtatccataataatttttctcttaaatttgcaatatgaaaacaattatccttctgctaacccttgcgtttgggattttattccctcagggtcatgttctctcatttcttcttaaatattttttaatgggtctgctgctgtttgcatttcttgatattcaaatagataaaaatgtgattaagaaatctcacttctatattttaacagcgaacataattgttccgttagtgctttattttttgctaaacttattcaatcatcaattagctcagactgcatttatcacggcgttagcaccaactgcaatagctg

SEQ ID NO: 4410 - DNA, 25067 bp, synthetic construct
  source 1..25067: mol_type = other DNA
  misc_feature 1..25067: note = Synthetic
ttatgccggctctgcattgagttcatatcaggactacagacctgctgcttctttcccattcagcggtacagttgaacacagaataatatggcagttgggcgatggtaataccggtttctacattggttataatcttccacctgaagcgacgatacttatcaaagatgaacttggtggaatagtcttcaatagtggtacattaagcggttcaggtacttatcatattactgcaccattaacatctgcaagaatgaccgttacatatactaatatagggaatgttcctgcaccgggttttagtttatctccggcttcattaaacttcggaccagtagctgttggttcaagttctgctgctcaaacagtgactgttaccaacagtggaacattaccacttagtataactaacattacatcagataatgctcagtttactttcacatctgcagcattaccaattacagttcctgcaggtggaaatacaactgttgatgtaacatttacaccaagttcgttgggtaatcaatcaggtaatattattttcacacacaatgcccccggctcaccaacttcattacctgttcagggtgttggtgcagatgcaggaccaacatttgcagtatcacctgcatcagtaaactttggaaatgtttcagttggtaatactgttactgctaatgtaactgtaacaaataacggattaacaaatccattggtaatttcaagtgctgttgcagcaccaggtgacttttcagtttctcctgcatcggcaacagttccgcctttgggaagtcaggtatttacagtgtcatttactccaagtgccggcggaacaataaacggtacattaacatttactcataatgcatctggttcaccaagtactgtaaacctcaccggtaatggtgttgctgtatttggattaatcttcgcacaagatactgtttacaatcttgaagactcatcatatacagaaacaatgcaattaaagagtctgagtgcaaaagcacaggcattgcagttcagaatacttgtcaataaatcagccggtgataatatattccttacattccagaatattcagaagggttctgatgtaagtgacccaagttgggttcttcagtataatgtattccgtggtcctttaacttcaaacggagcttcggtagattctatttatgtattactttacaatctgaatcagaacggtggactcaatccgggcgattacaatgatctgttcaaagttaaatatcgtgtagctgatctgcccgcactcgttgatacagcaagatcaaccttcaagataacaaatgcagaagcatcaacatatcagggattcccgattaacatcactccttcgagaaatacccttacagttcttgcaactaacagagtaagaagttatggtgatgttaacggcgatggtttcattgacattcttgacctgattgatgttgttgatcatatcgttggacgtgactctctggatgcagctgaatttgcacgagctgatattgctccgtggacaattggtgcaccggatcctacaccagatggatttgtaaatgttcaggacctctcagttatacagaacataattcttacaggattctatccaagcggagttcaggttaataacaaacccgaagttcaaaacaactatcttgctaaatctaacggtgatgaagaggcaaaacttattctctatctgaataagaatggaattgcaatgcatcttgattcaaaagttgcaatccgtggtgctcagattcatttcggacagttgcctgataatcccggcaatgtaaatatggagtccgaacttggtggcggttattacttccatcaggttgatttgctgagagtacttatgtatgatcaggcaggtcagaagtatattgaagaaggaagacactatcttggaaatattccattcacaattcagagaccacaggatatttcaattgataagttaatccttgtaagcttagataagagaaaacttacaaacattaaagttgaaataatctatggcgatgcaccgcttccttatgattatgaattgttccagaacttcccgaatccattcaacccatcaacaagtgtaatgttcactgtgccgaagaacggattggtaacaatcaaagtttatgatatgctcggtcaggaagttgcaactttggttaatgaagttgttgacagaggcgtttacactgttaactgggatggattgacaaatcagggttcctatgtggccagcggaaactatatctacagaatggttgcaggtgatttcgttaaatcaagaaagatgatgttaattaaataacgaaaacttaaatccgctctccttgaaaaacaggagggcggatatttattattaactgaagggatgctgtatgaaaaaacatttattctttttaactgctttgtttttgtttagtacattctcatttgcacaatttcaggaaccaactgtcaaactgcctcttactattgatgatggagcaggtgcgagcagaacaatgttctttggactcgatacactcggaacagatggcattgatattatttttggtgaaagcgatgtaccaccgtttccacctatcggagcatttgaggcaagattctttttacctgaaaataacttctcgggttcactcggttcctacatagatatcagaaatgctacattcccctttacagggcagaaagaatttcgtcttgcttatcaacctggtttcggaaccgttataaatgtaacctggaatcttcctcataatcaggcaaacggagtattacaggatatcattacagggactttaattaatgttcctatggctgattccggaatgtacactgttactaacccgaatgttttcaacagattgaagatgttaataaacttcgttaacattattcctgtagaactttcttccttttctgcttcggttatcggctcttcggttcagcttaactggactactgcaaccgagttgaataacagcggatttgaggttcagagaaaaacagataactctgactggcaaacacttacttttataaaaggtgccggaacaacaactcaaccacaaagttattcttatgttgataattctgtaagttcaaacactaaatactactacagactcagacagaatgactttgatggtaaattcagtttttcaaatgttattgaaattgacataagttcaccgaaggattattcacttgaacagaattatcctaatccttttaatccttcaactaatatttcttttacattgccaaagtcatccaatgtaaaattaaccgtttataatcatttgggagaagaagtaacacaaatagtaaatcaacagcttgaagccggaacatttatttataactggaatgcaaacggacaagcatccggaatttatttttatgaacttcaggccgatggttttaagcaaacaaggaaaatgagtctcctgaaataaaatgaaagggaaaaaaaatgaaaaaaatatttctttcaatagtactgttttttactataaacatattttctcaaaatccactacaacctcaaatatcaataacaattactgttactgatggtagaaacgatataagaaatctaaaggttggtattgaccctttagctacagatgatatagatgaaatccttggagaaggcgatctcccaccctttccaccattatcagtatttgaagccaggttcaaccttccgattaatgattttaatggtacaaggtcatcctattgggattttagaaacggaactgcaccatttacaggaactattgaacatcgtcttgtatttcaaaaaggcgaaggagattcggtagttatatattggaatttcccaaattcagttactgccttattacaggatatcgtaacggggggattcattaatattcaaatgagtggtgaaggtgaatttgttgtcccaaatcccgatgtttttaataaactgaaattattcattacatacaatggaactacagacattgaggataacggtttaactgttaatgatttctgcctctaccaaaattaccccaatccttttaatccatcaacaacaataaaatattccatagaaacaactcaatttatcacactgaaaatttatgatgtccttggtaatgaaattaaaacattagttaatgaaactaagcaaccaggattttttgaaattaattatactcctgaatatgaattaagcggtggaatatattaccttgaactaatcggaaataagctaaatgattcaggagacttctctcgaaaagtaaaaaaaatgatatatctaaaatgaaagttaaggttgttgaagaagaaattcttattgattttacaaatgttttatctactactgatattcattttaatcctgtgattaaaaaaaagaactatttaataaaatcttttaatagtattcccaaaaaaactacaagaattttaggtgtttcaattaacccttattattttacttgttcatgtaaggattttcgagctaaagctaaagaatttcccaaaagagattttagaagaatgtgcaaacacttatttatatatttatctaagtatcattgggatgagatggactcattaacaaaaatattattagagcataaattttgggctaagattttaaatgtaattgaaattgaaataaatgagaacactttttttattggtattactaaagagtcgatatttattatctatatctaacttcgactctaccaaaatactactcttataattgttttctgaagcaatggcgtaataacgacgaaccgataattgaaaatgaaattaaaagagcgcttttaaaattatttcacagattaaatcttttttataaaaaagttaaaccgccaaaaaagactttggcggtttataggaaaaaaggataatttgaaaagtaataaatcgaatattataaaaaaatcaaaattcctgatataaaatacttagtaaaaaatgaagtaccagaaaattattacaaatttaaattaaaaagattttttttattgaagtgtgtagtaataacactcaaattaaaagcaagtgctttctttttgctgatcagatcaaacatctttgttttgtactcaattttctccagcctgctatgaaatgaatcgggttcctttgaaagcatttcatctatctgttttatttcttcttttattttctttgtttgagcttcaagctcattgatcagataatttatagctccgtttccgttagtaaatgtattcattggcacctcactgattgaatatttatctgttctaaaatcgctcttaaaagaattatatgcaagacttttgtaaaaatttaatattgaaataaaggaaagatgagagaaattctaaaaatcggatttttctttcaggaattcagataattttttctgtgataaagtaacaccactgaattttgatgggattttcgtggtctcggaaagtttttccaatgcactgactatcaattgtacagatcgaattcctcctttttcatcgagataattaagtaatatttcagtcaaattattcttatcggaaaacaaattccttagatgatttgaagaaaagatatattcggaattcagaacggttataagactgttctttatttcgtgtatattcaattttaaaaatctatctgtaaaatcaagaacatctgattcaagagagttctcgggaacaatacgccatactaccttttgatttcccacctcacttctggaatcaaatacttttatattcattaaaaaatttaatttcattggttcacttgtttttaatttcagataattcgaatgtaagtgttccataaccaaggacatctctaacgaaactcattaaaccacctccctgaatttcaacttcacttttaataattccaatatcttttgataaccattctgtaactttattttttgttcccgaaccagattcaatttctgtaataactttcatagtattgaactcacctgctttaacttttattgtttcaaatccgattgatgctgattttatttcaagtgtattgatttcatcattgttgaattctttacctctccattcccaaaactgccctgggataatgggatatttaaatcttgggagcggctcgttgtaaaaatattttgattctttatttacaaagagaagtattttaatcttttgataagtttcttttatataaactccatcttcttttagtaataatttttgcctgtaaacgaaatcatcagaaatcatttcggttgtataaatctcaccttttttttcaatcgaaagttttagttcgccaaaattcgaatcgtaaaacagctctttattgttatccaatgggaaataatcaactttcgatatgatattttttattgtagtaatttccgaattatcagtttgcaaaactgaattattctgaagtaatattaaagcaaatagtaaaactgtataaagtaaagtttgttttttcattttgtaatacattttatttttagtaatggtaagataaccttactcttttaagggaatgttaagaatatgttaagattagtttaattaattacaggaatttatttttcgagccaaattaaataactaataaacattgctatgattcttgacgaaaacagtaaaagacctgaaattgaatatccctgcaactgggattataaaataatcgggacagatgtgagtgaaatggtaaaggtaattgaggaagctgttggtgatttgacttatgaaataactccttcaaacatcagcaagaaaggcaactatttcagtctgaatcttacagtatttgttccatcggaaattgtaagagatattatatttcagaaagtatctgcgagctcttttgttaagattgtgttttgatttttaatctgtttttctgaatatcattcttattcccgattcagattccaaaacaagttttaacttttcgattttatatgtgaatgatttgtcatttagtgcttcaataactttctgctcaacagtcatatcaggacaagccattttagttgagataagatttccgaatataattttattacctttaacttttatagctcctgacatctgattgcaacctgcatgtccgctgaatctcatatcagcaagattgaactcaaacattggcaaacctttcatcagattttcttttttcaacacaacatttgtcatctcttccattatccaaatatcattcaaacgataatcatataaatattttccgcagccactaaaatcagtaaagtttgcttcgttgctttttttgatttgaatacgaactttataatcaaacatttcacccgacatattatcctgacatttctcttttgaaattgtaacagataactccccactttcagtctgtgctctgaagtttgtaacatcggcatcctgagcttttattcctttaactgccggagtcctaaaattaaaaccgttcatttcggaaaaattcattgagctgtcaaaatcaatttcaagaacccagttaggttcgttgcctcttgcataaaaatcaattcctcttaaaaatttttcccgatagaatgaaggagcaacaatctctgtcttgcccgaatcaggcagattagaattgttatcgctcattttctgatgagatgaacaacccgaaaatgtaattagagtaatcagaacgcttaaaattattttcataattaaatccatatttgttaattcaaatttaacagtaaaagatgagaacatatatttactaaattgaaaaatcctgttggtcaattcagataaaaattttaataatttgctttgttcagaggcaagaattgaattgtcaaagaatttagttataaaaagaaaagggactattccttgcggaacaatcccttctctcagggggcatctatgaaacaaacttatgcagcttgtgttaaaagctctttttcaattgcctgttttaaggtttcttttggtaaagcaccaactgccattttcggctgaccatcaaccggaataaataataatgatggtatgcttcttattccgaaaaccgcaccaagttcctgctcttcatctgtattaactttataaatcttaatctttccggcatattcttctgatagttcttctaaaattggaccaacgattctgcaaggaccacaccacggagcccagaaatctatcagtgcaggtaatttgccctgatacttccactcctgatttttttcgtaatcaaaaactttttctaaaaatgtttcttttgttaaatgttcagtcattgttttattgcctttcttaaattataaattcttagatttattaaaatccaatcagtatgatgataaacccgaaataaggtttcaaagttcattaaaatttttgggcgatttaattagcattaaaattcccacatttttattaaactgcttcaagtactctttcgagctttatcttaacttcttctgcaacggctttcatattcggattatcaattatataagctaatatcatcggatcaaatactgaaactactgacttcccttctttttcataaactataacattacagggtaaaagcaatcccaattcttcttctgcctgaagtgcctgatgagcaagcgaaggattacaagctccgagtattgtatattttttaaaatcaacattaagcttattctttaaagtttccttaacatcaattgttgtgagaactccgaagccctcttttttcagttcatcagttactttctgaattgcttcttcaaacgaataatctgttattttagaaaatccgtatttcatttcttaacctcgtttgatttttcttcattttgttttggctttgatttccagtttgttaaaagtaatccgattgccccaccccaaagcatgctcgtgtatggattgcctgtaattgcacaaccgcgattacaaccaacataataataatacagatatccaccgataagtccggcaactgttggcagaataaattttgcccatcgttttattatttcaaatctgctttgttccaaaaaattattcctcctttaagatttgcagaattaaatccaagcttacgtagtttagatgcagcaatcaaacttcggttgccggttctgcagtagcatattatttctttgtctttgaacttcaaaagttcttttttatcagcacctaaatcataaagcggaatatgaaaagaaccctttatataatcctgtttcctttcctgcggagttcttacatctagcaggataacatttttatctttctttaatttttctgttaactcagccggcgaataattcttaacagaacgatagagatatacttttctagctatataaagaatcaaaatgagcaaaagaccataaaaaaatatttgtgaagcgtccataaaactttcggattagttattaaatgcgctgcgaagataaaatccggattacttttaagctatgataaaagcataacacaaaaagtgaaattataaaagataaagacaaacagatttgacataatgaccaatagaagtagttgtgtataactttagtgactttagtgcgactttgctgcgactttatagcgactttatagcgaagatatgatgatgctagaaaagtcaataaaaatgaggtttttaaaaaatcaggaaatacctttgctgacaaattgtcattcagataataagtataaactattatggaaatttaaaagttaagtagttattttttgaaagattattttatgatatgtggggaaacaaatattcaaaacattccttccgaaaaactttccgcaaaaaaggaatgccgagttggtgggcaaggcagggaaatggtaaaaaaaatgccccgctaagtgcgaggctaactctttgagcaaagcccactacggaataatccttattgtgatttgcttctaaaataaaactaaaaaaaataaaggagaaatgcaaaatggaattcaaaaaagtccttgggcttgatattggaacaaattctataggttgcgcattattaagtcttccaaaatccattcaagattatggtaaaggtggaagattagaatggcttacaagtcgtgttataccattagatgcggattatatgaaagctttcattgatggtaagaatggtctacctcaagtaattacaccagctggtaagcgaagacaaaaacgcgggtcaagaaggttaaagcacaggtataaattgcgtaggtccagattgataagagtcttcaaaacccttaactggcttcctgaggattttcctcttgacaatccaaaacgaataaaggaaacaatatctactgaagggaaatttagttttagaataagcgactatgtcccaatttcagatgaaagttatagggaattttatagagaattcggttatcctgaaaatgaaatcgaacaagtaattgaagaaattaattttcgaagaaaaacaaaaggtaaaaacaaaaatccaatgattaagcttcttcccgaggattgggtagtctattatttacgtaaaaaagctttaataaaaccaaccactaaagaagagctaataagaatcatttatctttttaatcagcgaagaggatttaaaagtagcaggaaagacctaacagaaacagccattttggactatgatgaatttgcaaagagattggctgaaaaagaaaaatattcggctgaaaattatgaaaccaaatttgtttcaataacaaaggttaaagaagtagttgaacttaaaactgatggcagaaagggtaaaaaaagattcaaggtgatattagaagactctagaattgagccctatgaaattgagagaaaagaaaaacctgactgggaaggaaaagaatatactttcttagttacacagaaattagaaaaaggaaaatttaaacaaaataaacccgatcttccaaaagaggaagattgggcgctgtgcacaacggcgcttgataatagaatggggagtaaacatcctggagaattttttttcgatgaattattaaaagcttttaaagaaaaaagaggttataaaattcgtcaatatcccgtcaatcgctggcgttacaaaaaagaactcgaatttatctggaccaaacaatgtcagttaaatcctgagttaaataatttaaatatcaataaagagattcttagaaaattagctacagtgctatatccatctcagagtaaatttttcggacctaaaataaaagaatttgaaaatagtgatgtgctacatataatcagtgaagatattatttactatcaacgtgatctcaaatctcaaaaatctttgattagcgagtgtcggtatgaaaaaagaaaaggaattgatggtgagatttatggcctaaagtgcattcccaaatcttcacctctttatcaagaattcaggatttggcaagatatacacaacatcaaagtaataaggaaagaaagtgaagttaatggtaaaaagaaaattaatattgatgaaacacaactttacataaatgaaaatattaaagaaaaactttttgaattatttaatagtaaggatagcctaagtgaaaaggacattttagaactaataagtctgaatataattaatagtggaattaaaattagtaaaaaagaagaagaaacaactcatagaataaatttattcgctaatcgaaaagaacttaaaggaaatgagaccaaaagcagatatagaaaagtatttaaaaaacttggtttcgacggcgaatatatactcaatcatccatcaaaattaaatagactttggcatagtgattattcaaatgattatgcagataaggaaaaaaccgagaaaagcatcttaagttcattgggttggaaaaatcgtaatggtaaatgggaaaaatcaaaaaattatgatgtctttaatttgcctctggaggttgcaaaagcaattgctaatcttcccccattgaaaaaagaatatggttcgtattcagctttagccatcaggaaaatgttggtagtcatgagagatggaaaatattggcaacatcctgatcaaattgctaaagatcaagaaaatacctctttaatgttatttgataaaaacctcattcaactaactaataatcaaagaaaagttcttaataaatatttgctaactttagcagaagtacaaaaaagatctacattaataaagcaaaaactcaacgagattgaacataatccatataagctagaattagtttctgatcaagatttagaaaaacaagtgcttaaaagttttttggagaaaaagaatgaatctgactatttaaagggattaaaaacttatcaagctggttatttgatttatggaaaacactcagagaaagatgttcctatcgttaattctcctgatgaattgggtgaatatattaggaaaaaattacctaataacagcctgcgtaatccaattgttgaacaagtgattcgcgaaactatttttattgtcagagacgtttggaaaagttttggaataattgatgaaattcatatcgaattaggaagggagctcaaaaataactccgaagagagaaagaaaacttcagagtctcaggagaagaattttcaagaaaaggaaagagcccgcaaactactaaaagaacttctcaacagttcaaattttgaacattatgatgaaaatgggaataagattttttcttcatttacagtgaacccaaatccagatagccctcttgatattgaaaaattcagaatctggaaaaatcaatctggactaacagatgaagaactgaataaaaaacttaaagacgaaaaaatccctactgaaatagaagttaaaaaatatattttatggttaactcaaaaatgtcgttcgccatacactggtaaaattattcctcttagcaagttatttgattctaatgtttatgaaatcgaacatattattcctcgatctaaaatgaagaatgattcaacgaataatcttgtcatatgtgagttgggtgttaataaagctaaaggagacagattggcagcaaattttatttcagaaagcaatggaaaatgtaaatttggagaagtagaatacacattactaaaatacggagattatctgcagtactgcaaagatacatttaagtatcaaaaagcaaagtataaaaatttattagctactgaacccccagaagattttattgaacgacaaattaatgataccagatatattggccgcaaattggctgagctattaactccagtagtaaaagattctaaaaacattatttttactataggaagtattacatcagaacttaaaataacttgggggttaaatggggtatggaaagatatattaagaccaagattcaagcggttggaaagtattataaataaaaaacttattttccaagacgaagatgatccaaataaatatcatttcgatttatctataaaccctcaacttgataaagaaggcttaaaacgactggaccatcgtcatcacgctcttgatgctacgatcatagctgctactactcgtgagcatgttcgatatttaaattctcttaatgcagcagataatgatgaagaaaagagggaatattttttatctttatgtaatcataaaattcgcgattttaagcttccttgggagaatttcacttctgaagttaagagtaaattattatcctgcgttgtctcatacaaggaatcgaagccaatcctttcagacccttttaataaatatttaaaatgggagtataaaaatggtaaatggcaaaaggtatttgcaattcaaattaaaaatgatagatggaaagcagtaagaagatctatgttcaaagaacctattggaacagtctggattaaaaaaattaaagaggtaagtttaaaagaagcaattaagattcaggctatttgggaggaagttaaaaatgatcctgttcgtaaaaagaaagaaaaatatatttatgatgattacgctcaaaaggtaatagcaaaaattgttcaagaattgggattaagtagttctatgagaaaacaagacgatgaaaaattaaataaatttataaatgaagctaaagtttcagctggtgttaataaaaatttgaatactaccaataaaacaatttacaatcttgagggtagattttatgagaaaataaaagttgcagaatatgttctttacaaggccaagcgtatgcccttgaacaaaaaagaatatatagaaaagctatctctacagaaaatgtttaatgatttaccaaattttatccttgagaaatccattttagataattatccagaaatccttaaagaactagagtcggataataaatatataatagaacctcataaaaagaataatccggttaaccgtttattacttgagcatattcttgaataccataataatcctaaagaggctttcagcacggagggccttgaaaagctaaacaaaaaagctatcaataaaattggtaaacctataaaatatataactcggttagatggggacataaatgaagaagaaatcttcagaggcgctgtatttgaaacagataaaggaagtaatgtatattttgttatgtatgagaataatcaaacaaaagatcgtgaattcttaaaaccaaatccttcaatatcagttttaaaagcaatagaacataaaaataaaattgatttttttgcgccaaatcgtttgggcttttctagaattattttatcaccaggcgatttagtttatgttcccacaaatgatcaatatgttcttatcaaagacaactcttcaaatgaaacaataatcaactgggatgataatgagtttatctcaaatagaatttatcaggtcaaaaagtttaccggaaactcgtgttattttctaaagaatgatatagcaagtttaattctttcttattcagcaagtaatggtgttggtgaatttggaagccaaaatataagtgaatactcggtagacgatccaccaattagaatcaaagatgtttgtattaaaattagagttgatagattaggaaatgttagaccgttgtaaataaaaagttgctgatgtagtgcgtaaaaatttcaaccattatcatttaaatttaaaatatagagtttcagtttatcaattttcataggcataatatttgaaaaatttgttatcaaaaaagataacttatgataaaacgaactctatactttggcaatcccgcatatctttcactgaaaaatatgcagatgttaataaaattgcccatttctggaaatgataatgaagccacagatgaagataaaaatgagaaatacaaagaccgcaacaatcagaatacatttccgatagaagatatcgggatagtaattctggataatcagcaaataacaataacgcaaggacttctgtcctctttacttgataataattctgctattgtaacatgcgatagcagacatcatccagccggcttatttctgcctttggaaagtaatcttgaacaaagtcagagattccaggaacaaatagaagcatctgttcccttgaaaaaacaactatggcagcaaactatttcttcaaaaattataaatcaggcattgctgctaaataaaattggcgtaaagtctgataatatgaaaaaatgggctcgcgatgttaaatcgggtgacccagataatcttgaaggaagagctgcggcttattactggaaaaatttatttccggaagaactccaatttcaacgggatagatatggaaaacctccaaataatttattgaactacggttatgccattctcagagcagttgtggctcgctcgctggttgcatcaggattattgccaactctgggaatacatcatcacaataaatacaatgccttttgtcttgccgatgatataatggaaccgtacagaccctttgtggacgatattatagtaacattagtaagggacggagaagattttacagaacttactccatcgataaaaaaacaactgttgactatacctgtaattgatgtcttcattgaagaacaaaaaagaccgctgatgattgctgttcagcgaaccacatcatctcttgcaaaatgtttttccggcaatcaaagaaaaattatttatccggtatttagattatgagattaaatcaatacagaataatgtggatacttgtattatttgaccttccgacagatacaccgaaggatagaaaggcttatgcaaaattcaggaaggaactgataaaggatggattcaatatgtttcagttttcaatttatgcaaggcattgtgcaagtaaagagaatatgcaggcacatgttaaaagagtaagagaaattcttccttctaaaggtcatgtcggaatattaaaaataaccgacaaacaatttggaatgatggaaattttttacggaaagaaaaaagaagacagcggttttatagaatctcaccagttagagttgttttaaagaagggctgaattttcagatagaattcagccctttaaatgatattaaaacccacagcttaattttttcaatcctaaaatttccgtaagtaattgttttataaagaggtaaaaccaaatgagttggtttaatatcctcaaagaacaagttgaaagcaaatcacaacgcaccaccttatttaatggcactgtaacatgttggtttaatatcctcaaagaacaagttgaaagcaaatcacaacacgatgacgggacaataagcggccacattggttggtttaatatcctcaaagaacaagttgaaagcaaatcacaactaatggttcaacaacattttacaataacccgttggtttaatatcctcaaagaatcccgacttgtcgggaaaagcaaatcacaacaaatcgctttgtgcgattcatctctgttagttggtttaatatcctcaaagaacaagttgaaagcaaatcacaactaatggttcaacaacattttacaataacccgttggtttaatatcctcaaagaatcccgacttgtcgggaaaagcaaatcacaacatatcacttagtattaaccactcaagttttgttggtttaatatcctcaaagaacaagttgaaagcaaatcacaaccaatctggggggtgagacaggtttttcattgttggtttaatatcctcaaagaatcccgacttgtcgggaaaagcaaatcacaacagtgttctcatgtaagctctcgtgaatctggttggtttaatatcctcaaagaacaagttgaaagcaaatcacaacagaactaatataattcccccatcattgctagttggtttaatatcctcaaagaacaagttgaaagcaaatcacaacttacaaaatcagcataataataacaaatcagttggtttaatatcctcaaagaacaagttgaaagcaaatcacaaccccatagcctctcgggtgttctgccaaagtgttggtttaatatcctcaaagaacaagttgaaagcaaatcacaactatatgcaattatgcttcttattgtgcttggttggtttaatatcctcaaagaacaagttgaaagcaaatcacaaccaggggttattgtaggattattaacacttggttggtttaatatcctcaaagaacaagttgaaagcaaatcacaactaatggttcaacaacattttacaataacccgttggtttaatatcctcaaagaatcccgacttgtcgggaaaagcaaatcacaacaaaaagatattgactatcttaaacagataggttggttttaatatcctcaaagaacaagttgtccaaaggatgctgtgcaaaagcaaatcacaacaaatgggacagaaatatcgtcttatgataagttggttttaatatcctcaaagaatcccgacttgtcgggaaaagcaaatcacaactatatcattatcattttaaaacctgcatacaaatagtcgcacgcttcacgtctacctgtcggtagacaggcgtgcgtggattgaaggatttttgattattcactttagtggcagactaatttctttaaatgatttattttttaatcaaggttaagaattaactttttaactacttttctctcctaattttttctaatctttgctatgcttttgtcatcgagttactctttaaaagttttattttaagataaaacttatgaataaatacatctattttatcttatctttcaaaaataccattcttaagattatgctttctcacttaagtaaaatcatacttttaacatcactaaatttagatgcttgcaatctataaaaatagatagcgctagataattccgagccgtcaaatgttaccttataatttcccgcattctgatgctcattcaccaaaactgaaacttcttcacctaataaattgtaaattgacaacttaacattgctgctaataggaagcttataagatattagcgttattggattaaaaggattgggatagttttgcaatagataataatctttgacagataaattatcgtcacttaccgatgttatagataattcacgctttctgaaatatacacgaactgatgttgccggattattaatatcatcctcagaaattacttcataattaacagcaaattcaccagttggcaaaactgttgcggttttaaacccaacagtcgaatcatttctatctgtaatgaattcaggggtaatccaatttattcctctatcagttgaatatgtcatcattatatcaccctgaacattaccatttgaaaaattaaaatctcgttcatctttccaagttacatagagtatgttatttttttcgtcatatcttgttccttcaattaattgcgaacgataattatccgaaaacattccgttcgcaggattattaggcaattgccaacttgcaccaagattatctgaataggtataataatttctcgcaccccaaaatggattagtagctggatattttgtgtagaaaagatgaattctattattagtgtctattatcaaatccggatcccaatcactatctgatgaagttatagttggaattggtggagtccacgattgtccaccatctgtactaaatactaaataaacatcccatctgttcaatccaccaacagaatccctccacgaaattgccagagtgtctccggcattatcaaactgtgcatgcggaaatgctgagtgatgtccgtcattactgcttattggaattgctgagctccagttaattccaccatcggttgaccttgaatagaaagattcagcagtgttagatgagtttgtacttccctcattccacattacatgaattctgttctttctatctattgttaaatgcggaacgaaattcccataagacatattcgagctaactcgtatggaatcatgaagaatattcagatttgaatcaagttgagagataaataatgctttaggatttacagaactccaaatcgcataaacattattatttttgtcaatagcaagttttggtgatgatgcaccaatcaccatgtcagttggagtaaatcgtactggtgttgaccaactatttccgccgtcgtctgaaaatgttaaataatgaccatatatctggttaatatttgaagcatttaattcagatgttgaaataattattcttcctccagatgtaaccaccatattattgtataacacgcctcgttgttttggattaagcgattcgttgtaccttggtagaagaatttcattttgccaatttgttcccacaccatgttggcaaaaagttgttgggaaataaaacgaaatgaccataaataaaattagcttatatggaaaaagtttcatgtatctctccagcatttaattatttaatcaataagacatccattagcaggaaatagtttaaagaattataaaaaaaattttgttatggaatctaactatctgaaaattaaagagataagattaaatcaaatggtgcaaggggtttttcaaaagctatttctttttacttaataataatgttcaataaaactagccacaacccaggcagcagtataattatcagcaagcataaccgctgcaagatgagctttctgctatatttcctcctttatttgttaaattgttagcccattgcgagcaattgagccataacagtttcagttacttcatctccataaattgtagtctgctgcaattttgctgcataattggttaatgcatttacattactttcagtatattgccttgtttgttgtaaagcagtatttaatttaattaatgcagcttgttgtttttggtattcatttaagtgagttcgaaatgcagtcgatattacatcgaatgattctttaaaaccttggataatttctctggctttgttaaacccctgtgaaatagaagttattaagccatttacttcctgttgaccatacttgaaacttttataaagttcttttatattatcatcggttaaatttaggacagcattggcgtctttaccgtctattcttaattttaggattatttcattggttggcatatggataacttatttttttggatcgcaatattgtttattatcatctttgctgattggttaactatcaaattattttataaaaaataattatttatctttaatctttttccattccgcaactcttaacctcatctcgtttaattcacgcactttaatcaaataataccaatcataacaatactcaacatttaaatcgttgatcaaatctgtctttgatatatcgccttcggagagtttaaataataccgggtttatatctacgcttgcgggctcataatagttaacttttaattcgcttaagctctcaagctctccggctgctctgtcatattcctcattcagtttatcgaagagcccgatgtatttttcatcaaacttttttttcgtgtaaaaaaatcattgatagccctgcttacttcattaaaatcattttcatatatatccccttcaacaggtttatcgagtataattgcaagtaaatcttctacccggttatcagttaacaacaaggcaatagaattgttgtcatccgggtttataccgcctaatatttttaatatactcccccaatctttcagagtatatttattttttagatgataagtctgctgatttattgtgtatgtgtttgtcgtcgtttgcattaatttctccttgtgatacaatctttagcgtgattaattcttttagttggtaagtttttgattcatccggcacattacaaaccagttcattattaacataattaaacccgttcaaacggcttgaggtataataaccctggttaccgtttttatcgaatgctcttaaggcataatttccttttccaatctttatcttaagttccataaattctcctttttaaaagtccctctccttaggatggcacagccattcctaacggaagagggatttagggtgaggcatcttaataaccaaatttaattgtaccgccggtagttcctcttgtatccgcagcactaccaccattaccagtcccatacaaaaatgacactgcataaatcggtactcttccttcaagcactattttaagtgttctttcttcatcattaattaccatttcatcggtttgcgataggacatttgtattgaacataaacttatcataataggccccggcatttttttcttggaatattacttcgtccagcgctcccttgtttaatcttgtaacaaaatctgcgatggcagcttccctgaaagcggttagcttatggaaagcgacgagagttgacccccaattaaagttaggattatgagccagataaatattacacaaatatcaaagattcacgtactgaaaaaccaactacacctatcagatgaagaatatggagctgctttagagggttatggtgtaacaactagtaaggatttgagttatgagcaggcagcagatttaataaaaaaacttgttaaactgttgcctaaagaattaagagaaaatcaggatcaaagacgcaaagccacaaaacaaaaatatgatgggcttggaattagatggaacgataaattaagagaacatttcgcaactccaaaacaattaagaatgcttgaagcaatctggatgacttcgccaagagttgaacataaaaatgaagacgctttcaaaaaatttgttaaaagaatttcaggaaaagaaaaactcgaatgggtcatgatgaatgatgttcgtaaaataaagaaagcaatcgagtcattataaaaatggattggataaaggatattgactttaataaatttcttgatggagacctcaaactattgatagaaatagtgggtgttgagaaatttattgaattatatcggcattttgcaaagacggcaatctattttagcgagaaaccattgatggaaatgaaacaagaatatatacgtaagaattttagaaataaatccgaaaaagaattagcgaggatgcttggtgttagtgaacggttagtttacaaaattggctcaatgaaagttaggatgaatgatcaaggagatttatttgatgaataatgagtttaaatcgcctgaaatacttgaattgcttaagaaaaaacttagcaacaaaaatcaattaatggttgatattgccgaaacaatgcgaacagctgtattgaaaaattttgagaccgaaggcagtagaatcgggaagccgtggcagaaattatccaaagacacaataaagcaaaggcagaagaaaggatattggccagggaagattctacagaggacagggcaacttaaacgcagcataattagcagctatggtgaagattatgcacaggtaagcacaaatttaatttatgcagcaatacagaattatggtggaataattcacagaagcctattaaaaacttatttaagaaaaaaaacagaaagcaaatcagcacaaaaaccgaagcaaaataaaatgagttcgattagaataccggcaagaccatttatgctattaaatgaacaggatctagagaagataaagaaaaaaataattaattcattgacaggggatgaatgaaataataattttgaataccgacctttcagtggcattagccatccctttgggattgccccgtggcgttaactgaaagcggttccctccagggcacgggacctgataacagagggagttacttccagtatttcaaataacctttccttaatttatcaattctgtttctatctctttcaaaagcattccagaatacaaatgaatctttttcttgcctaagtacaataaatatatcttcgttaagttctttgtctttgaataagccaatataacttttccttaactcgatttcgcctttttcattaatgtattctgacagccaaacttcaaatgggtcttgaagagttgatttgacgtaagagaaatatctttctctgccgtcttgtttttcatagccgtgttttaaccggtcaagcgtgaaaatatttttatcgtcatctgctgtatttaatacagaataatcagatttttcaagattaaattctttcttaagcagttcaataaatttttcttcaccgatttctttaatcgaggggaatttatccggggacggaattctctcttttacatcttttaccgatggtctgccgaaatctttataagttggctgattatcgttgagttttaaattcccaccgaaagtctgatcaaattcaagtgatgtttttccaggattataatcccaacccttgccaggttttaatttattaatgagctcattgcttcctttgattggtttgaggttcatttcttccaggtcattatcatcaagaggaattacagaacatcggcaaccccagtcgttcggtggatatattttatcccagatgggatcatcggcacggaaaactttgccatgtaatgcacgatgtgatggtctggttctactatcgagtacagcattatacatccagtaaggacggtttttaatactatccatcattgctttataatgacctgaagcataagcaacatcaatattggtgcggtagatagttttaagacgccaaggcgagccgagctgaatttctttttcaggatcaacatcgggaggcagtggaaactcagaagggacatctttagcttttactttgccccaccagccctttgctttaagggttggttttaaattttctttaaattgctgatatgttaaaccgttatcaagtgctttctgaagttcatttctaatgtcgcttagaatatctagcttcattgcctttgcaactgtgaaagcttttgtgtgtgcttctttccatgtgtcttcccagttccagcttatcttgtaacctttgcgtttgagataattgattatctgctcaggtttaagaccaattgcaagttttatgtcaatgtcctttggcattttgtttctcgcaaacctgcctgccgtcaggcagggacgctaagcaagaataaaatgagttcgattagaatacccgcaagaacatttatgaaattaaatgaacaggatttgggcaagataaagcagaagataattaattcattgacaggcaaatagttttttaataattttatttaccgactatgtagtagctccgtggcgttaactacatagaggggagcccaaggcacggaacttgcataaatcggctcctcattttttatataacaattgacctttcctataatcatcaatatttttagccggataagcattccataatataaaggaatctttttcttgccttagtattaaaaatatatcttcactcaaatccttgtctttatataatcctatataagtttttcttaattcgatttcgcctttctcatttatatactctgaaagccagacttcaaataggtcttgtaaagttgatttcacataagatgcataacgctctctgccatcgtgtttttattcataaatatgttttaagcgatttattccttaaagaacaagttgtccaaaggatgctgtgcaaaggcaaatcacaactcagctctttctatgcactacaagattgtaaacaaacatcattgctgcggct

SEQ ID NO: 4411 - DNA, 17114 bp, synthetic construct
  misc_feature 1..17114: note = Synthetic
  source 1..17114: mol_type = other DNA
tgagccttgcctttaaaattgcagtaaaagcagcttagttaaaaaaagaaatcattattatatttagttacctggaagcaggtaactattttatttttataccctataaattactttttaagtaatcgctaattttaattggtcaattcaaaactattttctttaacatcacggctattgctgccaataaacactttaaaatctccgggctcggaaacatactgaaggtcgctgttgtaaaacttcagttcttcttcggtaattttaaagattacctctttactttcgccgggttttaagtttattttttgaaaaccttttaattcttttaccggcctggaaatactgcccactatatcccttaagtaaagttgcaccacttcttttccttccatcatcccggtattggtaacggttaccgatgcaataatactcccgcctttagccattttactgctgcttaattttatatcagaataagaaaattgagtatagcttaatccatatccaaaaggatataaaggatcattgcttacatccaaataattactacgaaatttttcgaaccatttaccttcgggcaacgggcggccggtatttttatgggcatagtaaataggtacctgcccaatattttgcggaaaagtacttgtgagtttacccgatgggtttacatcgccaaatattacatcagctatagcatacccggcttcgctgccgccaaaccatacatttaaaataaccggtaaattttcactttcccatttaatggttaaaggccggccggcaaacattaccataataaccggcttgcctgtttttaataatgctcccaacaaatctttttgggcttgtggaatatcaatatttgttcggctactactttcaccgctcatttcggcgctttcgccaacggcggcaataattacatcggcctgtgcagctacggcaagcgcttcatctagcagttgttgttttgtttttccagatcggggaaaatctttgccaaacataccggcacgttgttcataaaggctgtcatcgtctaaaaaagagcctttggcgtaaagcacattggcttctgccccggcaacttctttaatacctgctaataccgaaattgaattatcaaaatttgctgccacactccaggtacccggcatattttttttattatcggccagaggcccaattacagcgattgttccaccttttttcaaaggcaaaagatcatcctggttttttaataaaacaaaactttgagcagcaatttcccgggcaaccttacggtgcgatgctgtaaaaatttctgtttttgccctttgttcgttacaatacttatacgggctttcaaataaacctaaaatatattttgcttctaaaatatgcctgcaggcattatcaatttgtgtcaaagtaatttttccttcttttaaagattgggcaatcgttgttaaaaaaccctctcccaccatatccatatctattcctgattttaaagccagagctgatacctgttgcaggttgcccatgccatgatcaatcatttcattaataccggtataatctgttaccacaaaccctttaaagccccagagctttcgcaatacatcggtcattaaatatttatttgcagtagccggaatgccatccacttcattaaaagaagccattacagtacctactcctgcatctactgcagctttgtaaggcggaaaatattcgttaaacattttcacacggctcatatcggtagtgttgtaatctctgccggcttcggcagcgccatataaagcaaagtgttttacgcaggccatgatgttgctgttgcctgaaaaatctccctggtaacctttcaccattgctttggcaatttgtgcacctaaataaggatcttcaccggagccttctgcaatgcgaccccagcgtgggtcacgggcaatatctaccattgggctaaaggtccagttaatgccatctgcactggcttcaattgcagcaattcttgcacttagttcaatagcctgcaaatcccaggtgcaggataggcccaacggaattggaaacaccgtttcgtaaccatgtataacatccatgccgaacatcaacggtatttttaaacggctttcctccactgccacacgttgtatttcttttatttttgcaaccgattttacattaaacaatccgcccactttcccttctcttattttttgggcaatgtttgaactcttggcctggccggtggtaatatctcctgcggatggaaggttaagctggccaattttttcttccaaattcattttcttcataaggccattaataaaaatcttcatcttttgtaatgggttattgccctgggccaatactccattattcattaaaaacaatacggcaagcagcggaaaatttattttcttcatttttgtaaaaagcatatttatttatttgaaaatatctgtaaagtaaatctacttataaagagcggaaaatttatttttttaatttttgcaaaatcagcggttgccatatagcataaccttttttgttcatgtgcaatttatcgtttagaaaaattgactcattgggcgatccgtctttgtttaacatggcatgatacacatctacataagccgtattgtgcttatctcttaaaaaagccctaatcataatattggcaactttaaacttaggcataagttttatccttgccgggctgggtttcatgcttacatatactattggaatttttggatattttttgcgaacgataatgaataaaagctcaaatctttttgcaacctgcgatgggtaaaggctatcgttttcggcaaagtcgttctcgccgcaataaattacaatttgcccaggctgatagggataaacaatatcttttacataataaataaggttgttgagtgtggcgccaccaaatgccctgtttaaaatggaatagcggggaaaataatcttgtacatctttccacagggtaaatgaagaactgcctatgaaaaggatttgatttttttcgggcatgcttacactatcctgctgccgaaatttttgaatatcgctgatgaatggctgcgccgataattgcagggttgccattatcgtcaataaagtcaaaactaatttcttcatgctttcaaatataaaatgaaaaaaagaatagaaatgttaaagcaacctttattctaccctttgcacaggtatcctttcacttgtgccattttcgttcaccgcttcaatggtatagtaataatcttttttcaaatccattgctttcatccagtattcattattgttgtgtaccattatgcaggtgtacagtttattgggatgtgttccgtaataaatgttataggcaaaagcatcatttgcaggtttccatttaataaaagcgctgcgtttgtctttttcggttcttaaaacaataaagccttctacttttgctggcttttttccattgccattaccaaaaacccttaggccgctgattgcaaattttcctgtgggcatatgtacattctccagctttataaaccttgcctgtaccggtttttcaacaaccatataatcatgcggtacatcggttttgtttttacttttatctaccagcaaattccattttttaccatcaagtgatgaataaatgcggtattgatgatattgattattgtatttgcccaggcgatctgcagctacatcctggtcggcataattaatttgtattgcatttacggtacttatgtttcccaaatcggattgtatccattcacctgcattgcctgaatttgcgcaccagtaagttttcatcagttcatctactgcattgtttgcatgatagccacccaaagtagaagaaacagtaaccggcttgttataatttagcagcatccagccggtgaaatacggagattgattatttacttcaaaactatttgtcttaatttctgatgatggaatataatgcggataatcgccaaatgcggtattgcaccacattacatcatctttgtcgaagccagccggccaaataccaatgcgcctttcaaaagtattttttacagcaatagtattggtgcttacatgccagtactgcccaaagttatcggcaaaagtagcgccatgcccggcgccacgggcaaagccacccagctttatgctcaaagggtcagattgtggcgtagtttcgctgccatccattattggtccgctggaaaccactacgccatcggcataaccgctgaactcggtacctggtgctccatactgaaaataatatttaccattatgctttgtcatccacgcaccttcaataaagggatctaaaaatgtattgtccatgtgctcgccaaagcgttgccagccatagcgccacttctgcagcaaatacatgggcgcacgtgtaccaataggtttcatggtttttctattgagttcaatgcccatagttggatatcggttgctgctgccattatacatatacaatcttccatcgtcatcggtaaaaaatgcaggatcccagccgccaatttcaaaactatccaccagcggtttccattcattggctttgggattggtgctcatccaaatactaaaattgcttttgtaggtagaacccattacaattattgtatcgccaataatgcctacagcaggtgcacaaagctcatcgtaagttcccgtgttccatggtcgtaaaaatcttcgggaaataaattcccagttgagcatatcgttgctccaccaataaccccattggtttgtactaaacaaataataatcgcctttgtaatttacaattaccgggtcggccgtggcacggtggttgccccattgtgcaaaattgggaatgggcgtatagccataatcaatatttaccgggttgcaataagtttttaattgtgcagtagcattaaaaaatgcaaaacaaataattattgccgaaaattttttcatttttacatgtttaaacgaaaaatattattttttcaaccaggggctttcaaaacccagttttattaaacctttctttacttcggggcaactcataaacaagttccataataaattgctgcggtagttttccatcattaccacaatcggcccctggtcaatggcaaggtaacgccggggaaaccaatcattggttacgctaaaggcatcgtagaacccgtatttacccagcaatttatttttgtaatggttgtaccaaaatattaaagcagcatttgattgattgggagtatatggaaaagagctgagggcagccgaaggcgtaagtacacccaaatccctttcgattgttggcgcatggtgcgaatagccttttaccgaataactggaggtaagcccccaactgctatccgaatattctttaaacttcaacggattttctacacaccattggtaattgattaaagactgagtaatattctccttcatataatctgcatatttatcttttaatcctcttgggtccaggccgagataagaataatgtgcccaaaacatggggccgccgttccatgcatcgccctggtgtttcatttgcaaacggaaaggaaatttttctgcaatgccttcagctttatttacttcatttatttttccattttgtgcccatccttcgtggtaaacctttgccgctacagcatgtgtaggcgatgctgccgcaagcacatacatgattaagcactcattatacccgtgcactctgaaatccattttccaattataattggggctccagtgccaaaacaatacattttctccattcgtgtaccagtcaaactctacctgcttccataatttatctattcgatgtgcaatttgtttttcgatgctgttgccgtttttaaaatattgccttacgcaaagcaagccctggagaagaaaggaagtttccaccaaatcaccaccatcatcaaacttgctgaaaggctttgttttaccggtttcgccataccaccaatgcggccatacgccatgaaatcggtcggcagtttccagaaagtttactattttattaagttgggcaacaccctgttccctggtaataaatcccctatctatgcccacaactaatgccataatgccaaagccggaaccgccactggttactactcctgcgtctttttgcggataaatactatctgcatggatgcgttcccttgccatgccgcttaccggttctgccccatcgtagaagtattgaaaagtttgcctttgcaacaaatcaaaaactgcattattagaatattgagctgctgaaaaaggattggatttatatactttggtattatggcatgagaaaaagaaaccggttaatattgctaaaagaagaaaaaaaaatttccgcataatttcaaatgagcattttgtgaaaataaaatttataaatatggagcagtaaaccctaaagtcaacatgcctgatttaatttcgggacagcttgtaaataaattccataacaatccggtgcggtaattttcaatcatcactatcattgggccctggtctattgcaaggtaagaagaagcaaaccattgattttttaatgaaaatgcatccacaaacccatattggccccaaagtttatcgcccaatttataataataaaattttaatgcctgcatagattctgcaggcgtgtaagctatagaagaaatggcagcagtgggcgcaataacgccaacatcgttggtaggtgaacttgcggtatagccattttgaatatcgcttgccgttaaaccccagcacaattggctatacccatagtttgaaagtgggttggccttacaataattataattgatgcgtgcatggttttttgtttgtgtttcaaaacttatacctccatcctgcaagccaaaaggatttatgcctaaaaaactataatgagaaaaaaacaacgggccaccaaaattggggcctaagggcaaggtataaccataataggtattgccgtttaaatatccgcttccacccttccagccctggttataaacaattagcggaataccatgcgtagccgatgatgctgcaagaatataggtgattaaacattcgttccagccttttatgggcaagttcattgcccagtcaacggtagggctccaatgccagtacaatacattttggccgccacggcgaaaccaatcccattccacacggtttacaataatattgatatcatctctcaatgttatttcattcgtattagccgcatcaaaatattggcgtgcacataataatcccataacaaggtatgaggtttccacaaggtcggcgccattatcattagggctgaaaggcactgctgcaccggtatttccatttatccaatgaggatatgcgccatgaaaggtttgcgccgtgttttttaaaaaagcaactattgtttgcattctttgcaaaccttcattacgggtaataaaactacggtttatgccaacgggaatggccataatgccaaagcccgatccgccgctggttgttacatcgcctgatgtatttctttctcttgccaggccgcttgccgggtggccaaaatcccaaaagtatttaaaggtttgctcctgcactttggtaagcaatgcatcttcggttattaaagggaacttatccgaagagtctattttacttacaaaatttatggttagcgccgagagcaatttacctccggcctgcgactttagtgttgtatttaccgaaagagaatattttgttaaggcttgtaaagaaagattgggaataatattaattgcactatcgccattagacattgtactttgataagaaattaaagcgccctggaaattcctgaaatttaaggcaggcgaaacagtagctgcatcaatttttgtggagaaataaaattttattaccggattaaaactgcaatcatattttaaatttaaaaatgctgcgccatcaatagttgcggaggaaacagaaaaaccgggtggcgtaaccggcggattttgatctgaattatcttttttacaacccaaccataaaaaagacatgaaaacaatatagaggcattgcttcataagcggtataaataggcattaaatttacgataaattctacagttattattgctgctgaagaaacttaacagtattaatcatatcaaaatgcaatatcctgtctttatcattaaaacgcacatgcttcctatagcctgcaagaacagattctaatgtaggagaagattttaaaggcctcctgaattccattgcctgtgcggctgtaaataattctatggctaaaattttatacaggttatccaacagccttttgcattttgttgctgcatttgcacccatgctcacatggtcttcctggttattgctggatgggatggagtctacacttgccggtgtgcagagttgcttattttcactcactatacctgctgccgtatattgcggaatcataaaaccgctgttgagccctggattttttaccaaaaacggaggcaggccacgctgcccactaatgagttgataggttctgcgttcgctgatacttcctaactctgcaagagcaatacacaaataatccagcgccattgccaatggctgaccatgaaaatttccgccactcacaattaaatcctcatcgggaaaaatattggggttgtcggttacggaatttatttctttcaaaaatatttcgctcacatattcaatggcgcctgcgcttgcgccatgcacctgtggaatgcaccggaaactatacggatcctgcacctgcgatttttttgcgccgcaaatttcactgctttgcagcaggtttctcatttcagccgcagccgatagctggcctttatgggagcgaaccaaatgaataaattcattgagcggctcggtactacaatcaaaagcatcgaagcttatagccgcaattgtattggcccattttgccagctttgttgcatgtattaaaatatagcaaccataagcgctcataaactgagtgccattaattaaagccaggccttctttactttgtaaattaatgggctgccagcctaaatgctgtaaggctttagctgccgctattatactgccatcaacctttactactccttcggcaataagcggcagcgccaaatggctcaaaggtgcaaggtcgccggatgcgcccagggaaccctgtgtaaaaattaccggaagcacattgtggttatacatatccacaaaacgctgaacagtttgcagctgcacgccggaattaccataagccagcgatttaatttttaaggcaatcatgagctttacaattggttcagcaacttcctcgcccattccgcaggcatgtgaacaaatgaggtttttttgcagctcttccaactggttgttttcaataactacgttttgtaaaaaaccaaaaccggtattaatgccataaaatggcgctaggcttttcttcaatttctcatcgaggtaattgcggcattttacaatattatcctccgcagttttactaatagaaaccttatggctatggccggttaaagcggtaagctgatctattgaagtaaacgggttatcgagaatggttggttgtaggctcatataggcaatatccttaactggtaaaattttataaaatttaattcaaaagtaaataaaagagataatattggttagtaaaataaacaagctaaaaatcaggcgggcaacctgaggtcgcaaaaataaagttatagctacaatcactatacacaaataaaacgagctatccttaaaaatcctgagcagaaaataaattttatttgctaatttgaagtttaaaatccggcctttaggaaagaatctgctaaaacccatgaaattgaccggctatataaataccttcttaaaaaataaaaatgcccctgttaaagtacaagggcaaaaactaattgaggtaaacctcactacggaatataatccttattgtgatttgcttcaatgcaaatatataaaaagaaaaaaacatggaaaacaaaatgaaaaaaattctagggttggatattggaaccaactctattggggctgcattaattaacataccaaaagaattttctgattatgggaaagaaggaaacattgcatggataggcagtagaatcattccaaccgatggtgattacttgcaaaaatttgaaagtggcgcacaagcagaaacaaaagcagcatttcgaaggagtaaacgtggcgcaagaagattaaaacacagatataagttacgaagaacacgacttataaaagtttttaaagcattaggttggcttgatgaaaattttccattagatgattcaaaacaatttaacaagaacataaacgaaaatggctactccctaaaaatcagcgattacttacccttttcaggtgaaaccatttctgaatttgaaaaagaattaggtattgatggtaagaaaagtaaaaaaggtaaaagcatagtccccgaagactggattatttattatctgcgaaaaaaagctcttaccacgaagattacaattcatgaattagttcgagttatttatatgcttaaccagcgtagggggttcaagagcagcagaaaagatttaaaaacaacaaatgttcttccatataatgaattcatagaaaagaataacaaaaaagaatggggtgaagaaggtatcgaaacacaatttgtagttattacaaaaataaaatcggtaacatttaaagaagaaaaaaaagataagaaaggctatgtcgtatcaaatacttatgccattgaagcagaagaccaaaggatgaaaacttgggaagaatcaagaaaagaaaaaccaaaatgggcagatgataaagacgacaataacaaagaaattgaaaaaaaggaatttacatttttagttacacataaggttgataaagacggaaaacttactcaactcaaaccacaattacctacaaacgatgattgggcactttgtacaactgccttgagtgaaaaaatgcaggaaggaaaccaacatcctggagaatacttttacaatcaaattaaagaggcatataaagcaaaccgaaattttaaggctcgtcaatatcctgtttacagatggcgctataaaaatgaattagatgctatttgggaaaaacaatgtgaattaaataaagaactcaacaaatttaatgctgctaacgcaacactcacaaaattggcagaagtgctttatcccacacaggctaaaaataatatgcctaagttatctgaattccaaaagcatgacttattacacatcataagcgatgatattatttattaccaaagagaattaaaatcgcaaaaaaattccattagtgaatgtcgctatgagaagagaaaaggtattgatggcgaatattatggattaaaatgtattcctcgttcttctcccctatttcaggagttcagaatttggcaagatatacacaacatacgagttttagaaagagaagtaaaagtagatggaaaaacaaaattagatgtagatgtaactgcttctttcgttaatgatgagataaaagaaaagctatttgatttatttaactccagagcaactgttaatgaaaaaagaatacttactcttctcaaagaaaatcatcccaattcaaacatcaaacttgatattgacaagaaagaaaaaatacattctcataggatcaatctttttgcaaggcgtgatgaactaaaaggaaatgaaacgctttctcgttatcgttctcttttcgataaagccgaatttgatggaaaagaaattgtgaatgacaaagaaaagctaatgaagttatggcatatagattattccataacctcctcagatgaagaaaaatcaaggaaaggtataactactgctttaaacaaacttttacctgataactctaacaaagaaaaagttattgagctattcactaagctatcagaactcaaaaaggaatatggctccttctccacctgtgcaattaaaaaaatgctacctgtaatgcgttgcgagaaatattggaacgagcaagatattactcctacaataaaagaaagggcaacgcagattaaacaacgattggatgacatcaaccacagcattaagagaatatcagaaattgctgatgacgatgtgcaaaaacaagtactaaaaagttttattgaaaaaactgatttagccaaaggcttaaacacctatcaggcaggttacttaatttatgataagcactcagaaaaagataaagccgtaattaattctattgaagaatttggtaagtacatacaaagagaaatacctaacaacagtttacgcaacccaatagtagagcaagttgtaaaggaaaccatgtttttagttagggaaatatggaaaaaatatggggagatagatgaaattcatattgaattaggaaggaacttaaaaaacaatagtgatgaaagagataaaatttcaaaagctcaggataaaaacttcactgaaaagcaacggattaagaagttgctttatgaattgataaataacggttttcaccaatataaagagggtactgaaatcgaagatgtgaagtttgaagttacgccaaacccagaaagcccagcggatattgagaagtttagaatatggcgtagcttatcaaaaggcacagaaaaagaatttaaagacttattggaaaaggagaagaaggataataaggaatatatacccacgacaggcgaaataaaaaaatatgcactttggttaagccaacattgccgatctccatataccggtaaaataattccgcttagcaagctctttgatattaatcaatatgagattgaacatattatccctcgttcaaagatgaagaatgacagctttaacaacttagttattgctgaatggggagtaaataaagccaaggacaaacaacttgctgcaaattttattgctgatagcaaagggaaatgcaaatacggagacacggagtataagttatttacctatgaagaatacgacgtttattgtaaagacgtattcaaatttcaaaaagcaaaacgtaagaatctattggctacagaagtacccgaagattttgttgaaaggcaattaaacgacacccgctacattggcaggaaattatctgagttacttgcacccgttgcaaaaaatgaaaatgggattcttttcaccggaggaatgattacttccgaacttaaaaataattgggggctaaacagggtctggaaagaattaatgcaacctcgctttgaacgattagagaaaataacagggaataattatatcgtacatgataaagacgaacataataatcctgtaattcattttaatgtaaaagaaaatgagaaattagatttaaagcgcattgaccatcgtcatcatgccttagatgctttaattattgcagcgaccacgagagaacacattcgttacctaaacacattaagtgcggcagatacagacgaagaaataaaaaatttcaagcgaaccttagtaaaaagcaaaatcagggattttaaacagccatgggatggtttcacaaaacaagcaaaggataaattagaagaaacgattgttacctttaaaacaagtaataaaattatttccacaccaaccaatcggactgcttcatggaaaacagaaagcgaaaagcaacctaaaaagatttttaaagaacaaaaacagaatgctaaatggatggcagttagacggtctatgtttaaagaaccattgggggtgatccaactcaaggaaacaaaaatggttcccgttaaagacgcatttgaaattgaaattgaacggcagttaattgataaagacttagaaaaaagaaaaacagcatcttatgtttatgaccaatatgctaggcaaatcataaaagagctaatcaaacgctgtaactcaggtattgatgaaaaagattcattgattaacgaaatagaagagtatctaactaagaacagcaagaaaattgaaacaggaaaagtcaacaagaaagggaaaccacaatacaaaaccctttatcaattagctgaaaaagaatacgaagccatagaagttgcacactttattccttataaaactaaacgaatggatttaactaaaaaagattacgtagaaaaactaacgattgaaaaaatgaaaaatgattttccttatttctcattcattaacaaaaactatttcgactcacttcccaatgagaaacaactaatcattacagatgcggatcttaccatttcaccaaacaggaaaacaagtgcctttaacttattgatgctggaccatattttagagtacaacaatgtacctaaagaagcatttaatgcagaagggcttgaaaaattaaacaagaaagcaatagagaatcctaaaattgggaaagagattaaatctattactcgattagatggaacagtagatattgaagatatgtttaacggtggtttttatgaaacagacaagggagcaatggcatacttcataatgtacgaaaatccaaaaatcaaaaaacgcaccgattataggtctattgctacacacaaagcaatcgaaaaaattgtaaaaggcgaccctattgcagaagatagagatggatttgataaaattattctttcaccaggggatttagtttatgtgccaacaaaagaagagattgaaggtaaaaaagaaattaattggattaataaaaaggaaatttccgaaagagtttatgttatgcggaaatcaacgggcaagcaatgctattttcttaaatcaagaatatctgatttaattatttcttatgatagcgattcgaaaacaggagaatacggcagtcaaaatttaagtgaaaaaagtgatgatggcattaaaataattgatgtttgcatcaaactaaaaatagaccggctcggcaacatctcaaaaacaggtagttaccaaacttcttcaactacaaacaataatgcggtatccgaaccggaagtgagctataccaaaagaaactggacattaaaaagctttaattcctttgaagcaatggaagatgatcagttggcctattacgctgccatgccaccaatagagcggctcaaagctttaaaagaattgacactaaacgcatttggattcaagcatgaatctgaaatgaacgcccccgatcgtaaactaaaatttgatgaatagctatgaatattttttttaaagaacaccatgaaatcctggctgcacttttaaagcaccgggtaaattttatgcttattggcggctatgcggtaaattattatggatatcatcgtacaaccggagacatggatatttggttagaaccatctaatgagaataaagaaatgttgctacaggcatttactgctttaggatttgacgatgaaggcatccacactataagaagctgggattttacaaaagcccaaaaatttcatattggcagtaatagtcagccggataaaacagaatttttgacgcatatttcaggagtagcatttccaaatgcttttgcacaaaaaacaatggcagatattgatggcttcagtctgcccgttatacatttcaacagccttattcaaaataaaaaatcgtcaggtcgtacaaaagatctggcagatgtagagtatttagaaaaaattatacggttgaaaaataaaataaaataggtgtaagtaattttgaggcattgctatatgtctcagttaaaaaaccgaatgcgcactatatgataaaacgcactctttattttggcaacccggcttaccttaaaaccgaaaatgaacaattagtagtgcaactgcaaaatgaagttgcccagcctaaatctattcctattgaagatattggcatattgatattggaccaccggcaaatcaccatcacccagtctttactttcaaaacttttggccaataacaccgcagtaattacctgcgatgaaacccaccaccctaccggtatgctgcttaccttagacggcaattctcttcaaagcaaaatgtttcaaatacaaaccgaagccagcctgcccttaaaaaagcaattatggcaacaaaccattgctgccaaaattcaaaaccaggcaggcatgcttggctttcaaagagcagaaacgcaattattgttaaacctggcatcctcggtaaaaagtggcgatagcgataatgccgaagcccaggcagcggcatattactggaaaagagtttttccggggacattatcatttaggcgggaacggcacgggccgccgccaaataacctgctcaactatggctatgcaatattaagggcaatgctggcccgcagcctcgtagccagcggcttgttgcctacgcttggtattcatcatcgcaaccaatataatgcctactgccttgccgatgatgtaatggaaccttaccggccttttgtagattatgtagtttttcaaattatgcgcaacaatggcgcatatttggaaatgtcgccctccattaaaaaaagcctgctggaaataccggcaatggacgtaaaaattgatggaaaaaaaagccctatgatgaatgcggtacaacgaactactgccagcttagccaaatgctatgaaggcaatgtgcgcaaaattttatatccagagtttgacttataaaaaattgggcgcaacagcttaaaagttgtgcaaaacaggtaaataaaaatgtttaaccggttaaatgcttatcgaattatgtgggtactagtattttttgacctgcctaccgaaactaagaaagaccgtaaaatttacacaaaattccgtaaagatatattggccgacggcttcactatgttccagtttagcatttacctgcgccattgccccagccgggaaaatgcagaagtgcatatacaaagagtaaaaaaaatactgcccgccaagggccatataggtattatgtgcattaccgataaacagtttggcatgatggaaatttatagaggaaaagaacttgcagaagctccgcaacaggtacagcaattagaattattttaaccgtatagaaataaaaaaatgggcataaaacccatttttttatttgtaaaacttactctaaaagcattaaaatcagtagcttagccaaattgtgttgtataagagctaagctac

SEQ ID NO: 4412 - DNA, 17051 bp, synthetic construct
  misc_feature 1..17051: note = Synthetic
  source 1..17051: mol_type = other DNA
tgatcccattgtgttcctaatggagttctcaccttaccgctatttccaaatccaccatccaaagttccatttgtattgtatcttacaacagcaaattcgccattggctaacgtatcaaacgaaacaccacccaaaacaatttttccggtggatggaactattgctactccataggcaatatcaaatcctaaatccaatgccgtttgcacaatgccgtttgcaccaaactgattgtctaatgcacctgttgatgttagtctggccatggcaaaatgtgaataggtttgattctcaaggttaccggcaacaattattttaccatcattttgtatggcaattgagcgggctacactgttacctgtgcctatagaaaaagtgatcttccctcctgttccaaactgattatcaattgtgccatcagcaagatatctggcaactgcaaagcgattaaaagttccattgttactttcgcctgcaacaacaatttttccatctgactgcacagcaattgctcttgcaacacaggcaaaactattaaatgatgtagttactttgccatttactccaaacgttgaatcaataatgccgggatactgcatctgagccattgattgtaatgtaaaaaaagaaaggcctgtaatcaggcaagtgtgtagaaattttctcattctgaatgtttttacttatgatgcaaatatatcatttagcctgaatgacaattattaattgtctaatatttcttgaaaaatattgactaaagtattctcaaaaaatctgctaaacttttacaaaacttatttagcgaatttaaatgtcaataaaatataaagaacaaccctgcataatttaattaaaactgtaactttgagcaataaaattttgcacgtaaaatactatgtcacaagttgaactgaagatgcctaaaatgggcgaaagcgttgctgaggcaacaattaccaaatggttaaaaaaagaaggagatcgcgttgaacaggatgagccaattcttgaaattgctacagataaagttgactccgaagtaccttccacagcagcaggaatattagtaaaacaattatataatgaaggtgatgtagttgccgttggaaaatctattgctatcattggtgattctgcatcatctgcagcaccaactccttcagtacctaaggcagaagaagttaaaattgccgttgcacctgtagttgcaacacaatctactaccgctgctactactgcagtaagtgcatcttcaaaattctattcaccattagtaagaaatatcgcacaacaggaaaatgtttcttcagcagagctagatgcaattgccggaaccggtgcagaaggtcgtgttacaaagaaagatattcttcaatttattgagaacagaaagtccggtaatggtcagatagcgcaaaatacatcagcacctgctgtacaacctgcaacaacaccacaacctaaagcacctgcggctatacctgtgactgatggagatgtagagattattgaaatggatagaatgcggaagttgattgcagaccacatggtcatgtcaaaacacaccagtccgcatgttacatcatttgtagaagccgatgttaccaatatggtattgtggcgtaataaagttaaaaatgattttgagaaaagagagaaagaaaaaatcactttcactccattgtttatagaagcaattgtacgtgcaataaaagattatccaatgattaactgttcacttgacggcactaaaatacttctcaagaaaaacattaatattggtatggcaactgcattacccagtggcaaccttattgtgcctgtgataaaaaatgctgacagaatgaaccttgttggtcttacaaaatcagtaaatgatttgagtggcagagcgcgcaaaaataaactttcacctgatgaaattgcaggtggaacttttactttgaccaatgtaggtacgtttggaaatgttatgggtacacccattatcaatcaaccacaagtggccattatggcagcaggagccattcgtaaaaaacctgctgtaattgaaacagaatttggtgacactatcggtattcgtcacatgatgtttctctcattgtcttacgaccatcgtattgttgatggaagccttggtggtagttttcttcgaaaagtagccgactatcttgagcagtttgatgttaacagaaacttattataaattattatgagatttttatttgtcattatcccattactttggctgaatgttgcagttgcacagcaacctaaaaagccggttaaaaaagttgttttaggaaaagatcaggtttctgaaatgaaaaaagcaggtgcagaatattttaaaagtgataactataagtcagcattgcccatctacaaacaacttcaggaaaacgaccctagcaatactgagtttaattacaggcttggccaatgttatttaaacaccaatgtaaacaaaaaattagcagccggttttctgattaaggctgctgaaggaaaagacgttccaaaagacgtttattattataccggtcgtgcgcttcttattcttgaagaaattgatgatgcagtagatgcctatgagaaatttaaaatagctcatggcggaaaagttaatgcaaaattgaatcttgaaaataatgtggaatggtgttatcactttcgtgatatgaagaaaaccccaatacaagtaagctttactaatttgggtaaattagttaattcaccaaacaatgattacagacctgtttgtgatatgtttggcaacaatgtttacttcagttccaatagaaaaggtaatatcggagcaatagttgatggatatggtgaaataatttcagatggttattttacaaaaaaggatacgggttatagtaaagctaaaacacttggtacaggtatcaatactatgtattatgaagaacctttgcaattaaatgcaaatggtgataaattattgatttctaaagaagggggcagtatttcttctccattatatacgtcagaaatcaatggaaaatcattcgggaaagcagttgcaataaataaatttccggcttcaaaagttgatggtgcctgcatgacagatgatggaaatacgatttatttttctgcagaccttaaaggtggcaaaggcggaaaagacatttggatgacaactttaaacagtaaaaacgaatggtcagatccggtgaatcttggtgatgcagtaaatacaaaatacgatgaaataaacccttggttgttttttgataatcagactttgttttttgcatctgaaggtcacaacagcattggtggatttgatatttttttcagtaccaaacctcatgaatctatggattggagtactgctaaaaatgtaggctatccattaaatactacagacgatgataaatatttttctttaacatccgattgtaaaacagggtttgtaagtcagactacagaacatggttcaggagagttagatattataaagtttgtttgcaccaaccctatcattaaacaagaaaaagttgtttgtgattttacttttttaaaagctgatggcacttttgctcgtgatgcaaattgtatgatcatcagaaacgataccggtgaatcatcaggagtgaaaacaataaacggctcaaacggtaaactctatatttatctcagcccgggtaattataaggttaaagttaaaggtgtaaaatccggtcgtgctgatgaagattttatcatcacaggtaacgaacctaaaatgcaattggtaaagacttttaaactaacacctcccgttaaagaaggaaaataaaatgaatctgaaactacacagaccacttgccttttttgatcttgaaactacaggagtagttatcggcatggacagaattgttgaattgggtattttaaaaattctccccgatggaactaaaaccaacaaaacctggcgtatcaatcctgaaatgcacattcctgaagtagtctcaaaaattcatggcatttatgataaagatgttgcagactgccctactttcaaagaaatagcaaacgatgtaaatcattatctcaacaatgttgacctggccggatacaattcaaaccggtttgatgtacccttattagttgatgaatttttaagagccggtattgaatttgacatacgtggacgcaagttaattgatgtgcagcacatctttcacaaaatggaacagcgcacattgagtgctgcatataaattctactgcaatcaggagttaattgatgcacattctgcagaagccgatgtgagagcaacctatgaagttctggaagcacaactggagcgttatagcgatcagctacaacctgatgctgcattccttcactcattttgcaacaacagtaaaaatgttgatttggccggacgtatagtttatgatgataaaaagcgcgaagtattcaattttggaaagtataaaggccgcttggtaacagatgtttttaaaacagatccgagctattatgactggatgcttaagggtgatttctcaagagataccaaacaagttgtaacggcattacgtttacgcgaaagagaaaactaaatatatgtttgacctgtttgattaattctactgacaaaaaaaattgcaggtaacataaaaatctgtacttttatactgatgggttccgaaaataattcaaataaaaataatctccctgctgtttctgcttcaggcaaagacagcaaagtagttattgaccttgaagccgagaaaaaagaaatcagtaaacgctatcggcatttattgagggcatgcaaatccgatctcgataaaaaagataaaaaaataatcaggcttgcatttgatactgcattggaagcgcataaagaaatgcgaagaaaatccggtgaaccatatatctatcatccaattgccgttgcacagattgttgcagaagaaatcggtcttcgttctgccatccctgtagtttgcgcattgttgcatgacactgttgaagatacctatcttacattagacgacatcagagatttgtttggccctgttgcagaacaaattattgatggactgacaaaaattgcaggtgtttttgatcattcaagttcattacaggccgagaatttcagaaagatgcttcttacattgagcgttgatgtaagagtaattctcatcaaacttgccgaccggcttcataacatgcgcacgcttggaagtatggcacgtgacaagcaactgaagatagcttctgaaactgcttacctctacgcacctttggcacatcgtcttgggctttataatgtaaaaacagaacttgatgatctggctttgaaatatacagaacctgatatatatataaccattgctgaaaaactaagagacactaaaaaagaacgtgataaatttatctctgaatttattcatccgataaaagatgagttgaataagcaaggatttaaatttgagattaaaggaaggccaaaatccattcactccatatgggagaaaatgaaaaaacaaggtgtaacttttgaagaaatatatgatctatttgcaataagaataattattgattcacctcaaagtcaggaaaaagccgattgctggaaagtatattctattgttacggatagttaccgtccaaaccctgacagactacgtgattggatttcaacaccaaaatcgaatggctacgaggcactacacaccacagtgatgagtgatcagggtaaatgggttgaagtacagattcgttcacaaagaatgaatgaaactgctgaaaaaggttttgctgcacattggaaatataaagaatcttcgcaagagtctgctttggatgaatggcttacccgcataagggaaatgcttgaaaacccagatagcaatgcactcgattttgtagatgacttcaaactcaatctctttgcagatgaaatttttgtttttactcctaaaggagatttaaagacattgcctgtcaaaagcactgcattagattttgcttatgagatccacacagatattggcagcagatgtataggagctaaagtaaaccacaagttagctcccatttcgcatacactgaatagtggtgatcaggtagaaattttaacctccgacaaacaacgtccaaaagaagactggctgagttttgtgattactgcaaaagctaaaggcagaattaaatcagcattaaaggatgaaaaaagaattcttggtgaacaaggaaaagaaatttttgaccgaaaaataaaacaccttaaaattcctgtagcagaaatcaacatgaacgacattctgctttattacaaacttccgaatgttttagagttatattatcgcatagcaatggatgcaattgatttgaagcagttgcgtgaagccgtaaactataaagaccagcgtgtgcgcagtcagcggacagcagagcctactttagaggagttggtaaaacaagcacgcggctcaaccgatatgcttgtcattggtgaaaacctgaataaaattgattataaactttcgccatgctgcaaccctattcccggtgatgacgtttttggtttcatcaccatcaatgacggaataaaaatacatcgtgtcaactgccccaatgccatgcagctgatgagcaactttgcttacagaattgtaaaagctaaatggacaggtcaggagcagctttctgtcttggccggtattaaaataacaggaatggatgatgttggggttgtaaacaatattaccaaggttatctcaagcgaattaaaagtgaacatgcgatctatctctatcgaaagtaatgaaggtttgtttgaaggaaccatcatgctttttgttcacgacacagaacatctgaccaaactgatgaaaaaactttccgcacttagcggtattctgaatgtaactcgaattacttaaattatgtacgtaccttttgaccaattaccggacgactcccgcatctggatttttcagtcggatagattattatcagaagaggatattgaagctatcaatccaattctgaattattttattagtgactggacagcacatcaacaaactttaagagcctcattcacttttttacataatcattttctgatcattggtgttgatgaaaatatggcagttgccagcggatgttctctcgataaggtttttcatgtagttcgtgcatgtggtcaaaaaatcaatactgactttttaaatcgtcttcgcattgctgaaatgactcaacatacgataacacttcacactgttaaacaaatattggaaattgcagaaaacagaaacagcaatgagccattaatgatattcagtaacatcattgaaacaaaaagtgaaatgaaaaacaattggcttataccgattgaaaaatcatggcttgcacccaaactaaaatcagctagtaaaatttaaattaataaaatcaatttatgaactttttaattaaactcataatctctacgctggcagtaatgatggtgtcatacattctgcccggtgtgcatgttcagagttttggcattgcacttatggtagcctgtgttttagcatttttaaatgcattgataaaaccaatacttgtacttttcacactgccaataacactcatcacattaggtttatttttattggtcatcaatgccatcttaattatcatcacagaccgattgattgatggatttgaagtaagcagttttggcattgccttgctgttctctttgatattaagcatcgttacttcggtaatggagtcgcttgccggacaaaatcaaagacaataaaaaaaccggcaactttttaaactgccggtctttgtgctgtcgaacaaacaatcagtttcctaaaaatttagagattttctcaaaataagcatttttatcggttgtaaaattctctgcattggatggcgagttttttacaacataggtttcgctgatgcctttaatttgttttacatctgttgggttaatcagattatcctgtgatgaaacaataaccataagggcttttattcctttaggcttttccattgcatacataggctcgtgattcttatcaaatccaaaaggcataaccacctctttgcctgtcttatcttttatttttttcttcattacttcaagaccaatccaagggccatcggcaatcaccttctgtgtttctgttctgtttgcaccaacaccaattgaaaggcctgcgccaatagccttaccatacaaattaaattttgtaatggcacgcgacttacgcaaataatcacaaacagcattaaggtcaacaataaactgcggatagataaataaatccggatctattttaaaatcactgctgctaccataaccgcgatagtcatacatggcaacattatatcctgcacttaaaaatgaattggctatttcaatattatcagccatattgccatcaccactgccactcataattatccagttggtagattttttaggcaactcaaaaagccatgcattgagaatagcaccatcgggagttttaattttttcttctttataagtcatgccgtacttatccggaagcactttatattcctttgaagggtttagtgccaatgcaccggaagcaaataccgccaaagcggcaactaatgaaattgatttaagcatcgtaatttgattgttaaatttaagcttcaaaaataagtacactgtccatcaaatagtaattaattttttaacaattcttgcttattgatgctgaaaaattcaataattattcagtaataaatcatttcaaaatattattttaactcttattttaaagctcatgattcacaacaaagctatctaaccgattcaaaacaagtatgaataacttaacgatagcgatccggataatctgtaataatgccattgacaccgctatatttcagctttaaaaatactttgtcgttattcaccgtccatggaataattttaatattgtgctgtttacaatattctaaagtctttgctgttgcaagcacataccaaggactgtaaattgttgtcacaaaaccaagttcattaaaaaaagcatctacatccctgttggtttcattcaaagctgccaacgtatattcagggtaatcctgatgtaagatacgtaacacttcaggatcgaatgactgcaatacgtatctttctttctcgctatattgctgcacaatcttcatcaccaaatcaacaaactgttttgtctccggctgaaatgtgcctatccaattcttcttgctttttaactcaatggaataataaggcaacacgccttttgtattacaacaaaatgtatccaccgtactaatcacctctgaaagcaatggcttacctacaaccaatttatgttgtccgggaaactttgcataaaacttgctgccacagtcatagcttttcacctgttcataaggcattttataaatactgtaagctgctcttttaaaatttggcagcggagtgctgtcaggcatcagacaggttttgttgtttatccagggctcgtgcgaaactactacttgtgaatctgctgtaacaacaacatccaattctaggtgaagcacatttaattcaattgcttttaaaaatgcaggaatggtattttccggcatcaggccacggcagccgcgatgaccatatattgtgaatgaagaatcttgagccattgttattgaagataaaaaaaagcaaaatacaaaaatccaaaatctcattgcaaaacaaatcaatgtgttaggtaacccttgtgcctaatttatagacaaaaatataaattcaactttgctagttaagatattaatctgtactttagaaacgaaattttattatgtaagattaaaagacaaactactatcgacaaattccattaattataaaattaaaaagcccctgttaagtacaagggcaaaaacttgttgaggcaagcctcactacggaataaaatccttattgtgatttgcttcgctacaaaagtaaaaaaagaatgatatgaaaaagaaaaaagttttaggactagacattggcacaaactcaattggtgcagcattggttaacctacctgataagtttgatgattatggaaatgacggcagtattgaatggcttggaagtcgtattattccgttggatggagattatcttcaaaaatttgagagtggcacacaagccgaaacgaaagctgcgtttcgcagaggaaaacgtggagcaagaagacttaaacatcgttacaaactccgcagatcaagattgataaaagtatttaaaacattaggttggcttgatacgaattttccgctcgatgattcaaagaaatttaaaacagaaattaatgacaatggttattcgcttaaaataagtgattatttgcccttttcaaaagaaacaattgatgagtttgaagaggagcttggtatcgcaggaaataaaagtaaaaaaggcaaaagtattgttcccgaagactggatcatctactatctgcgcaaaaaagcacttacatctaagattacaatccctgaattggttcgcatcatctatatgctcaatcaacgcagaggttttaaaagtagtaggaaagatttgaaaacaactaatgttttgccttacgatgaatttatagaacggaaaaataaaaatgattttggtgaagacggtattgaaacacagtttgtgtccatcacaaaaattaaatccgtaacatttatagaagtaaagaaagataaaaaggggaacgtaaccaacacctatttaatagaagcagaagaccaacgattacacaaatgggaggaaatacgcaagaaagagcctgattgggcaagagaagtaaatgacaagggtgaaaaaattgagaaaaaggagtttacctttttagtcactcaaaaaatagataaaaatggtaagtttacacaaaacaaaccgcaattaccgaaagaaagtgattgggcattatgtacaaccgctttgagtgaaaaaatccaagagaacaaccaacatccgggcgaatacttttatgagcaaataaaagaagcatacaaagtaggacgaaactttaaagctcgtcaataccctgtttacaggtggcgttatgaaaaagaattgaaagatatttgggagaaacaatgtgaactaaatcccgaacttcaaaagataaattcagaccaaagcactttaatcaaacttgctgaactactttatccaacacagacaaaatacaatatgcccaaattagcagaatttaaaattcatgatttgctacatattatcagcaaggatataatctactatcaacgtgagttgaaatcgcagaaaaactcaatcagtgaatgtcgctatgagaaaagaaaaggtattgatggtgaaacttacggcttaaaatgtattccacgctcatcacctttatttcaggaatttcgtatttggcaggacattcataatatccgagtgtttgaacgagaagtaaaaattgagggaaaaaccatattagatgttgatgtaacgaatgctgttataaatgacatggtaaaagaaaagttatttgaattatttaattccaaagtatctatcactgagaaagatattttaaacacgctgatagagaatcgccctgaaaccaatatcaaacttgatattgataaaaaagaaaaaattcattctcacagaataaacctatatgcaagacgtgatgatttgaaaggaaatgaaacattagcgcgttatcgctcacttttcaaaaaagcagagtttgatggacacgaaatgctaacggacaaagataaattgataaaactgtggcatattgactattccattacttcatcggacgaagagaaatctaaaaagggaataacaacggccttaaataaacttctacccgataatcctaataagtccaaggtaattgaattatttacaaaattgtctgaactcaaaaaagaatacggctcatattctgcttgtgctattaaaaaactgttgcctgtaatgcgttgtggcagctattggaatgagcaggaagtttcagacactaccaagcaactagcaacacaaattaaagaacggttagaaaatataaaccataacataaggcgactaaacgaaattgccgatgatgatgtacaaaaacaagttttaaaaagttttatcgggaatgaagatttgacaaaaagcttaaacacctatcaggcaggctatctaatctacgacaagcattccgaaaaagataaaacaccgattaactctgttgaagattttgggaaatatattcaaaaagcaattccgaataacagcttacgaaatcctgttgtggagcaagttgtaagggaaacaatgtttttggttcgtgatgtttggaataagtatggagaaataaatgaaatccatattgagttaggtagaaacttaaaaaacaatagcgatgaacgtaaaaaaatatcagatacacaggagggtaattttaaagagaaacaacgtattaaaaagttactttatgaattgataaatgacggttttgagcaacatattgacaaagatgaagcaaatccatttacgtttgagaatgaaaattttgaatggaaaacacaaattgaaaacacaacttttgaagtaaaaccaaatcctgaaagtcctattgatgttgaaaaatttagaatatggcgaaacctttcaaaacaaagcgaaatagattgggctaagaaagtaaaagatgaaaaaattccaacagaacaggaaattaaaaaatatgctctttggcttagtcaaaattgccgttctccttatacaggaaaaattattcccttgagtaaattgtttgataatgcgcaatacgagatagagcatattattccacgtgctttgatgaaaaatgacagcttcaataacttagtaatttcagaatggggagttaacaaggctaaagggaagaaacttgctgcaaatttcattgatgagtgtaaaggaaagtgcaaatatggcgataaagaatatacattatttacttatcaacaatatgaagcacattgtaatgaagctttcaaatttcagaaagcaaaacgtaagaatttattatctcacgaggttccagaaggttttgttgaaaggcaattaaatgatacaaggcatataggcagaaaattggcagaacttcttgcacctgtggcaaaaaatgaaaacggaatcattttcacgggtggttcaattacttccgaacttaaaaataattggggattgaataaagtatggaaggaattgatgaagccacgttttgacagattagaagaagaaacaggaaatcaatatgttatccacgacaaagacgaacacggcaatccaataatccatttcaatgtaaaagaaaatgaacaattggatataaaacggatagaccatcgccatcatgctttagacgctttagttattgctgctactacaagagaacatattcgttatttaaataccctaagtgctgctgatacagatgaagaaatcaagaactttaaacgtactcttgtaaaaggaaaaatcagggattttaaaactccttgggaaagcttcacaaaagatactaaagataaattggaagaaacaattgtaacgtttaaaacaaataacaaaatcacttccacacccaagaaccgtacagcgtacctgaaggtcgaaaatgggaaagccaaaagagattataaagaacaacagcctaataataaatggatggcggttagaagatcaatgtttaaagagccattgggggtaatttggataaaacaaatcaaagatgtatcagtaaaagaagcatttgctattgaaattgagcgacagatttcttttaatgatttagcaaaaaggaaaaccgcatcctacatatacgataaattagctcgacaaattattaaatcaataattcaacaatgtaatgcagggattgatgaaaaggatgttcttattaaagaaatcgagtcctatctcctaaagaatagtaagaaagttgaaaccggaaagattaataaaaaaggaaagccacaaaacaagactatctatattttaaatggaacagaatatgaaacgatatccgtagcctcctttgtagcatacaagacaaagcgtatggctttaacaaagaaggactatgtagagaagttgacaattgagaaaatgaaaaatgatttcccttatttttctgaaaatgaaaaacgtaatagtgccttcaataatctctttttacaacatattaaagagtacggtaacgaccccaaagaagcatttaatgcagaaggattagagaaattaaacaaaaaggctgttgaaaattcaaagattggaaaagaaattaaatcagttactcgattagacggaacagtggatttagatgatatgtttaatggcgggttttatgaataagacaaaggtgctatggcttactttgttatgtatgagaatcagaaaacaaaagagcggtgcgggtttgaatctattgcaactcacaaagccattgaaaatattgtaaaaggctataaaatcggagaagacaaagaaggctttgataaaattattctttctccgggtgatttggtttatgttcctactaaagaagaaagagaatgctcagaattgattgattggaaaaatattaaaactctcttgaaacgaatttataagatcgttagcttttctggaaaagatttattatgtgtaaaggcagatatatcagacccaatcatcccaaccaatattaaggaaaaagtaaaaggagaaattgactggcacaacaaatcaacaagcacaatggaaggggatgttacaataaaaaatgtttgcatcaaactcaacattgaccgattaggaaatattaaaccttacaataacagcataaaactaaaaaccaatagagcaaatgtagttaacgaacctgctactccatactttagtaaagcatccataagcactttgcaacaagctgatgagcaaatgcttttacatacttctaagatgaatcctgaggaaagaatggcttatttacaacaattgcgtgaaacaacacaaaacagtaatctttcggaagaggaaaaaataagcatactgagtaagttcaaaatcaacccttctgatgaaaattcttgaaccactatttattaaggtcatagaaagcttattccaacatcaagttgaatttattttaataggtggatatgcggttaactaccatggttatggtcgttataccggtgatatagatttttggctaaatccaagtgctataaacaaagagcaattcttaagagtgtttgcaagtctttgtaaaaacgaagaagccattgcatcagttaagagtcttgattttaacaaacctcaggtaatttccttaggcgagccacctctgcaaattgattttttaaccaaggtaaacttagttgattttgaagatgcctggaaagaaaaagttttcttacaagtaaaaagtttgcagattccggtggtcaattattatcatttaattaccatgaaatttaacaccggccgcacaaaagataaattagacttagaacaattacaaaaaatcaaaagattaaaaaacaagaattaattttcattagaaattaaatgctcaagcgcaccctctattttggcaatcctgcttatctgagtcttaaagacaaacaactgatagtgcgattgcctgaagttgagaaaaacagtcaacttgaccctctatttaaacaacaggcgcaagccaccattcctgttgaagatattggtgtggtagtgctcgaccatcagcaaataaccatttcgcacggattgttagacgcattaatgcaaaacaatgttgctgtaattacgtgcaacaatacccggcatcctgcaggactgctactacccttgcaaggcaacaccctgcaacatgaaaggtaccaaagccagcttgctgccagtgagccattgcgcaaacagctatggcaacaaaccatcatacaaaaaataaaaaaccaagccgccttgttatcgcaacagcaaattgatgcaggccgcctctaccctgtttacaacaatgtgaaaagtggcgatagcgaaaatgctgaaggcgttgcggcagctttttactggtccaatatttttactaaaattcccgcttcaattgaatctgcacccggtaatttgttcaggcgacaacgtgatggtttaccacccaacaattacctgaattatggctatgcaattctaagagcaacgatggcaagaagcattgtggctgccggacttttgcctaccaaaggcatacaccaccataaccgctacaatgcctactgccttgctgatgacttgatggaaccctacagaccaatggtagatcagttggtcatcaatattatccttaaacatggcatcactgacgatctttctaaagttattaaggcagatttattgactataccggtgattgatgtaaaaatagatggtgaaaacagccctttaatgattgccacacagcgcaccgctgcatccttggtaaaatgctttgccggtgaacaaagaaaattaacctacccggagttgtcatgaattttgaacgtctcaatgcctatcgtgttatgtggacacttgtaatgtacgacctgcctactgaaactaaaaaacaacgcaaactggctgcccaattccgaaaagatttattgcaggatgggtttcagatgtttcagttcagcatgtatttgcgacacagcagcagcagcgaaaatgccgaagtgcataaaaagagagtaaagaaatcattaccctcagagggaaaggtgggcattttacaaattaccgataagcagtttgggcagatggaaatattttatggtaaaaaagcacaagacaaaccaccaacctcacaacaactagaattgttctgagaaagttaactgttgagcaatcaatagccataaaaaatcccgccctgatagcgggattttaagttctttagtttgattttttttatcctgattttgtgctattattctaacaatctgctttttacgttagagatattgaaagaactaagacaaag

SEQ ID NO: 4413 - DNA, 16452 bp, synthetic construct
  misc_feature 1..16452: note = Synthetic
  source 1..16452: mol_type = other DNA
gtcatgtactatttacactaaggggtgcaagataaagtttaattgggaataatttttttggcaaacggaataaaaacgattgattttgcacactgtggggaaaaaaggacaaataatcagtgtttctttttctttactgcctcttttttacggacaaacgttccttcaaacacacaatgaacaccgcggtgcgatccgcaaccctgtagttccctgatcgtaacggtagtgggagtaaaagataattgcagtgcacagggatcgttgttggagtgataatctgccagggatggagaacggagcactgcctcccctttcaattcaccggtacattccttgtctttcttttcaaaatgaataaaaaacaaaatgcggttttgcctgtggctgtcgcgtatggaaacaatatctgtttttcctgcaatgtaatctgccgataatttatttttccttggaagggtatctatcgggtttactaacgacggtggccgggcatccagcggattggtgaggatcagcataaaattttttgcagcgtcattgaggatatacacatctttaccttcattgacagtgccatcaggattctttttccgtacaattttgtaaatcgaaaattttttatccatcccggtaacctgctgtgttgttgcattctgatccggttgcaaaacaggcatcatggcaatgaattttttctttttatcaaagcttgcaatcagtcctgcaatcctgccattgtttaccgcctttacaaacaaataggtttctgcctgcggtactgaaacttttgctatcgggtaaaactgcggctttactcctttaccaaagaccctgctgacagcagagtccggcacaaactctgtgaatactttaaaactgatgcggagggaatcgggggatttcttaacaaggacggtatccgcaaattcaaatggcaactttgtttccgggaaaaagtcaataaagtcctttacctccacatgctcttcgccggataatgaaggctttttcctgtgctggcatcccgccagtaccataaaagacaccaggagaaacaggtatgttctgaccggttgtatcatacgaatcgggcatcgaatttaagtgtttctgccagaatagcaataacgggctttgaaggcaatgatttttaatttagatttgcctaaatatatttttagtcatgttgaatctttctgccagtgaagagaactatatcaagacgatctttcatctccaggaggaagaaaaaaatgtcacgaccaacgggctggcagccgttctgaatacccgcccggcttctatcaccgatatgatgaagaagctgaaacaaaaaaagctggtacattaccagccttaccgcgggttccggctgacaaccgggggaaacaggtatgctttaagcattatccgtcgtcaccgcctatgggaattctttctttttgaaaaattaaaattctcctgggatgaagttcattcagtagcagaagaactggaacatgtaagcagtaaaaaacttattgacaagctggatgaatttttagattttccccgttttgatcctcatggtgatcccataccggataaccagggaaaaattttgaagacccggcagatccctttatccgaaatgccgctgaacaggactgccgtcgtctgcaatgtgggcgaccagtctgcttcaattctcgaattgatggatcataacaagatcgggatcggcaccagggtggaagtgaaaaaaagattcgactttgatcattctcttgaaataaaaatccgccagcaggtgcccttcatcatcagtgagagccttgcaaaaaaaatatttgtgaaacatggagcctaagcatcatcatgacctttctttaagtgatgtacacgaaagtattgacacaacaattccccagccatcttcgtggaggagggtctttgctttttttgggccggcatatcttatcagcgtaggttatatggacccgggcaactgggcgaccgacttgcagggcggaagccagtttggctataaactgatatgggtactgctgatgagcaacctgatggctttattgctccagagtttatcagtaaggttaggtgtggttcgcggcagggacctggcacaggcaaaccgtgaaacttacccaaccgttattaactacatactttacgtactggcggaagttgccattgcagcctgtgatcttgccgaagtgctcggaatggccatcggtttacaactgcttacgggtattccactattatggggtgtactgatcacggtaactgatactttcctgcttctgtttctgcagcgcctgggtatgcgccggatggaaggttttatcatcagcctgatctttcttatcggcatttcgttttttattgaattatttttagcaaaagacaggatcagttacggggaaatagcatccggctttattcccaatattcccaacaatacggcattatacattgctatcggcatcattggcgctaccgtgatgccccacaacctgtacctgcattcagcgctggtacaaacacggaaatttaacagggatgccaaaggaatcaaaaaagcgttgcgtctgaatttttgggacagcaccatcgcattaaatcttgccttcctggtgaatgttgcaatacttatacttgctgccgctgtatttcattcttccggcaggcataatgttgccgaaatcaaagaagcacatcatttactggatcagctactgggaaccaaaatagctccgatactttttgccgttgcactgattgctgccggccaaagttctaccgtaaccggaactcttgccgggcaggttgtaatggaagggtacctgcatctgcgtatcaatccctggatgcggcgattgctgacccgtgtaattgccatcattcctgcggtaattgtcattttagtttacggtgaaaatgatgtggacaacctgcttgtattcagccaggtgatcttaagcctccaattaagttttgccatcattccgctcatccattttgtaagtgataaaaaaacgatgggtagttttgcaatcgggcctgttacaaaaattatttcatgggcggtttcattagttttggcatacctgaatatccgtatggtagccgtagctgcttatgattattttaccgtcaccggcaatttgttctggaagattgtaatattgtttttcgggcttgcattcatcgcattgctgctgatagcgtttgcctatcctcttttcaaacgcatgggccgtactatttcaatgcggctgcaccatgaagcttccaatcttcatacattaacgatccccaaatatgaaaaaatagcaatagcatttgacttcagcgaaaaggacaaagcacttttgtcccatgcaatcgggcagggaaataccggcagcagttacatcctgatccatgtagtggaaagcgtagcagcaaaactttaccggaaacaaagtgatgacatggaaacacaaaaagacaaagagcagcttgaattttattcaaaagaactgaatgaccgtggttttaaagccgaagcaagactgggttatggaaaccggatccgggagatcgtacgtttagtaaaagaatcaaatgccgatatgctgattatcggcgggcaccggcacaagggcatcaaagactggttttacggtgaaacgataaattccgtccgtcatgagttgaacatccctgtattggtagtgaatgtaaaatgaaaacctgcttaatgtacaggagtatttttcaaatgccctctcagcatgtgtttgaatcggctgaacgtttccggtttgatattcagaaaagacgcaagatacttctggggcacacgttgcagcaattccgggtttttagtaacgaaattgaggaatcgttccctcggcgtcatttttacctgctgcatttgccagcgatctttgatcaccatggcgtgagtgatcacaagacgcccgaaatgttccatcttgtgagaacgggcatacaattgttccagatcatcataatgaatagagatcagaatggtcggttcaattgcttcaatgacatactcggaaggcaggcggctgtgaaatgattcctggcttaagataatgtgattctccgtggagatctgcgtgttgatctcttcattcctttccctcgaccgtttataatatttccgggcgagtcctttcacgataaaattaaaatagttttcggttttgcctgcctcagtaataatatttcttttggcaaactttcttacacgaatgaccggaaataaatattcattgaactcatgttccgaaagtctgccaaactttctcaggtaattataaaatgacgttatggattccatacctctcttcgcctcacaaaagttacgaaattgtttcaacctgttatcgtctattaacaaaaattaatccagaaagtttctttcaaaagaggaactgccaattactgtctgcaaaaccttagctttgcacacccttaaattgtaaatacttggaactatgcctcaaaaaatcaaagtagccaacccggtggttgaactggatggcgatgaaatgacacgtatcatctggaaatttattaaagacaagcttatccttccctacctggatatcaacatcaaatactttgacctcggtattgaacaccgtgatgccaccgatgaccaggtcaccgtggatgcagctcatgccatcagtaaatacggtgtcggtattaaatgcgccacgatcacaccggatgaagccagggtaaaagagtttaacctgaaacacatgtggaaaagcccaaacggcaccatccgcaatattcttgacggaaccgttttcagggaaccgatcgtatgcaataacgtaccccggctcgttcccaactggaccgcaccaatctgcattggccgtcatgcttttggagatcagtatcgtgcatcggacttcgtaacaaaaggaaaagggaaactaaccatcaggtttgaaggggaggacggcacggtgcaggaacacgaagtatatcatttcaaaggggatggcgtggcgctggctatgtacaataccgatgaaagcatcaggggttttgcccatgcatgcttcaaccaggcattgatgaaaaaatggcctttatatttttctacaaaaaataccatcctgaaaaaatatgacggacgttttaaagatattttccaggagatctacgaaaaagaattcaaaacaaaatttgaagcagccggcatcacctatgaacacaggctgattgatgacatggtggcgagtgcattgaaatggcacggtaattttgtatgggcctgcaagaactatgacggggatgtgcaaagcgatacggtagcccagggatttggttctttaggcctgatgacttccacattggtaactcctgatggtaatacaatggaagcagaagctgcgcatggaactgtgaccaggcattacagggaacatcaaaaagggaggccaacatctaccaatcctatcgcatccatattcgcatggacaagggggctggcattccgcgggaaactggacaacaataagcctttaattgatttcagccatgcattggaaacagtttgtgttgaaacggtggagtccggaaaaatgacaaaagatcttgcagtctgcatccatggcaataaagtaaatcacggagaacattatttatatactgaggaattccttgatgtcattgacagtaatctcaggaaaaagatgaactggtaatattacaggtaagaatatttaaaaccgccttgcaaaagagcggtttttttatattccaaattgaatatgcaaaaattaaatcatttttatatctttccataccaaaaccaccaattatggaatacattattctcggggctgcccccggcgttgcaatttgcctgatcatcttttacagggatctttacagcaaagagcccattctgaatcttgtcatcagctttatcttaggctgtctggccattttaccggcaatgttatttgaagatgcattaggttctgtaaataatggcaccgtcaccgggctggccatattttgctatttaattgtaggcttcagtgaagaattcagcaaatttctcggtttacgcctctacagttataatcaaaaagcatttgatgaacctctggatggaatcatatattcagtaatcgtgagcatgggttttgccaccacggaaaacatcctgtacgccgtaaaatatcaggacatgaacgtcatcatgctccgggctattctgactgtgccggcacatgcaacattcgggatcattatgggttattatgtcgggaaagccaagttcaattctaaaaatagtgtcggactgatgcttacgggattattgggcgccatattctttcacggcactttcgatttcttcctgttcctcagccagcagcagaatgcaaacccgaatgaaagtaacctgatgatcgccggcggcgccgttgtttcattcatcatctctctgatattatgccgtaatatgatcgtgaaagatcagcgcatttcaaggcatatgttcaaagatcatacacctcctccgcccaatgcttaatatccgtatcgcatcagcaacggatataccgctgatacgtgaattgacttttaaagtgtggccgcaaacttatgcggccattctttctgatgagcagattgaatatatgcttgacatgatgtacagcgagtcttcccttgaaaaacaaatgcaggatggagcccggtttgtgattgcatacgacgaccaggcgcccgcaggttttgcatcataccaggaaacagaacccgggatctttaagcttcataaaatttatgtgttgccttcacagcagggaaaaggaacggggaaattcatcattgatcatattacaggtaaaataaaagcccaaaacgcaaaagcgctgcaactgcaggtgaaccgttttaatgaagcaaaagaattttatgagaagctcgggtttaccgttctttacgaagccgatttcgacatcggcaacggatatttcatgaatgattacgtaatggagaaaagattgtgaatacagaaaatttaatgcacataatttaaaacccgttaccggcaaacagcgcctcagctccccgcactcttgcaattcagcaacttcccggcatctattattctttcattttcaaacatcctgaattcaagctctgatcctgaagaataaatcccgatcgtttggcctgcttttactttatcatcttttctgacagttggtttcaacattccatgataccagaaatagagatcgttcacattgattacgatatcataagaattttcttcggcagcttccaccttgaccactatgccattcacacaactgcgaatcaatgtatccaccctgcttatcattaccactttcctgtctgacggatcccagttgtatgcctctttggacgcagggatatatccctgttcaaaagggcaaaccagttgcctcttcagcgtatcctctgttttattttgtgacagtaaacgtatgggtaacaagaccaccagcaacaaaaagatgtgaacagggaatttcctgatttttattttattcgctgaatctttcatttatccttttttgatcatacaggataactattctttgtaaacaatcaaattattttagtattcttcttcattcagaccttcacctgcgtctgtttgaccacgcccataacaaaaacgctttgtacattcccgatattttcgatctccccaagccggttcacatgaaaatcataatatgtgttcatattttccgtaatcactttcagaataaaatcaaactcgccggaaatactgaaacactcggtcacttcatccatctcattgatcgctctgataaattttgttcctgctgctttgctgtgttgtttcagcgccacatagcagatcaccatcagttctttattcacttttgcatgatccaccagtgctgcatagtgcctgatcacaccggtctcttccatccacctgatgcgttcaaaaaccggagtggtactgaggtgtactttgtccgatatttcttttacggtcatccgtgcattctgctgcagcaatctcagaatggccaggtctttctgatccagcttcagcggtgtagtgaattcttcttttttaaccggctttggcattgcttaatagtcatttattctaccaataacgaaattatacattttttattctatattcttaaaattgattagctgtttcctctaatcgctttaactttgtctgttcaccaattttataacggattcataatttcaatctatgtcatctgcaacatcatcaaaaattgatttcaagctgccttaccaagtaaaagacctgtcccttgctgaatggggacgcaaagaaattcgtcttgccgaagctgaaatgcccggcctgatgtctcttcgcaaagagtacggcgcctccaaaccattgaaaggagcaagaattgccggctgtcttcacatgaccattcaaaccgctgtattgatcgaaacgctgatcgaactcggagccgaagtgaaatggagttcctgcaatattttttctactcaggatcatgcagctgccgccattgctgctgccggtattggtgtgtttgcatggaaaggtgaaactattgaagaagccgactggtgtatcgagcaaaccttgttcttcggcagcgccgaccgcccgttgaatatgatcctcgatgatggcggtgacctcaccaatatggtattggacaaatatcctgaactggtacagcatgtaaaaggaatttccgaagaaaccactaccggtgttcaccgactgtacgagagaatggcaaaaggaaatttacctcttccctgcatcaatgtaaatgattcggtgaccaaatcaaagtttgataataaatacgggtgcaaggaaagcctggtggatgctattcgccgtgctaccgatctgatgctggctggtaaagttgcggtagtgggaggatatggcgatgtgggtaaagggtctgccgcttctctgcatggtgcaggatgccgtgtaatagttacagaaattgacccgatctgtgcactgcaggcagcaatggatggatatgaagtaaagaaaatggttgatgccgtgaaagaagcggacattatcgtcaccgccagcggatgccgtgacctgatcacggaaaaacatttccgcagcatgaaagacaaagccgtcgtttgcaatatcggccactttgatattgaaattgatgtagcctggctgaatgataattatggtaaaacaaaagatacgatcaaaccgcaggtggatctttacaatatagatggaaaagaaattattttattagcagaagggcgcctggtaaatctcggttgtgctaccggccatccgagttttgtaatgagcaattcatttacgaatcaaacactggcacagatagaactctggaaaaatcataagaattatgagaacaaagtgtatgtgcttccaaaacatctcgatgaaaaagtggcccggcttcatctgaaaaagatcggtgtagaactggatgagctgacactggagcaggccgattatctcaacatccccaaggatgggcccttcaaaccggagcattaccggtattaaaaaaatacatttcaagtaagctttaaaacttaactccccggcctgatcgcaatattgccgaataaaggatcggggactttttatttagttattgcctgaatattttaaaaaatgctttatttttattgaaactctcactacccttttaaagctttacgttttatgtaagaggtcaatagtaatctggttccaagctatgagtaaataattgaaggattcaagaaaaaaagagaatatcaattgaaacaaaaaagcccctgttaagtacaagggcaaaaacttgttgaggcaagcctcactacggaataaaatccttattgtgatttgcttcggtacaaatataaaaaataaatgattatgaaaatgaaaaaagttttgggattagatgttggaacaaattctgttggagccgctttaattactctcccaaaagattatttggattatgggaaagagggtacaatagaatggatgggtagcagaatcattccaacagatggtgattatctacaaaaatttgaaagcggtgcgcaagctgaaactaaagatgcattcagaaggggaaaaagaggttcccggaggcttaaacacagatataaacttcgcagaacaagattaataaaagtattcaaatctttgggatggataaatgaagattttcctctggatgattcacgtaaattcaaacgtaatataaatgagaatggatactctttaaaaataagtgattacctgccattttctgcagagactattgctgagtttgaaagagaattagcaattgaaggcactaaaagcaaacaagggaaaagtattgttcctgaagattggttagtttactatttacgcaagaaagcacttgaaaagcgcattactatacaggagctagtacgaattatttatgtactaaatcagcgaagaggattcaaaagtagtagaaaggatttaaaggaaaatacaactatcttaacatatgcggaatttgaaaagataaaaaacaatattgatgcatcaatgaatgacgcaaaggaatatgaaacacagttcgtatcaattacaacggtagaaaaaataagcaaaatatcagcagaaaaagacaaaaatggaaaatataagttttcagtaaaagtggcagataaaaaagtacttgattttgaggttcagcgaaaaacagctcctgaatgggagggaaaagagttcacattcctaatcactcaaaagataaaaaaaggaaagcttgaacagttgcaaccaaaaactccaacagaaaatgattggggattatgtacaactgcattagatgagaaaataaataattatcggacaccgggagaatacttttatgaacaaataaaagaatcgtataaggcaaaacgaaattttaaagcacgccaatatcccgtttacagatggcgctatcagcgagagctggaagctatatggaagaagcaatgcgaactgaaccctgaattaaataaaataaacacagacaaagaagtattagccaggttagctgaaattctatatccaactcaggcaaaaaacaatatgcctaagcttatagaatttgaaaataacgatttgcttcacatcattagcaatgacatcatttattatcagcgggaattaaaatcacaaaagaattccattagtgaatgtcgctatgaaaaacgaaaaggaattgatggagaactgtacggtttgaaatgcattccgcgatcatcacctcttttccaggagttcaggatttggcaggatattcataacataaggatattaaagaaagaagaaaaaattgatggtaaaataaaattagatatagatgtcagtaaacaatgcataacagataaggtaaatgaaaaactctttgaacttttcaattcaaaagcatcggtatctgaaaaagaaatactaacactcatcaaagaatgccatgagcagaatgatatcgtaattgcaaaaaaggatggtgaacattcacatagaattaatttattcaggaatcgggatacacttaaagggaatgaaacattagctcgttacaattccctatttagaaaagccggatatgatggcacttcaattcttaatgacaatgataaattattgagattgtggcatattgattattcaattacatcatctgatgaaaagttagcagagaaatggatttcttcggccctttctaaactattgccggatattgacaataaaaacctggcaattgaaatgttctgtaaacttcccgaacttaaaaaggaatacggttcattttctgcttgtgctattaaaaagttgttgcctgtgatgcgtagtggaaagtattggaacgaagacgggctcaactctgcaacaaaagacagaattgaaaaaattgtccatggagaatttgatgaaaatattgataatgacaccaggaaaaaaatacggaaatgggagttggaaaaccggtcattagaaaaaatagaagattttcatggtttacctacttggtttgccgggtatgttgtttatggtatccattcagaaagagaaatttcaaaaattaattctgttgaagatttcagcaggtttatacaaaaagcaatccccaacaatagtttgcgaaatccgatagtagaacaggttgtcagagaagccatgttattggttcgtgatgtatggaaacgatatggggatattgatgaaattcacattgagttgggaagaaaccttaagaataatagtgatgaacgtaagaaaatagcagatgcacagaaggaaaactttgatgaaaagcagcgaataaaaaaccttttatatgaactaatgaatgatggctttgatcaatacaatattgatgaaaagattgaacatgttaattttgaagtaaaccccaaccccgaaagcccggcagatattgacaaattcagaatttggaggagtttaactaataaaacagatattgattgggcaaaaaaggtaaaagaagagaaaattcccacagaaaaggaaatcaagaagtacgcactttggttgagtcaaaattgcagatcaccctatactggtaagttaatccctttaagtaaattatttgacatcaatcaatacgaaatagaacacgtaataccccgtgccaggatgaagaatgacagcttcaataacttagtcatttctgagtggggagtgaataaagccaaaggcaaacaactggctgctaattttattggttcttctaacggtaaatgtaaatatggggatcaggaatattcactctttagctaccaggaatacgaatcatactgtaaagaaacttttaaatttcaacgaggtaaacttaaaaaccttttggcaactgaagtgcctgatgattttgtagaacgacaactcaatgacacacgctatatcggaagaaaacttacagaattattggcccctgttgcaaaaggtgaaaatggaattatttttacaggagggagtatcactgccgaactgagaaacaactggggattaaacagaatatggaaagagatcatccttccacgctttgaacgcttagaagaaatcaccggcaaaaagggcgaatacataattcatgatcatgatgaatttggtaatccggtaatacacttcaatgtaaaagaaaatcagaaactaaatacaaagcgaattgaccacaggcaccatgctttagatgctttgattattgcagctacaacaagggaacacatcaggtatctcaatactttaaatgcagcagatacgactgaagaacttagtgcaatcaaaaggtcactcgttaaaggaaaaatcagggactttaaacttccctgggaacacttcacactacacgctaaaaataaattggaagaaatcattgttagttttaaaacgaataataagatcatttctcaaccgaaaaacaaaactgcttattttaaaaaaacagaaggaaaaataaagaaagaatataagtggcagcattcaaatccgaaatggatggctgtaagaaagtcaatgttcaaagaacctcaaggcatcattcacctgaaagaagtttatgaagaaaaaaatatcctgaaagcaattgaaatacaaattgacaggatgttagttcaaaataaacctgaaatgagaattacaccttatgtatatgatcaggaagccagaagaatcatcaaggatctgattgaacggatcggaattcctattcaggaaaagcagactctaatgaaggaggtaaaaaaacacctatcaaaaaatccactaaaagatatttcaggtaaagacttcgaatccatcaaagtggcaatttttgaagaatatgctgcaaaaagggtttcattagataaatcattcgatcataaaaaaattgacaaaattccgtattcaaaaacaggaaagtctgtcttaggaagattactacatgaacacctggattcagccgaatataaaaatgataaaggtaatgccgatccttctctcgcattttcaacagaaggactagaagttttggcaaagaaagccggaaggcctataacaaaggttactatatatgaaaagaaagatgaatcgagcaagtttggaaaacagtatgttgaagtggatgccggaagcaatgccctttttgtgatgtacgaaaataaaattaccaaagaacgaactgattttaggtcaattgccacccacaaggccattgaaaaaattgtaaagggagatgaaattgcagaagataaagaaggttttgaaaaaacaattctttcgcccggagatttggtttatgtaccaacaaaagaggagtatgagacattgaaagaaggaaccaaaattgaaaacgcaataccatggggtaacaaaaagaatgctttaaacagaatttataaagtagtcagtttttcgggaaaagatttattatgtataaaagctgaaatatcagattatataattccctataacagaaaagaaaaaaataaaggagaaattggttgggataacaaatcagcaacaacaatggagggtgatgttacaattaaagatgtttgtatcaaaataaaagtcaaccgtatcggaattttatcaatttcttaaaatattcagaacctaaacgggctggtcctataatagtgaatacaattctaaatttaaagcagaattaaagtgttcatataaataacgctttattgtctcaactgaaggaagtggattaaagctatcggttcatttttctatttatccatttttcttgtcggaagccagataacgattttagaaaaatcattttattactccacccccaattgaaagattcctctatttgaaatgcttcccccgccagcgggggatattatacagcctctaattcgagcagcgtatgattaataaataaaagtaatcccggtatgattggaaactgaaatagtaatattaaatgacttttcattttcccccgctggcgggggttgctcttcgttaataagaaaatttctgacgggggtggatctaagctatcagttcatttttctatttatccatttttcttgtcggaagccagataacgattttagaaaaatcattttattactccacccccaattgagagattcctctatttgaaatgcttccgccgccagcgggggatattatacagcctctatttcgagcagtgtatgattaataaataaaagtaattccggtatgattgaaaactgaaattttactattaaatgactcttcattttcccccgccggcgggggttgctctttgttaataagaaaatttctgacgggggtggatctaagctatcagttcgtttttctggtaacccatttttcctgatagaagccaaccaatgattttagaaaaatcattttattactccacccccaattgaaagattcctctatttgaaatgcttcccccgccagcgggggatattatacagcctctaattcgagcagcgtatgatcaataaataaaagtaattccggtacgattggaaactgaaatattaatattaaatgacttttcattttcccccgccggcgggggttgctcttcgtaaacaagaaaatttctgacgggggtggatcaaagctatcggttcgtttttctggtaacccatttttcctgatagaagccaagcaatgattttagaaaaatcattttattactccgcccccaattgaaagattcctctatttgaaatgtttccgccgccagcgggggatattatacagcctctatttcgagcagtgtatgattaataaataaaagtaattccggtatgattggaaactgaaattttactattaaatgactcttcattttcccccgccggcgggggttgctcttcgttaataagaaaatttctgacgggggtggatctaagctatcagttcgtttttctggtaacccatttttcctgatagaagccaaccaatgattttagaaaaatcattttattactccacccccaattgaaagattcctctatttgaaatgcttcccccgccagcgggggatattatacagcctctaattcgagcagcgtatgatcaataaataaaaataattccggtacgattgaaaactgaaatattaatattaaatgacttttcattttcccccgccggcgggggttgctcttcgttaacaagaaaatttctgacggggggggtggatcaaagctatcggttcgtttttatagtaatccattttccttgatagaagccaagcaatgattttaaaaaaatcattttattactccacccccaattgaaagattcctctatttgaaatgtttccgccgccagcgggggatatt

SEQ ID NO: 4414 - DNA, 15540 bp, synthetic construct
  source 1..15540: mol_type = other DNA
  misc_feature 1..15540: note = Synthetic
taagaaaggtaaattgcagacagttctcccgatataataaatcggtgttatatacttgtaatgtaatgtatcagaaatccggctcctgatataatacttgcttaaagaaactcatctgtaatagttaaagaagtaaattggtgctgtatgttaaaatcatattattgcgtaacatataattttaaaacaagagacgacggacggataatttttttgcgtcttattttgtatacagaaaataaaaatatacacaaatgcaattcaaagctcattattgccatcagcaaagaatatgattttattgaatatgaaatgcagtatttgagtccggcgcatttagatacctgttcgccggaagataaaattcataagtacggctatgattatgcctttgaaagcagcatgatctatattgttctgcatcattatcacgttgatcctaaaacagaacacatgcattttaattttgtacgtgatacatttaatacgcttgaagagcgcgaaatattaggaaataaagtgcagaacagttttgaatcattaaaagctgttgaagtagtgcagagagatagaacaatacgcgcagagtatccggttatctacctcgatgatctggattgtatactgtccggacagacaacgaaaaaatagctaacgcataataattaattacacaatctttgttctttacactagtgtatgtaatcctccagggggcagtaatacgcgcttattctaatcccgggttttatcataaacagtaaaccagactacaattagtttttaccgggtgattatcttctgaagataaaacagcaatccgggctgcattgtgcctggtgaaccggatgtgatatttttcttaaaaaatataatattatcaatgaatgccgggtatagcctgatatttatgcgcaggatcattttttatcagattttaaaatagtaatataatagaaccaatgcgtatctaaataaactatccactcaaacagtaaaaatcatgaaaacaattcacgtattatttctatcagcgtttgtggcaatgttatcattcagtactgcttcagcccaaacggcttacaagtcacaattcccgttacatgtagatgcctcaggcacagtcaaggatgcatcgggcacaacctttgctactatttctaaagatagcatcattaaaaatcataaaggcgaaaaaattgcatttatagaccgtagcggaaacctggttgatgcaaacggtaagatattaggtaaagctgcaaagaatggagattttcataacatcagcggagaagtggaatatactgtaaagcctgctgctaccggtaccgattatgaagtatatgataatgcaggcaagcatgttcttaccgttcctgcaaattataaagcccaggcaggcagtatcgcctatatgcatagcaagataaaaagtaagtaaatgctattacgctaatcccgtattcttatacccggttatcagattatttttcagctctgatacccgggttacttttttccgttcgacatggtttggggatttgaaaaaacaggttaatcacatacacatgaatctaatatatttttcaatgatgctatacatacacgttactgtttacccggaaaaacagtaaatcatacaatacttttttgaaaagatataaaactttacaaggcgaataactacaattttattttgcagaagtaagaaatgttaataagacaacagttcttaactatatcccacctaataagatacaactatgaaaataactcaggtattgctggtttcgctatgttcggcaatgttgtcgtttaatgcggtctttgcacaggcaacatataaatcacagttccccatgaaggtggatacttcgggcacgttaaaagacgcatccggtacaacattcgcaaccatttctaaagaccagatcattaaaaatcatgcaggtgaaaaaattgcatttattgattcaagaggcaacctcatcggagacgatggtaaaatgttaggaaaagcagccaagaacggagacttccataatgcaaaaggagaggtagagtatgttgtaaaaccagcaaaaaacggtaccggttatgatgtgtatgacacaatgggcaaacacgtacttactgttcccgccaattataaagcccaggctggcagcatggcttatatgtataaaaaaatgcagcttgataaaaaataattgcatgtaaattacatgcagctgtttaaaaacaaaggccgccaatcattggcggcctttgtttttataagatcataatgaatagttccattttgctttttcctgactaagcgatgtttctattgctttagaaattccgttccgcagtagggtgtattcaggaggtgtgttccatttaccggttatttgttcacggtttatggtagcgccttgatacataatggaattatcggtaagattaataacattcgttcttatgtacatttttccgtatctctttgtttctattccgtacgaataggtacaatacaatccgtatttaacacttaccagaaccaattcatcaatctggtatttatctttaagcgatctcagatcctgcttgaagtattttttaccgggttctttttttaccggcttgaatttcgctgccgttttaagattaagtgtatcatctataaatgtgatattttttcctttggaagagaacgcatctgtaaataattgtttgactctttcatccggatttaaaacaggcgcaagggtccgaagcgcttcatcatattttctttcaggtactaaagaagcagagaccgcggcgcctattgcccccaggcctcctccggaagacgaatttgttgtactctcaagttcgctgatcagaataaatcctgtgcgggaaggactggtaaaataagatgcacctaaatgcgagcttgacacgcagcccgccagtatcaaagagagcatcagataaagaacatactttttcataacaaataaggaataatttgataagggataaatttgatggctctaatctgttttattatggcatgcaagccaaaatgtatcagaaatacactcttgtattatttctgatgcactaacatccccggaggtttttatcacgaacagtaaacgatagaccagagtcaatttgatttaaacataaaattgattcttcatattcggaacagataaaaaaacgaacatgccattatcaataaattatacaatttgccggggcataaatctttagaaaattataaatcgtggaaaaatcaaaacacgcattcatgcttcgcatactgttattcattcaatatatatgctgttgaaagcgaatagtattcatctgatgcagcggtaagcaggtttatcatacacataaaactgacgttaacctatttgatttttttattgtggaatttttccccggtatataattagcttaaccgtaacatcattcagatcattccgatacagaaatttataatgaaaacataattcattttttgaatggcagaagcgttctgtatttgttttttatcagtagcaatttatcttgcagctaatctttctaaacaataaccggctttatgagaaacaagatcattgcctttttatttttattaatcaatgcaacgttcagttatgcccagcaatggaaaacgtatactgccagcaattactgcaaagcgattgcaacagacgcacaggggaataaatggattggcaccgataatggaatcgccgtttttaatggcagtacatggcaaatgtacagctcatcggaaggttttgatgcgggcgttgtaaatgctattgccattgatgggtcagacaataaatggatcgcaacagaagccggtgtttttaagtttgacggcaagcactggacttcttatactactgctgatggtttgatcagcaatcatgtcaatgccattgctattgatgcgcagggtaataaatggtttggtaccgatggcggtgtctctgtgtataacggtaacacctggataacctatacaacatccgatgctcctgttttaaccagcaatattgttcacgctattgcatttgataaccggggaaatacctggtttgccacagatgccggcattacacagtttgatggtacagactggaccgcttataccattacatccggtaacaacaacgcaagcattaaaaacaataacatttattctgctgcggcagatgcacaaggtactgtctggtttggcaccggccatggtgtaacaacatgtaacggaaccgtatggagttttatcggcgttgctcagggacttgcaggtaatcatgtgaatgcgattgctgtagatgttaatgatacaaaatggtttggcacatacgatggaatctcccgctttgatggtactacctggacaaattatacgtctgcggatgtattaagaagagatactattctcgcaattgccttcgataaatatggaaacagctggtttggaacagatgtctgcatctctgaatttagcggagcaaactggaaacattttgaatcggtcaatggtcttgcacgctcacatatatccgacgttgcaatagatgctgacggaaagaaatgggttggtactgttgccggcctttcggtatttgacggttctcgctggctgtattataccacggacgacggcatggcgggcaactacgtatacgatattacttttgatgcagcaggaaataaatggatcggtacggatcagggtgtttcaatgtttgatggtacaacctggacaaattatactacagctgatggattagtatatgatatggtacatactgttgcaattgatgcacaggataacaaatggttcgggacctggggcggaggtgtatctgtattaagcggtacaacctggacttcttatacaaaggcagatggtctgataaatgatacggtatatgccgttgagattgatgcgcaggggaataaatggttcggcacacacagaggggtatcgaaatttgatggaaccgcctggacaacctataccgttgcagatggcttgttgaaaaatactgtttttgatatttttattgatgcacagaataacaaatggtttggtacctggggcggaggcgtcacaaaattcgatggcgcagcatggacaacgtatactactactgatgggctggcaggtgacagcatatttgctattgctgaagattcaaaaggtaacatgtattttggttcatgggcacatggcatgtcagtgtttaacggcacaggctttgttacgtataaatcgcctgatctgggcggcgactatgtatacagcattgctgcaagtgcgcaggataccatgtggatcgggacaataggcggcctcacaaaatatactgcagatgcagatataactgctattcagaataaacagccggagcttgccacagcgactgcatatccgaatccggtaacaggtatactgcatattgataccaaagaacaggggccagtatatatacagcttctgacactgcaaggtacactggtaaaagaacaggatctggacagcaccggaacaattgatctgacaacatgtgctgaaggcatgtacctgcttcagctcacaagtgctacctctgtttctacagttaaattgctgaaaaaataaaaagctgtatttgcggatagaactattacatcatctccgccacagtcatagaaagtatacgatacatcccatccataaggatttccatggtgaaatatttttcatccggaaaaaataacggcaatggcagatcataattatctcagacaatcctcaaccgttcttcttccagatcgatctggtataactgctcccggattatttcttcattgatcttaggatctttgttaagctctaccagatactggcgctgactttcgagcatctctgcaaagatggtttttgttttctcgttcatccagatatcttccgcagttttcgtccgttcctcccaaagctgcatgaacttttccatgccggcatggccgttcagttcgttttcgtacttctgtttcagaaactgaagtatgtgtagttttaatccttgtttcatttccctgcgcttctgctcgtgcgcctcgttttctatgatatgatcaaatacatgtgaacgttttatgaaataaggaagtgtaagtccctgcaccacgagtgtaagcaggattacaacaaaggtgataaacagaatcagattccggtgcgggaacgccatgccgttatccagcgtaatgggaatagccaacgctgcagcaagcgataccacaccgcgcatgcccgaccagcccagcatgagcggcatcagaaatctgtttgtccggattccgggagctacagacggacggaaaataaatgtagcaatcatagcggcataagcgctgataatgcgtgcaacaaccaatacaaccgtaatcagtataccatagttaatggcagtacccagcggcacgccctgcgcacgcagcccctccacaatttcaggcagctccagaccgataatcagaaagacaataccattcagtataaacacaaaactttcccagacactgaagccccggatacggctggtactgttcaggaaggtaagctgccgggtagacatatacaagccgccgcttactacagccagcacaccggaacaatgcagctgttcggctgtccagtacataacgtacggttcaataagtgtaagcgcaatatcagaagatgcgtctgtaggcaaacgtttatgcgcctgtacaaaagcccatgcaagcaccagtccgacagcagcaccgccgattaccatccatgcaaaacttaatgcagcctgatgccagataaactgtcccgtacctacagcaattagtgcaaagcggaaaatgatgagcgaagacgcatcgttcagcagactttcgccctccaggatagccgtcgtcgatttgggaatccgtacaaacttcgtgatggctcccgtgctgatggcatcaggcggagcaacaattccgccaagcagaaagcccagagcaatggtaaagccgggaataaaatgattggcgacaagcgctaccgagagcgccgtgaagaacaccaccagaaaagcaaaactgccgataatgcgccaccattttttcatttccttgaatgagatggcccaggaagcttcaaacaacagtggcggcagaaagatgaaaaagatcagatccgggtcaatacgtacaataggcagtccgggtataaagcttaccagaaggccggcaacaaccagcaaaataggatacgcgattctcagcttattcgcccacatttccagtaatacaaccgctgccaccatggcaagtaaaaaaggtaagatactatgcattggattttttattccaatttaagcgtatttccgtagatctgccagcatttaaatctggttggggccaattcgtccaaagggggatttaatcagaagaatatccttgattgggtcgaacccctccaagggttttgttctaagccggaagaattgattttctaagaattcccttggagggttgttggttgagtctgccaattaatcgctgtttagcttgctggcgacttgcatgtattgtgctttctgtcagcggaagttttatatgaaagatataattagaatagttaattatacccaacaggttaaaattgatgctacaacaagcaatgaaagcaaattgtaccccgcatcaatagcaaacaatgtccatgattttccttcccaggcagtagcaccaagcagtcccggtacataaaatccaagccaggtgaaaacggcagaattcagaatacttgccactatattcatttcttttattccgggtacaaattgccacgcagcgatgttgtgtgcaaacacccatgcaaaaagaaaatttccgataatcataaacgacattccttttataaggactttattttccgcttttacattagggtcatagcccatttctttgccccataatttcccaaacacgatattgtaccatataaaaccaatgataaagtttacaacaactgctaccagtatcgcagcaatattaattttcaattccatattattttttattaaaatattctactcttttggatttttgatgactcccgtttgtatggttgctgctccatatttattttaaacaactgacaatataaaagcaatatagatttaaacaaaatatctgctacggtgtggcacagattatatgtacagcaaaacgaaattaaaaggttacaaacgagaccaattctcctgtgtcatcgtccaataaaaaaatgtatcctccaagggttttgtcctaagccggaagttttgatataccaaggacacccttgtaggtttttatatagcggttacccgcattatcttttttttcgttatgctgattttcacaaagccctatgtttgtccatacaacataccaattacgtggcaaaatcgctaaaaaatataggattaccgaagtaccctacgctttccctagggggagaccacgaggagaccacagggagcctagggtgaaaatcctgaaaaatgatctttccgtaaaagatcagctgctacctctaacctctgtatgttctcgcaaatcaatacctactgttcagactattttcaaaatgcaccggaaaaagcatcattaccaaagtaccacaggggagatctgccgcggcggagagcctgcctggaaaatctttcaaacaggtgttttttgtcttaatcagcggttcccggttttatatctgtaaattttacattggttacattctcactaagttttgagccacatgtacggtatgaaacccggtaagttaagtggctttacaaaccattgaattgacttaagattaataaaactcctgcaatccaatagtatatagttgcccgttagtaacattaattgttgcaggattgctgcctttaaaacctgttccggtatagctataggttccactaactattttattcgtcatatctattttcgtaatagttagggtacctgtgccggtgctgtcactatatgtattgcgtgtatcgccatataaaaaaacagcagacggatatgtgttaattgtttctgaattgctgtaaatcggatatgttcctgtggttattacaggggatgttgaatttaatacaaatgctacttcaacagtatctccggtagctggaatgtctaactgtgtaaatatatattcgtataattttacacctgagcctgaggtaatcgtatctgtaaaactcagataaccgccgcctgaagggatttgaggagctgcacccgaataataataatattctgcatcgggaattttaatttgtgattgagctgtgtatgtttttccgctgattgttacttgtgttcctgtcggtgcaggactggaggaattagaatcatgttttttactacaggaaaagaggagtattgctgataatactgaaatagagaacaggaatgttttcatatctaaaatacgtttgacagttagtaaatattttaaaaccattcatagaacgccttaaataatccatttattgtggtttattcttaatctaagacctaaggactaattctaatagaacgatatagactgtttagttaaaagtgaataaataattgaatccgccacgtaagaccttaggttgaattaaaggcgaaacgaaagagcaattcgtttaaaaaatcgtgttgtatctgtagccaaactttccgcgaaagaaaaagaaatgtatgggattagtacaattttttagatgaaataatatttgaatatttcggcggaataaataaattgagctactgttaagtttagctatgaatttttagatgtgcttagccagggaattttaaaagtagagttttaagaataaaaaaagcccctgttaagtacaagggcaaaacttgttgaggtaaacctcactacggaatgaaatccttattgtgatttgcttcgactcaaatgtatataaaattcttcaatatgaaaaaagttttaggattagatattggtacaaattcaattggtgcagcattaattagtattcctgaaaaatttgaggactatggaaaagaaggtaaaattgaatggataggtagcaggattattccaatagacggagattatcttcaaaaatttgaaagtggtgcacaagccgaaacaaaagcgggattcagacgagggaaacgtggttcaagaagattaaagcatagatacaaacttcgtagaaccagactaataaaattgctaaaactattaggttggattgatggcaattttccacttgatgaatcacgtaagtttaagcaaaatattaatgaaaatggatattctcttaaaattagtagctatttgcccttttcagaacaaactatatcaggctttgaaaaagaattaggtattgaaaacagaaagagtaaaaaaggaaaaagtatagttccagaagattggattgtttattatctcagaaaagaagcacttaaaagaaaaataaccgatgctgaattagtacgtattctttatgtgctaaatcaacgtagagggtttaaaagcagcagaaaagatttgaaagacacaatcattttaccttatgatgtgtttgtaacgagaaaagacaataatgattttgatgaaaatggtattgaaactcaatttgtcgctattacaaaaattaaatcaataacgtttaaggaagaaaagaaagatcaaaagggaaatattgttggtaatatctacacaataaaagcagaagattcaaggattcaaacctgggaagaaatccgcaagaaagaacctgattgggctaaggaaacgaatgaaaaaggtgaaaaaattgataaaaaggaatttacgttcttagttattcagaaaattgataaaaatggtaagcatacacaaaataaaccacaaatgcctaaagcgaatgattgggcattatgtactactgcattgagtgaaaagattgaagaaaataagcaatatcctggagaatatttttttgatgaattaaaaaaggcgtacaagggtaatcgtagttataaaatccgccagtaccctgtttataggtggcgttatcaaaaggaattagaagcaatttggaataagcaatgtgagtttaatgatgatttaaaacgacttaatacggacaaaaatgttttaatcaaacttgcagaaattctttatccaacacaggccaaaaacaatatgcctaagttaacagaatttcgaaacaaagatttattacacattatcagtaatgatattatttattaccagcgtgaattaaagtcacagaaaaactctattggcgaatgtcgttacgaaaagagaaaaggaattgatggagaattttatggtttaaaatgtattcctcgttcttctccattgtttcaagaatttcgtatttggcaggatattcataacatcaaagtgctaaaaagagaagaaaaggttgatggcaaaaccaagcttgatgttgatgttacagatttatatgttgatgacgatattaaaggaaatttttttgatttattccaatcaaaaacaaccatttcagaaaaagaaatattgaatttgataaaacaattaaaacctgaaaatgacatactaatttctgacaaaaaagatggagtgcattcacaccgtataaatctttttgctaatcgagaaagtttaaaaggcaatgaaactttatctcgttatcgttccatttttaaaaaggcagggttcgagagtgaaactatcttaaacgataaaaataacctaatgaagttgtggcatattgactattcaattacatcgtcagatgaagcaaaatctaagaaaggaattacgaccgcacttgctaatcttttacctgataattcgaataaaaatcaaacgattgaagcattttgtaaactggcagaattaaaaaaggaatatggttcgtattctgcttgtgcaattgaaaaattattacctctaatgcgttgtggaaaatattggcattcgattgaggagcagattatctataaagaaggtcaactagaaaaagctactaagcaaaaacataaaagagaaattgaagagtatttaaaatacttaaaaagtatcaatttaagagctaatcaaataaaggaaaggttaaactatataaataacaatataagaagactaaaagaggtttctgatgatgagctacaaaaacaagttctcaaaagttttattagtaaggatgatttgacaaaaggtttgaatacatatcaagcaggatatttgatttacgacaaacattctgaaaaagagaaatcctcaatttatactgttgatgaattaagcaaatacatacaaaaagaaattcccaataatagcttacgaaatccagtagtagagcaagttgtaagagaaacaatgttcttggtacgggatgtatggaataagtatggtgatattgatgaaatacatattgagttagggcgaaacttaaaaaataataataccgaaaaagaaaaaatctctaagtctcaaaccgatagtttcaatgaaaagcaacggattaaaaatctactttatgaattaaagaataacggtattgaacaatacaatgatgacaatgaaattgaacaagctaactttgaagtcaaccccaatcctgaaagccctgtagatattgataaatttagaatttggcgtaatcttactaacaaatcagaaattgattgggttaaaaaagtaaaggatgaacaaataccaacagatcaagaaataaaaaaatatgcgctttggttaagtcaaaattgtcgttcaccctacacaggaaaagtaattccattaagtaaattatttgacatcaatcaatatgaaattgaacacgttattccgcgttcgaagatgaaaaatgacagctttaataacttggttatttgtgaatggggggtgaataaagcaaagaataaaagacttgctgcaaattttatcagtgaaagtaaaggtaaatgtaaatatggtgatgtagaatactccctctttacttacgaacagtatgaagactattgcaaagacacttttaaatttcaaaaaggaaaacttaaaaccttattgttgactgaagtgcccgaagattttattgaacgtcagctaaatgatactcgatatataggtcgcaaactttcggaattacttgcacctgttgctaaaaatgaaaacaaaattatttttacagtaggtacaatcacttctgaattgaaaaataattggggattaaataaagtctggaaacaaattatcctaccacgctttgaacgcttagaacaaataacggataagaaaggagaatatgtcatatatgataaagatgaacatggcaatcctattattcatctgaatgtgaaagaaaaccctaagctgaacactaaacgtattgatcatcgccatcacgcattagatgctttgattattgcagctaccacgagagaacatatccgctatctgaatacactaaatgctgctaacacggatgaagaaatcaaaaaaattaaacaaacgttagtaaaaggaaaaattagagattttaagttgccttgggagaggtttacagaaaatgccaaaaacaaactagaagaattggtagtgagttttaaaaccaataataaaattgtttcacaaccgaaaaacaaaactgcctacttcaagctcgaaaatgggaaaattagaaaagaatttaaggaacaaaaagcaaatccaaaatggatgtcggttcgtaggtcaatgtttaaagagccacagggaataatctatttaaaagaagtttatgaggaaaaaaatattgctaaagcaattgaaatccaaatagatcgaatgttagtgcagaatactcctgaaatgaaaactgcaccttatgtttacgacaaagaagcaaggaaaattattaaagatttgattgatagaactgatattgctatacaagaaaaagaaattcttttaaaggaacttaaaaaatatttaaagaaaaatcctttgaaaaattttgctggagaagaatacaagactattcaagtagctcaatttgaagaatatgctgcaaaaagagtaacacttgatgatagttttgatcacaaaaaaattgacaaaattcccttcgctaaagttggtaaatcggttttagggaaattattacatgaacatttaacagaatacgaattatttacagtacaactaaagttaatagaagaaaaacagaaagtgttgaaaaaacaaaatcccaatttatcgaacgatgaaataaaaaaaatgctcactaacgatgaaaagaatattttagacaacccaattccagagccatttagaggtgaagggattgaaaatcttgcaaaaaagacaggtaagcctattaccaaagttacaatatatgagaagaaggaaagttcaagcaagtttggaaatcaatatgtcgagatagatgctggtagtaatgtttattttgtaatgtacgaagatcaacaaaccaaagaacgttcagattttaggtctattgctactcataaagccattgaaaaaattgtaaagggtgagcctattgcagaagataaagacggatttgataaaataattttagtaccaggagatttggtatatatacctacaaatgaggaaagacaaaaaattgtaaaaggagtgggaatcgataaatctattgactggaaaaatcaacttcatatatcagagcgaatttataaaatgactgatacgacacaagggaaatgtatatttgtgccacatagaatttcctcggctataattgatgagttagaaatgggatcaagcaataaatcagcaagagcttgggacggtaaagtggaatatagactgaactcaaaagggaaattgacaagagaagattctggaagtatgattaaggaagtctgtatcaaactaaaagtagatagattaggaagttataaagcctaatgtaaaatattgagattgattacaacccagccttctttaactgcaatttcaacagagttgtgatttgctttcgttctttaaaatattgagattgattacaacctgctaccgggagatacattcgatataacagttgtgatttgctttcgttctttaaaatattgagattgattacaacatattgcatttcttgacgaacaactatctggttgtgatttgctttcgttctttaaaatattgagattgattacaacggcgttgttgttgaatctgctacagaaccgttgtgatttgctttcgttctttaaaatattgagattgattacaacttaataaattatctggatgtatactatattgttgtgatttgctttcgttctttaaaatattgagattgattacaacttgattttgttttgcaaaatcttgatacaagttgtgatttgctttcgttctttaaaatattgagattgattacaacatttatgacatatatcatttatttctggttgtgatttgctttcgttctttaaaatattgagattgattacaac

SEQ ID NO: 4415 - DNA, 10724 bp, synthetic construct
  variation 3947..3948: note = note, n is a, c, g, or t
  source 1..10724: mol_type = other DNA
  misc_feature 1..10724: note = Synthetic
tccaggccgagataagaataatgtgcccaaaacatggggccgccgttccatgcatcgccctggtgtttcatttgcaaacggaaaggaaatttttctgcaatgccttcagctttatttacttcatttatttttccattttgtgcccatccttcgtggtaaacctttgccgctacagcatgtgtaggcgatgctgccgcaagcacatacattattaagcactcattatacccgtgcaccctgaaatccattttccagttataattggggctccagtgccaaaacaatacattttctccattcgtgtaccagtcaaactctacctgcttccataatttatctattcgatgtgcaatttgtttttcgatgctgttgccgtttttaaaatattgccttacgcaaagcaagccctggagaagaaaggaagtttccaccaaatcaccaccatcatcaaacttgctgaaaggctttgttttacctgtttcgccataccaccaatgcggccatacgccatgaaatcggtcggcagtttccagaaagtttactattttattaagttgggcaacaccctgttccctggtaataaatccccaatctatgcccacaactaatgccataatgccaaagccggaaccgccactggttactactcctgcgtctttttgcggataaatactatctgcatggatgcgttcccttgccatgccgcttaccggttctgccccatcgtagaagtattgaaaagtttgcctttgcaacaaatcaaaaactgcattattagaatattgagctgctgataaaggattggatttatatactttggtattatggcatgagaaaaagaaaccggttaatattgctaaaagaagaaaaaaaaatttccgcataatttcaaatgagcattttgtgaaaataaaatttataaatatggagcagtaaaccctaaagtcaacatgcctgatttaatttcgggacagcttgtaaataaattccataacaatccggtgcggtaattttcaatcatcactatcattgggccctggtctattgcaaggtaagaagaagcaaaccattgattttttaatgaaaatgcatccacaaacccatattggccccaaagtttatcgcccaatttataataataaaattttaatgcctgcatagattctgcaggcgtgtaagctatagaagaaatggcagcagtgggcgcaataacgccaacatcgttggtaggtgaacttgcggtatagccattttgaatatcgcttgccgttaaaccccagcacaattggctatacccatagtttgaaagtgggttggccttacaataattataattgatgcgtgcatggttttttgtttgtgtttcaaaacttatacctccatcctgcaagccaaaaggatttatgcctaaaaaactataatgagaaaaaaacaacgggccaccaaaattggggcctaagggcaaggtataaccataataggtattgccgtttaaatatccgcttccacccttccagccctggttataaacaattagcggaataccatgcgtagccgatgatgctgcaagaatataggtgattaaacattcgttccagccttttatgggcaagttcattgcccagtcaacggtagggctccaatgccagtacaatacattttggccgccacggcgaaaccaatcccattccacacggtttacaataatattgatatcatctctcaatgttatttcattcgtattagccgcatcaaaatattggcgtgcacataataatcccataacaaggtatgaggtttccacaaggtcggcgccattatcattagggctgaaaggcactgctgcaccggtatttccatttatccaatgaggatatgcgccatgaaaggtttgcgccgtgttttttaaaaaagcaactattgtttgcattctttgcaaaccttcattacgggtaataaaactacggtttatgccaacgggaatggccataatgccaaagcccgatccgccgctggttgttacatcgcctgatgtatttctttctcttgccaggccgcttgccgggtggccaaaatcccaaaagtatttaaaggtttgctcctgcactttggtaagcaatgcatcttcggttattaaagggaacttatccgaagagtctattttacttacaaaatttatggttagcgccgagagcaatttacctccggcctgcgactttagtgttgtatttaccgaaagagaatattttgttaaggcttgtaaagaaagattgggaataatattaattgcactatcgccattagacattgtactttgataagaaattaaagcgccctggaaattcctgaaatttaaggcaggcgaaacagtagctgcatcaatttttgtggagaaataaaattttattaccggattaaaactgcaatcatattttaaatttaaaaatgctgcgccatcaatagttgcggaggaaacagaaaaaccgggtggcgtaaccggcggattttgatctgaattatcttttttacaacccaaccataaaaaagacatgaaaacaatatagaggcattgcttcataagcggtataaataggcattaaatttacgataaattctacagttattattgctgctgaagaaacttaacagtattaatcatatcaaaatgcaatatcctgtctttatcattaaaacgcacatgcttcctatagcctgcaagaacagattctaatgtaggagaagattttaaaggcctcctgaattccattgcctgtgcggctgtaaataattctatggctaaaattttatacaggttatccaacagccttttgcattttgttgctgcatttgcacccatgctcacatggtcttcctggttattgctggatgggatggagtctacacttgccggtgtgcagagttgcttattttcactcactatacctgctgccgtatattgcggaatcataaaaccgctgttgagccctggattttttaccaaaaacggaggcaggccacgctgcccactaatgagttgataggttctgcgttcgctgatacttcctaactctgcaagagcaatacacaaataatccagcgccattgccaatggctgaccatgaaaatttccgccactcacaattaaatcctcatcgggaaaaatattggggttgtcggttacggaatttatttctttcaaaaatatttcgctcacatattcaatggcgcctgcgcttgcgccatgcacctgtggaatgcaccggaaactatacggatcctgcacctgcgatttttttgcgccgcaaatttcactgctttgcagcaggtttctcatttcagccgcagccgatagctggcctttatgggagcgaaccaaatgaataaattcattgagcggctcggtactacaatcaaaagcatcgaagcttatagccgcaattgtattggcccattttgccagctttgttgcatgtattaaaatatagcaaccataagcgctcataaactgagtgccattaattaaagccaggccttctttactttgtaaattaatgggctgccagcctaaatgctgtaaggctttagctgccgctattatactgccatcaacctttactactccttcggcaataagcggcagcgccaaatggctcaaaggtgcaaggtcgccggatgcgcccagggaaccctgtgtaaaaattaccggaagcacattgtggttatacatatccacaaaacgctgaacagtttgcagctgcacgccggaattaccataagccagcgatttaatttttaaggcaatcatgagctttacaattggttcagcaacttcctcgcccattccgcaggcatgtgaacaaatgaggtttttttgcagctcttccaactggttgttttcaataactacgttttgtaaaaaaccaaaaccggtattaatgccataaaannttttactaatagaaaccttatggctatggccggttaaagcggtaagctgatctattgaagtaaacgggttatcgagaatggttggttgtaggctcatataggcaatatccttaactggtaaaattttataaaatttaattcaaaagtaaataaaagagataatattggttagtaaaataaacaagctaaaaatcaggcgggcaacctgaggtcgcaaaaataaagttatagctacaatcactatacacaaataaaacgagctatccttaaaaatcctgagcagaaaataaattttatttgctaatttgaagtttaaaatccggcctttaggaaagaatctgctaaaacccatgaaattgaccggctatataaataccttcttaaaaaataaaaatgcccctgttaaagtacaagggcaaaaactaattgaggtaaacctcactacggaatataatccttattgtgatttgcttcaatgcaaatatataaaaagaaaaaaacatggaaaacaaaatgaaaaaaattctagggttggatattggaaccaactctattggggctgcattaattaacataccaaaagaattttctgattatgggaaagaaggaaacattgcatggataggcagtagaatcattccaaccgatggtgattacttgcaaaaatttgaaagtggcgcacaagcagaaacaaaagcagcatttcgaaggagtaaacgtggcgcaagaagattaaaacacagatataagttacgaagaacacgacttataaaagtttttaaagcattaggttggcttgatgaaaattttccattagatgattcaaaacaatttaacaagaacataaacgaaaatggctactccctaaaaatcagcgattacttacccttttcaggtgaaaccatttctgaatttgaaaaagaattaggtattgatggtaagaaaagtaaaaaaggtaaaagcatagtccccgaagactggattatttattatctgcgaaaaaaagctcttaccacgaagattacaattcatgaattagttcgagttatttatatgcttaaccagcgtagggggttcaagagcagcagaaaagatttaaaaacaacaaatgttcttccatataatgaattcatagaaaagaataacaaaaaagaatggggtgaagaaggtatcgaaacacaatttgtagttattacaaaaataaaatcggtaacatttaaagaagaaaaaaaagataagaaaggctatgtcgtatcaaatacttatgccattgaagcagaagaccaaaggatgaaaacttgggaagaatcaagaaaagaaaaaccaaaatgggcagatgataaagacgacaataacaaagaaattgaaaaaaaggaatttacatttttagttacacataaggttgataaagacggaaaacttactcaactcaaaccacaattacctacaaacgatgattgggcactttgtacaactgccttgagtgaaaaaatgcaggaaggaaaccaacatcctggagaatacttttacaatcaaattaaagaggcatataaagcaaaccgaaattttaaggctcgtcaatatcctgtttacagatggcgctataaaaatgaattagatgctatttgggaaaaacaatgtgaattaaataaagaactcaacaaatttaatgctgctaacgcaacactcacaaaattggcagaagtgctttatcccacacaggctaaaaataatatgcctaagttatctgaattccaaaagcatgacttattacacatcataagcgatgatattatttattaccaaagagaattaaaatcgcaaaaaaattccattagtgaatgtcgctatgagaagagaaaaggtattgatggcgaatattaaggattaaaatgtattcctcgttcttctcccctatttcaggagttcagaatttggcaagatatacacaacatacgagttttagaaagagaagtaaaagtagatggaaaaacaaaattagatgtagatgtaactgcttctttcgttaatgatgagataaaagaaaagctatttgatttatttaactccagagcaactgttaatgaaaaaagaatacttactcttctcaaagaaaatcatcccaattcaaacatcaaacttgatattgacaagaaagaaaaaatacattctcataggatcaatctttttgcaaggcgtgatgaactaaaaggaaatgaaacgctttctcgttatcgttctcttttcgataaagccgaatttgatggaaaagaaattgtgaatgacaaagaaaagctaatgaagttatggcatatagattattccataacctcctcagatgaagaaaaatcaaggaaaggtataactactgctttaaacaaacttttacctgataactctaacaaagaaaaagttattgagctattcactaagctatcagaactcaaaaaggaatatggctccaactctgcttgtgcaattaaaaaatttctacctgtaatgcgttgcgggaaatattggaacgagcaagatattactcctacaataaaagaaagggcaacgcagattaaacaacgattggatgacatcaaccacagcattaagagaatatcagaaattgctgatgacgatgtgcaaaaacaagtactaaaaagttttattgaaaaaactgatttagccaaaggcttaaacacctatcaggcaggttacttaatttatgataagcactcagaaaaagataaagccgtaattaattctattgaagaatttggtaagtacatacaaagagaaatacctaacaacagtttacgcaacccaatagtagagcaagttgtaaaggaaaccatgtttttagttagggaaatatggaaaaaatatggggagatagatgaaattcatattgaattaggaaggaacttaaaaaacaatagtgatgaaagagataaaatttcaaaagctcaggataaaaacttcactgaaaagcaacggattaagaagttgctttatgaattgataaataacggttttcaccaatataaagagggtactgaaatcgaagatgtgaagtttgaagttacgccaaacccagaaagcccagcggatattgagaagtttagaatatggcgtagcttatcaaaaggcacagaaaaagaatttaaagacttattggaaaaggagaagaaggataataaggaatatatacccacgacaggcgaaataaaaaaatatgcactttggttaagccaacattgccgatctccatataccggtaaaataattccgcttagcaagctctttgatattaatcaatatgagattgaacatattatccctcgttcaaagatgaagaatgacagctttaacaacttagttattgctgaatggggagtaaataaagccaaggacaaacaacttgctgcaaattttattgctgatagcaaagggaaatgcaaatacggagacacggagtataagttatttacctatgaagaatacgacgtttattgtaaagacgtattcaaatttcaaaaagcaaaacgtaagaatctattggctacagaagtacccgaagattttgttgaaaggcaattaaacgacacccgctacattggcaggaaattatctgagttacttgcacccgttgcaaaaaatgaaaatgggattcttttcaccggaggaatgattacttctgaacttaaaaacaactggggattaaataaggtttggaaagaattgatgcaaccacgttttgaacgattagaaaccataacagagaataaatacatcgttcacgataaagacgaacatggtaatcctgtaattcattttaatgtaaaagaaaatgagaaattagatttaaagcgtattgaccatcgtcatcatgccttagatgctttaattattgcagcgaccacgagagaacacattcgttacctaaacacattaagtgcggcagatacagacgaagaaataaaaaatttcaagcgaaccttagtaaaaagcaaaatcagggattttaaacagccatgggatggtttcacaaaacaagcaaaggataaattagaagaaacgattgttacctttaaaacaagtaataaaattatttccacaccaaccaatcggactgcttcatggaaaacagaaagcgaaaagcaacctaaaaagatttttaaagaacaaaaacagaatgctaaatggatggcagttagacggtctatgtttaaagaaccattgggggtgatccaactcaaggaaacaaaaatggttcccgttaaagacgcatttgaaattgaaattgaacggcagttaattgataaagacttagaaaaaagaaaaacagcatcttatgtttatgaccaatatgctaggcaaatcataaaagagctaatcaaacgctgtaactcaggtattgatgaaaaagattcattgattaacgaaatagaagagtatctaactaagaacagcaagaaaattgaaacaggaaaagtcaacaagaaagggaaaccacaatacaaaaccctttatcaattagctgaaaaagaatacgaagccatagaagttgcacactttattccttataaaactaaacgaatggatttaactaaaaaagattacgtagaaaaactaacgattgaaaaaatgaaaaatgattttccttatttctcattcattaacaaaaactatttcgactcacttcccaatgagaaacaactaatcattacagatgcggatcttaccatttcaccaaacaggaaaacaagtgcctttaacttattgatgctggaccatattttagagtacaacaatgtacctaaagaagcatttaatgcagaagggcttgaaaaattaaacaagaaagcaatagagaatcctaaaattgggaaagagattaaatctattactcgattagatggaacagtagatattgaagatatgtttaacggtggtttttatgaaacagacaagggagcaatggcatacttcataatgtacgaaaatccaaaaatcaaaaaacgcaccgattataggtctattgctacacacaaagcaatcgaaaaaattgtaaaaggcgaccctattgcagaagatagagatggatttgataaaattattctttcaccaggggatttagtttatgtgccaacaaaagaagagattgaaggtaaaaaagaaattaattggattaataaaaaggaaatttccgaaagagtttatgttatgcggaaatcaacgggcaagcaatgctattttcttaaatcaagaatatctgatttaattatttcttatgatagcgattcgaaaacaggagaatacggcagtcaaaatttaagtgaaaaaagtgatgatggcattaaaataattgatgtttgcatcaaactaaaaatagaccggctcggcaacatctcaaaaacaggtagttaccaaacttcttcaactacaaacaataatgcggtatccgaaccggaagtgagctataccaaaagaaactggacattaaaaagctttaattcctttgaagcaatggaagatgatcagttggcctattacgctgccatgccaccaatagagcggctcaaagctttaaaagaattgacactaaacgcatttggattcaagcatgaatctgaaatgaacgcccccgatcgtaaactaaaatttgatgaatagctatgaatattttttttaaagaacaccatgaaatcctggctgcacttttaaagcaccgggtaaattttatgcttattggcggctatgcggtaaattattatggatatcatcgtacaaccggagacatggatatttggttagaaccatctaatgagaataaagaaatgttgctacaggcatttactgctttaggatttgacgatgaaggcatccacactataagaagctgggattttacaaaagcccaaaaatttcatattggcagtaatagtcagccggataaaacagaatttttgacgcatatttcaggagtagcatttccaaatgcttttgcacaaaaaacaatggcagatattgatggcttcagtctgcccgttatacatttcaacagccttattcaaaataaaaaatcgtcaggtcgtacaaaagatctggcagatgtagagtatttagaaaaaattatacggttgaaaaataaaataaaataggtgtaagtaattttgaggcattgctatatgtctcagttaaaaaaccgaatgcgcactatatgataaaacgcactctttattttggcaacccggcttaccttaaaaccgaaaatgaacaattagtagtgcaactgcaaaatgaagttgcccagcctaaatctattcctattgaagatattggcatattgatattggaccaccggcaaatcaccatcacccagtctttactttcaaaacttttggccaataacaccgcagtaattacctgcgatgaaacccaccaccctaccggtatgctgcttaccttagacggcaattctcttcaaagcaaaatgtttcaaatacaaaccgaagccagcctgcccttaaaaaagcaattatggcaacaaaccattgctgccaaaattcaaaaccaggcaggcatgcttggctttcaaagagcagaaacgcaattattgttaaacctggcatcctcggtaaaaagtggcgatagcgataatgccgaagcccaggcagcggcatattactggaaaagagtttttccggggacattatcatttaggcgggaacggcacgggccgccgccaaataacctgctcaacctgtctcttatacacatct

SEQ ID NO: 4416 - DNA, 10577 bp, synthetic construct
  source 1..10577: mol_type = other DNA
  misc_feature 1..10577: note = Synthetic
gttaaataagattttgcaattccgtttctcctttttattagcttcataactttgagccgatttctctattcttcccattatgctactcttgggtcggcatttcctcacaattcttagctattcaactttgtagtaattgcaatgtggttaggtggtgggtggaattgatagacacgtctcgccttaggcgagatggccagcaatggccggttcaactcccgccccgggcacctcattaaataatactctttcctgccttattttctctctttacaataatcatagctcccagttctacaaaccttattttaattggcctcgtgttccggagagacaaaaccgaaaaccggacaaaggtcatggcggcctgagtgcgcttttaatatgctttattcatactttatcctggcttaactcccgatctatcattgcaccataaaccggatcgaatcaggtaaagcatacaataatcatacagattattatttttaaaatattttatattatttaaataatatctataattttgctgcaaatattataaatatataatattacataaaataataatatatatgaaaaattcaagtttcaagcattcccgaaaaaggataatggtcatcggtaatggaatgaccggacataaattctgtgagaaactaaaagaaaaagatacgcataatcaatttataatcacagtattatctgaagaacagcggcgtgcgtatgatcgtgtacatttgagcaattactttagtgaaaagagggttgataacatgtatttgtgtgaaccggggtggtataaagatcaaaatatccaattatgtcttggagagtcagtagctgaaattgataaatataaaaaaaatataatatcatcttcaggtaatatattttcttatgattatctggttattgcgaccggatcttctccttttattccttctgtaccgggaactgacctattcggaattcatgtttaccggaccatagaagacctggaacttatcatggcacacgcttataaatcaaaaaaagcaacggtaattggtggaggcttgctggggctggaagctgccaaagcaatgcttgatttaaatatggaaacccatgtggtggaattttcaccccgccttatgccccgccagcttgatgaaacaggcgccggattcttaaaaaccaagctggaacatataggcattcaaatacatctgaataaaaatacggttgccttcagaggcagggataaaatagaaagcattgaatttgccgatcatacggaattggaaaccgatatggcggtgatatctgcaggaatcaggccaagagatgaactggcgcgtcagtgcgggctgaaaatcgggccacgcggcggtattatggttaatgagcatttgcaaacctccgatccttgtatttatgctatcggggaatgtgctttgtttgaaggcatgatctacggtttggtggcacccggctatgaaatggcggaagtggtagccagcttgttaaccggtgttgaaaaaacatttcattcatttgatatgtccactaagctgaaattgatcggcgttgatgttgcgagctttggcgatcctttcggtatgaacactgcacataatccggtaatttttgaagaccgcaagcatgatgtgtacaagcgcattaatatttcggaagatggaaagaccttattaggcggcatcctggtaggcgacgcgcaaccctataacatgttactgcaaacctacaggaacggcttggccttaccccacaacctcgaaaatattttatttgaaataggaaataaagaaggaaaaaatggtggaggaataatggaattgccaggctccgcgctaatatgttcctgcgaaaacatttccaaagaaactatctgtaatgccgtcgtcaaccaaggtgtaaccgatatagaagggatgaaaaaatgcactaaagcgggaacaggctgtggcggatgcatcccgtttgtaaaagatctgatcaacgaaacactgaagcttcaggggaaagcagtgaagcaaacgctgtgcgaacatttcgattacagccggcaggaattatatgaactgatcagggtaaaagaaataaagacatttgacaacgctttacaatccttcggacatggcgcgggttgcgaaatttgcaaaccggccatagcttctatcctggccagtgcatggaatgatcttatcatccggcaggccaccatccaggatacaaatgaccgttatcttgccaacatacagaaagggggatcttattctgtagttccccgtattccgggcggagagattacacccgaaaaactaattgcgatcggacagatagcacaaaaatataatctctattgcaagatcaccggagggcaacgcattgatttattcggagcacttgttcaccaactgccgcagatatgggaagacctgattgcggccggatttgaaagcggccatgcttatggtaaagcggtacgcacggttaaaagctgtgtgggttccacctggtgccgttatggattgcatgattcggtgggatttgctattgagttggaagagcgatataaaggattgcgttcaccacacaaaattaaaatggcggtatccggttgcatccgggaatgtgctgaagcccaggcaaaagatattggtgttatcgccaccgaaaaaggatggaacctgtttgtatgcggcaatggcggcgccaaaccccagcatgcggtactgtttgcatctaacattgataaagaaacggtgatccgttatattgaccggctcctcatgttttacattaaaacagccgaaccgcttacccgtactgctacctggctgaataaaatggagggtggactggagcatttaaagaaagtggttatagatgacgaattgggcatctgcgatgcgcttgaaaaagagatgaagcaaacactcgatcaatattactgtgaatggaaggcggtggtggaaaatccggaattacgcaagcaattcacccattttgttaattccggtgatccggatcctaccattcaatttaatgaaatacgaaagcagaaagttcctgcttcatgggaatgatattgaaaaagatggatgaatattttcaagatgaaaaaatggcacgcggatcttgatgatctgttaagataatcgcagatcattcatcatattttacataaagacacgcaaaatatgattcaccttcggcgggaaccataaccaatcatgaaaacctgcctgccggcaaaggcaggttccattttttgacttgcgtcaatgtgaataatcattaaagaattataatatgaaaaaagaaatttcagaaaacggagtattaccggggaaaataaaagaatggtttaaagcctgccggacaggagatgtaccagacaacggcggttcctgtattaagtatcaggatgagcaaatagccatttttcattttgctgatcttaaagaatggtttgccacgcaaaatctttgtccgcacaagcagcaaatgagcttatcccatggcttattgggcgattcagccggtgagccgaaagtggcctgtccgtttcataaaaaaacattctcattgaaatcgggaagctgccttactgatccggaattatattgcatcaagacttatcctgtcaaagtggaagacggatttgttttgatcgggattagagaatgaagaaatagagaaaagctcatctttttcaaaattccgctcaatctccgctcaaaggatttaaacctacctgacaagaaaagtacatttttgtctaataatttttaaatataaaaattattaactattttgagcggtgttagaactataaagtctattctttacctaaatatttaccatgaatctaatggatcactgccaattctatctgtcttgcaacgtccattcttcctttcagatatctgcagatacagaatatatactcttggattatttgccagaaatggagccggggtaagaaatgttatgaataagtataaaaaagatgatcccgccttgtagctggaccctcttaaatgttttcacgaagaaaaaaatagcccctgttgagtacaagggcaaaaacttattgaggcaagcctcactacggaataaaatccttattgtgatttgcttcgcgacaaaaatagaaaaagaaattgatatggaaaagaaaagaaaaaaagttctaggtttagacattggcaccaattcaataggtgcggcattaattgatcttcctcaggattttgccgaatatggaagtgacgggaaaattgaatggatgggtagtcgaattattcctaccgatggagattatttacagaaatttgaaagtggcgcacaagctctgacaaaagcagctttcagaagagaaaagcgtggttcaagacgattgaaacatcgttataaattacgtagaactcgcctgataaaagtgtttaaagcattaggttggcttgatgaatacttttccctggataattcaagacgatttaaacagagcgttagtgaaaatggatattcatttaaaataagtaactaccttccattttcagatgaaacaattaccgagtttgagaaagagttaagtatagttgggaaaaaaagtaaaaaaggcaaaagtattgtacctgaagattggattatttatttcttacgtaaaaaagcactaacgaaaaggattaccattcctgaactggctcgtatcatttatatgctgaatcagcgaaggggttttaaaagtagccgaaaggatttgaaaacaactaatgtactaccctacggtgaatttgtcaaaagaaaaggcaagaatgaatttggagaggaaggattagaaactcaattcgtggttatcactaaaatcaaatcagtaacgtttaaagaggagaaaaaggataagaatggaagttcaaatatttatacaattgttgctgaaaatacacggcttgaaccttgggaagaaacacggaagaaagaaccggactgggcgaaagaaattaatgataaaggtgagaagattgaaagaaaagagtttacatttttagtcacacaaaaagtagataaaagcggaaaatttatccagaataaaccacaactaccgaaaaatgatgactgggcgttgtgtacaactgcattaagtgaaaaaatagaagaaaagcatctgtatccgggagaatatttttatgagcaaattaaagaagcatatttagctaaaagaaattttaaagctcgtcagtatccagtttacagatggcgatatcaaaaggaattagaagctatatggaacagacaatgtgaattaaatcctgaacttcaaaaattaaatacagatcaggctacacttataaagttggcagatttgttataccctacccaagccaagcacaatatgcccaaactgtctgagtttaaaagcaataatttactgcatataattagtaaggatattatttattatcagcgtgaattaaaatctcagaaaagttcaatcagtgagtgtcgttacgaaaaacgaattggcaaagagaaaaatgaagaaggcgtttatattgaaacgggtgtttatggattaaaatgtattccccgttcttctcctttgtttcaggagttcaggatttggcaagacattcacaacatccgtgtgttggagcgcgaagtaatagttgatgggaaaaccaacttagatgtggatgtaaccggtaattttattagtgacgacataaaagccaaattgtttgagttgtttaattcaaaggcatccataagcgaaaaggatattctcaaactcttaaaagaaaaccaccctgattcaaatatcaaattagacattgacaagaaagagaaaactcattctcataggatcaacctttatgcaagacgtgaagaattaaagggaaatgaaacattatcacgttacagaattctatttaaaaaaaccgattttgatggagatgatattctttctgacaaagaaaagttgaggaaactttggcacattgattactcaattacttcatcagatgaagaaaaatctaagaaagggattactactgccctaaataaaatacttcctgataacccgaataaagacaagggaattgaattatttacaaaattatctgaactaaaaaaagaatatggctcttattcggcctgtgccattaaaaagatgctttctgtaatgcgttgtggaaagaagtattggcatgaacaagaaattaatgaaacaataaaacaaagggctgttgatattaaaaagcgtttagataatattggtcaaaacgtgagaagaattaatgaaatcgctgatgacgatgtgcaaaaacagatattaaaaagttttattgggaaagaagatttgactaaagggctaaacacttatcaggctggttatcttatatatgacaaacattctgaaaaagataaaacttccatcaactctgctgaagattttggaaggtttatacaaaaggaaataccgaacaacagtttacggaatcctattgtagagcaggtagtgagagaagcaatgtttttagttagggatatttggaaacaatatgggaagatagatgaaattcatattgagttagggcgaaatcttaaaaacaatagtcaagagcgggaaaaaatttcaaaagcacaagatggtaattttaaggagaagcaacgaatcagacagttactatatgagctaatgaatggtgattttgagcagcatattgatgaagatgaaactcagccgtataagtttgaaaatggaatgtttaaatggggaactaaaatagaacatacaacctttaaagttaaaccaaatcctgaaagccctgctgatattgaaaaattcagaatttggagaaatctttcaaagcaaagcgatatggaatgggctaaaaaagtaaaagatgaaaaaataccaactgaacaagaaattaaaaaatacgctttgtggttgagtcaaaattgtcgttctccttatacaggcaaaataattccaataagtaaattatttgatgaaaatgaataccagaaagagcatattatccctcagtcaaagatgaagaatgatagtttcaataatttggtaatttctgaagccgctattaatcctccgccatacaagggaagtatgttggcaagaaacttcatttcacaatttggagggcaaactttaacaataaataatcgagaatatcccattttaaaagaaacagaatatgaagcatattgtaaagacactttcaaattccaaaaaggaaagctcaaaaacttgttggcaactgaagtgcctgaaaactttattggaagacaattaaacgacactcgctacatcggccggaaactttctgaattgctggcaccagtcgcaaaaaatgaaaacggaataatctttacaggaggagcaattacatctgaactcaaaaataattggggattaaacaaagtgtggaaagatctgatggagccgagatttgaaaggctgagtaaactaactccagaatacatagaagaaaagcgaaaactagatgaagaatttgctataaaagatagtcaaggacaaccaagaaaagataaaaatggagatatcgtagtacaagacgaccgaaaagtagaatatgagcaaaaagttagagccataccattgaaatacattattcacgacaaaggcgaatacgggaatcctgttatacatttcaatgtaaaagaaaatgaacaattagatttaaaacgcatagaccatcgccatcatgctttagatgctttaattattgctgctactacaagagaacacattcggtacttaaatactttaagcgctgctgatacggatgaagaattcaaaaactttaaacgcactcttgtaaaaggaaaaatcagggatttcaaaactccttgggaaagatttacaaaagatgctaaagacaaattagaagaaacaatcgtaacctttaaaacaaataacaaaatcatttctgcgcctaaaaaccgtactgcatacctgagagttgaaaatgggaaagcaaaacgtgagtatagagaacagcagcctaacaaaaaatggatggcggtgagaaggtcaatgtttaaagagcctttgggtgtaatttggataaaacaaattaaggatgtatctgtaaaagaagcttttacaatagaaatagagcgacagctttcttataatgatttaaccaaaaggaagaccgcatcctatatctacgataaattagcaaggcaaattatcaaatcaataattcaacaatgcaattcaagtattgacgaaaaagatgcacttatcaaagagatagagttctatcttactaagaacggcaaaaagattgaaaccggaaaggttaacaaaaatggaaaaactcaatacaagactatttatgttttaaatggtacagaattcgaagaagttagtgtagccaattttgtggcctacaaaacaaaacgcatggcgttgacaaagaaggactatgtagagaagctgactatagagaaaatgaaaaatgatttcccttatttctctgaaaatgaaaaacgtaataatgctttcaataacctttttttacaacatattaaagagtataacaatgatccaaaagaagcatttaatgcagagggaatagaaaaacttaacacgaaagcgattgaaaatccaaagattggaaaagaaatcaaatcagttacccgattagacggtacagtagatttggatgatatgtttaatggcgggttttacgaaaccgacaaaggagctatggcatacttcgttatctatgaaaaccaacaaaccaaagtacgtgatggttttgaatcaatcgcaactcacaaagccattgagaagattgtaaatggagattctattgcaaaggatagagaaggttatgataaaattatactttctccgggtgatttggtttatgtaccaacagcggaagaaagaaaaaaggttgagcaaggagtgagtattgagaatgtaattccttttaataacaatgcaattttgtcaaaacgggtatacaagattgttagtttctcaaagaaagatctgctttgcataaaagccaatatttcagattatataatcccgtatgataggaaagctaaaagtaaaggagaaattggctgggacaataaatctggaaacacattagatgatgatacagctattaaagatgtttgcatcaaactcaaagtagatcgtttaggcaatatctcaaaagcataatcataatgatcaaacgcacactctacttcggcaatcctgcctatctgaaaaccgctaatgaacaattagtgattgaggtgcaaagtacgggcgaaacaaaatcggagcctattgaagatatcgggcttttgattttggatcatcagcaaattactattactcaggctctgattgctaaattattggccaacaacgtggcattaatcacttgcaattttacccatcatccaacagggttattattgaacttggatggcaatactttacaaagccagaagttccaagctcaagtagatgcttctataccactgaaaaaacagttgtggcaacaaaccgttatggctaaattggaaaatcaggcagcctttttacaaaaggaaaagattgataatagaaccatcctgaaatatgccaaagaagtaaaaagcggcgacagcgataactgtgaagcaaaagcggctgtctattactggaaaaatattttccctgaatttttagaattcaaaagagaacgggacggcgctccgcccaataatttgctgaattacggttatgccattttgcgtgccactgtagcgcgtagtttggtagcttccggattattgcccacactaggtatccatcatcgtaatcagtataatgcctattgcctttccgatgatatcatggagccttaccggcctttcgtggataaagtagtgtgcgccatcgtcaaaatgaatggcaggtttttggatatgacacccaacatgaaaaaacaattgcttggcattccggcgatggatgtggttatagacggacagaaaagtccgctgatgaacgcggtacaacgcaccacggcatctttagtgaaatgctatgaaggagaaaacagaaagattttatacccagtattcctggagtgaataacggaattattaatcaatgccgtttagatgagagatttagcgacccttcgacttcgctcagggtgacgaaaacagggtcatggtgagcgaagtcgaaccatggcaattccatttcaaccctaactaaatgacattgaattatcaattatccatttatcatgtcttttgatcgtttaaatgcttatcgaatcatgtggatcatggtattttttgacttaccgaccgaaaccaaaaaggaccggaaaaattatgccgtattcaggaaaagaattatgtcggacgggtttcagatgtttcaattcagcatgtatatccggcattgcagcagccgggaaaatatggaagtccatatccagcgtgtgaagaaaattcttcctccaaaagggcatatcggcattatgtcggttacagataagcaa

SEQ ID NO: 4417 - DNA, 7935 bp, synthetic construct
  misc_feature 1..7935: note = Synthetic
  source 1..7935: mol_type = other DNA
tagatgaagtattgtttttggtttttgattttttaataaaaattttgtaatgcctcttgtaatgatattttgctctttactcacttttaagaacgttattgtgaaaatttactttttttaataatgaaattatattgaaaatgaaatttaagggtggaagaaataaataatttttataggatatttttcaaacaggtaattataaaagtaaaaccctcgctgttaagtacaacgagggcggaaacttattgagcgaagctcactacagaatcatccttattgtgatttgcttcgtatcaaatatcaggaaatttttttaaaaaaacaaatagagggaaaaatgaaaaagattttagggctcgatttaggaacaaattccatcggagcagcaatattaagttttccagaaaaatttgaagattacggtaaagaaggtaaaatagaatggttaacaagtcgaattgttccgtttgatgaagattattcaaaagcgtttttagaaggtaaaaatggttctcctaaagtaaaaacacctgctgctaatcgtagacagttgcgaggaagccgcaggttaaaatatcgttacaaattaagaagaacaaaactcattaagctatttaaactgcttggttggctgcccgaagatttccctttagataatcctaaaagaattaaagatattatcgctgaatatggaaaattcaattttcgtataagtgattatgtgccagtttcagatgaaagttatcgtgagttctacaaatattttggttattcggaagaacaactaaatgaaattatagaagaaataaagtttcgcagaatccataatggtaataaaagaaacgaagaaataaaactgcttcctgaagactggattgtttactaccttagaaaaaaaggattaacccaaaaattaaccacagaagaacttataagaattttgtatttattcaatcaacgacgcggtttccaaagcaatagattagatttaaaagaaaacgaaacaaccatagtaaactatgaagaattcaaagaaaaattcaaagaacttagaagaaatgaaaatggaaagatgatagctaaggtgaaagaaaaatacaagaaccaaaactttgaaacgaaatttgtctctataacccgagtaataaatatcgaggaattaactgaagagggggaaaaagcggaaaagaaatttagaatttacttagaagacaatagaattgaagcatatgaaattgaacgaaaagaaaaaccagattggctaaataaagaatatacttttgtagttactcagaaaatagaaaaaaataaattcaaacaaaacattcccaaaacaccagaagaaaatgaatggatatactgcactacagccttagatgaaaagatggggaataaatatcctggagaatatttttttgatgaactagttaatgcacatatagaaaaaagagaatataagattagacaatatcctgtttatcgtcatagataccagaaagaattggaaacaatatggaaaaaacaatgtgaacttaatcctgaattagcacagttaaatattaatcaagatattcttaaaaaattagcagaagttttttatccctctcaatcaaagttcaacggaccaaaaataaaagagttcttgaataatgatttattgcatgtcataagtaatgacattatttattatcaaagagatttaaagtcgcagaaaaattcaattggagaatgtagatacgaaaaaagaaaaggtatcgatggtgaaacttatggactaaaatgcattcctaaatcttcaccattgtttcaagaattcagaatctggcaggatatacataatattcgtttaattagaaaagaacatattaaccctgatgggaaaaaaatattagacatcgaagaaacaagtttatatatcaatgatgaactgaaagaaaaattatttgatttgtttaatagcaaagaagaaattaaagaaaaagatattttattagttatcaatcaataccataaagatataaaacctattcaaattgggaaaaaagatgaagaacattctcattacattaatttatttagaactagaaaaacactcaaagggaacgaaacaaaacatcgttacaggaaaatatttaaagaactggattttaatggggattatattcttaataataacgatttattaatgaaattatggcatgctgattactcaaatagcaacactgatgaaaagaaatcatttaaaggaatactaagtgctttaggttggaaatctgaaaatgaaaaaaataagaactggaatgtttttcaattatcatttgaagatgcagaatcaattgcggaattaatagtcaaattacctgctttcaaaaaagaatatggttcttattctgcattagctattcgtaagatgttaatctttatgcgtacaggagaatactggaagcatcctcaggatattattaatcagatacaaaatgaaattaaaaatgggactgttaataaagatacaaaagaaaaagaaaaatttttacagtcccttgagaatgctttagataaagcagataaaacatatgaaagactaaagtcaattaattttgatgaaagaaaaattcaagatgtagacgatgatgaaattcccaaacaactactaaaaagttttattaaaaaaagaagctatgaagaatttattaagggattaaatacatatcaggcaggatatttgttgtatggaaaacattctgagcaagaaattattcaagtaaactcaccagaagaatattctgcctacattcaaaaaacactaaaaccaggaagtttaagaaatcctatagttgaattagtagttcgtgagacttgtgcattagttaaagatgtctggaaaaaatttggtcaaatagatgaaattcatatcgaattagcaagagaattaaaacacaataaagaagaaagggctcgtatcagcgaaatacaaaatgaaaatttagaagaaaaacaaagaataaaagaaatactctatgaactattaaattatgagtcttttgagcactatgatgaaaatggaagtagaataatttctggattcacaataaaaccaaacccagaaaatttagaggatataaaacgattccgattatggaaagaacaagcatctttatcagataaagagtgggacaaaaaaattaaagaagaaaaaattcccacacaagaacaaattaaaaaatatatactttggcttggtcaaaattgtcgttctccttacacagggaaaataattcctatcagtaagctttttgatggcaatgaatacgaggtagaccatataattccacgttcaaaaatgaaaaatgatgcaatgaataatttagttatcgtagaaagcagagttaataaagcaaaaggtaatgagctcgctgcaaattttattgctaatagaaatgggtactgtgaatatgaaggtaaaaagattgacttattaaaatatgaagattataaaaaattagttgatgatatatttagaaataatagagcaaaaagaaaaaatcttttagctacagaagttcctgatgattttattgaaagacaaattaacgatactcgttatattagcaaaaaattaggtgaggttcttcgacctgttttaaaagatccgtatgcagtaatttttacaatagggtcaataacttctgaactaagaaacaactggagtttaaatgaaatatggaaagatttattaaaacctcgttttgaaagattagaaaaaattcttgacaaacaattaataataaaagaaactaattctaataaattttactttgacttgagttttaatgaaaaattagaaaaagatggaattaaaagattagaccatagacatcatgctcttgatgctattgtaatagctgctacaacccgtgaacacattcgatatttaaatacattaaatgctgccgattcagatgaagaaattaaaaaatatcatttaactctttgtaaagggaaaataagagatttcaaattaccatgggaaaactttgtgaaagatgtaaaagatgctttacaatcatgtatcatctcttataaagaaagcaaaccaattgttactaaaccatataataagtatgaaaaatgggttattgaaaacgggaaagctataaagaaaatttttaaacaagaaatagacggcggcggtaaatggatggccgtaagaagaagtatgtttaaacaaccattaggaattatttggttgaaacaaataaaagcggtcgaaataaaagatgcactgaaaattcaagcgcaatggaatgaaataaaaaatgaccctcaattaaaaaagaataaaccttatgtttatgatgattatgctcaaaaatatttagatgctgttgtagaacaacttaacctctcaccaaaaaattttactaaaaagaaaaacgaaattgataaatggattgaaagcatttccgaaaaagttaatactggtataactgataagaatggaaaaaccaaaacaaaaacattatataatctcgatggtaaaatttatgaaaaaatagaaattgccgaatttgtacagtataaaacaaagagaatgaaaatatcaccagaaaacttgaaaagttatagtattgaaaaaatgataaaaaatattccttattttgaatttattagtgaagaacagttcaatgaatttaatgaagagcaacaagaaataattaaaaatgcgggtattaatataggcaataaaaaaatgagtccaattaactttgtattactattacatattgttaaatatcgtaataaccccaaagaagcatttaataatgaaggtattgaaaatcttaatgaacttgcaattcaaaaaattgggaaatccataaaatgtattacgagattagatggtgaagtaaataatcaagaaatttttagaaatgctatttatgagactgataaaggagctaatatttattttattatgtatgaaaatattaaatcaaaacaacgagaatacttatccccttcgccttctatttctgttctaaaagcaatagaaaagaaaaataagatgaaagatatagcccctgaaaaagaaggatttaaaagaattgttttatctccaggtgatttggtttatgtcccaacaatagatgagatagaagagattaagaagaataatacttcaatagaagacttgttaaaaaataaggcaatgaaagatatcaatgaaagaatttatcaagttagaaaatttacaggggatgcgtgttattttataaagtataatatagctgaactaatactttcttattcagaagttgataataaaaaaataggtgaactgggtagtcagaatttgagtgaatatactatggacgatgatgaaattcctataaagaagcattgtataaaaattaaaattaatcgtctgggtgaaatacaaataatatattaagtgtaaattatgattaagcgtacattatattttagcaatcctgcttatctttccaaaaaaaacgaacaaatgataattaagtcatttgagtcagagcaagagagcgtaaaaattagcgagcaaatacaaaaaaaagaaataaatgttacggagggaaaagaagattggcttgaaaaaagaaaaagtttagtaagagaaacttttaactccattcctatagaagatattggcattgtagtaatggataatcatcaaataactataacacacggactgcttgattctcttttagaaaataattctgcagttataacatgcaacaaatcacatatgcccagtggtttatttatgccattggctacaaatgacgaacaatcacaaaaattcagagcacaaattgaagcatcggaaccattgaaaaagcagttatgggcacaaactgtatcggctaaaataaaaaatcaagcatgtatattgaaagcaagaggggttaatatcaacaatatgattacatggtctaaaaaagtacgctcgggcgaccctgataatttcgaaggcagtgccgcagcatattactggaaaaatttttttcctatgattccaaactttatcagagataggcaaggagaacctcctaataatctttttaattatggctacgcaattcttcgagcaattatagcaagagctcttgtaggttcaggtttattacccacattaggaattcatcactcaaataaatataatgcttactgtcttgccgacgatattatggaaccgtataggccatttgttgaccaagttgtatactctatagtaagtaatggagaagatttttatgaacttaatacatctattaaaaaacagcttttggaaattgccaccttagatgttttaattgaagggaaaagaagtcctttaatggtagcatcacaaagaacaagcgcatcattagccaaatgttttgaaggtgaagcaagaaaaattatttatcctgaagtagtttctttaaaataggaattgaaatgaactattaaattttattaatcgaatcagtttacaataaaatataaaataaacttatgagatttagtgagtatagaataatgtggattttagtcttttttgatttacctacagaaaccgctaaagatagaaaaatttatgcaaaatttaggaaggaattgatgaaagatggttttactatgtttcaattttcaatttatattcgtcattgtccaagcagagaaaatatgaatgttcatgttcaaaggattaaacgaatattaccagaaaaaggccatgttggaatattaaaaataacagacaaacaatttagtatgatggaaatattttatggaaggaagagagaaagcggttttgtagaaccacatcaattagaattgttctaattatccctctctaaatttaagagagggataattgtagaattaaaaccaagcccaaattttttaatcctaaaattcaagtaagttattgaagtttaataacttacatttagctaccttggttttaatatatcaaagaataaatttgaaagcaaatcacaacattgctgcaaggtttcaaatctagggtcaacttggttttaatatatcaaagaataaatttgaaagcaaatcacaacacgagatgaatactgaagtgattcctctatcttggttttaatatatcaaagaataaatttgaaagcaaatcacaacttattttgtagaattactttagaaattaacttggttttaatatatcaaagaataaatttgaaagcaaatcacaacaacttcatacgggtcgccgtttataaaaaacttggttttaatatatcaaagaataaatttgaaagcaaatcacaacgcaagtttatcatatgtattgttaacattacttggttttaatatatcaaagaataaatttgaaagcaaatcacaacctttatcaacggcatcgattttgatatcgtcttggttttaatatatcaaagaataaatttgaaagcaaatcacaacgcaaataaacttcataatcaacaaaattaacttggttttaatatatcaaagaataaatttgaaagcaaatcacaaccaatgttatgctgataggtttagctaagacttggttttaatatatcaaagaataaatttgaaagcaaatcacaactactctctctctcaaagtcaacgatgtatcttggttttaatatatcaaagaataaatttgaaagcaaatcacaactgttttgtgcttataataaatttttagttcttggttttaatatatcaaagaataaatttgaaagcaaatcacaacgactttttacgatttataatctaactttgcttggttttaatatatcaaagaataaatttgttccagaggaatcccttcgggaaaagaaaatcacaaccatcttgtctcggctatgtttcgttatgctcttggttttaatatgtcaaagaata

SEQ ID NO: 4418 - DNA, 16404 bp, synthetic construct
  misc_feature 1..16404: note = Synthetic
  source 1..16404: mol_type = other DNA
ttcaacagggctatatcattgctgtgatggacacgaggggtacaggtggaagaggtgaagaattcaaaaagctgacttataaagaacttggcaaactagaagttgaagaccatattgcaggtgccaggttcctgggatcgttaccgtttgttgatgcagatagaattggtatctggggttggagttacggtggctacatgtcctcattggcgatgttcaaaggggctgatgtttttaagacaggtattgcggtagcccctgtcactacatggaggttttatgatacaatctacaccgaacgctacttgcagcgaccgcaggacaacccaagtggttatgacaacaactctccgttgacccatgtcgagaagcttaaaggtaatttcctgctgatacatggtacaggtgacgacaatgtacatttccaaaatagtgtggctctgcaggaggccctgatcaacgcagggaagggttttagatcattttactatccggacaaggcccatggcattcgaggaacagaaacaagaaatcacttatacatgatgatgactaatttcattaaagagactctctaaaatgttttccagaagaatgctactttaaacataatccctgaattacactccgatcctcaaatgtcaaggccatgacatacccaatttgggggaagagcgttggatataggtaaattgctacctatgaaccgcatcttatacctgacatttgtgctgatacttttccagtcatgcataggcactgataccttggagattgagcctattcccgagcgtatagtgtttactgagaggcttgtatcccttgagcttggtactactttcgatttttctgtaacgcacttcgatgaattcgggaatccaacgaatgccatggtgcaatggtcctctagtaaccctgaaatactcagtgtagataatcaaggctcggctacagcagttagtcgtggtaatgtcaccattagcgctagtgtcggtgaagtagttaacacaatggattttgagataggtgacgaaacgattctggctgaaaaccgacgtaccggtaccttccagggattgaataactatactgtagaaggtagattcacactcttccaagatggagacggactcaagcttcgtttggaggataattttcaaacccagaatggtcccggactctatctctatttggctacaagtgctctgagtgtgacgggtggggccctgcttggaccccttgaaatgacttctggtcaacagttatacggtgcaccggacggtgtagcattggaagcttatgattttgtgattgtttattgccaacccttcggagtgccttttggctttggagaattcgataactgatatgaagaaactagtactacttctcattctgactgtctccattgatgcatatgctggtggtgggtggtcccagcccaaaggcaaaggttttttgaaactgagccagtcgatgatcagagcaaatagctatttttcgccttcaggtgatgtgttggatattactaccacctcactttactcctccagtgtatttatggagtatggtttgacagaccgtctaacaggaatagtctatatgcccttttttgtacggtcaactctcaataatctcgagacaccagacggcacgctgatagaagaaggggatgagcttaactctataggtgatgccgatgtgactatcaagtatggcttgatccagaatagcgcctatgtattaagtgcgagtttgacattagggctgcccctaggagaggcaagtggtggtcgcacacagctcctccagtctggggacggtgaattcaaccagatgttgacctttgaattgagccgtggtttcagttctggctggtatgcgacgttgttggcagggttcaacaatcgtacaaacaacttctcggatgagatccgctatgggggtgagattggctatgccaagggtagattcattcctatcctaaaggtttatggcgtagcacccctagtgaacggagatgatcttggtgtacctaacaatggtgtctttagcaataacattgagtatctatcgattaccccggaagtgctttacgacatcaatggcaagtttggtattacggcttctatcggcttagctgcatatggcaagcgtcttctcgctgctccaaattttattgcgggcgtttactggaatctttagcgactgtttttaacagcttctagtaggttttctaaggattcgggttgctccattatattcatgcttctggctaccatagagaagaggtactttttactggcgtgggtctttcggtaagatggtgcatgttgagatttactcagcttaagatggtcatttccggagatgagatcatgatgaagaaaattcactttttcaaaaggatccaattgtatgattctggcgaggtaggcttgcgcaaggcttgatgtccaaaggtccttcccccttaccagaagattgaccttcatattgagatcatctgtgagcgaagcgacctggtagctaggcacattatccttcttcactagcactgggaatggcataagttgatgaatgttttgctgctgggcttcttcgttctcctcggaaatgctgatcattgattgttcatcggtgaccagcctgagtgcagtttggccattgtcaaatgtcagttttcgataacggcatgttccctgataaaatcgatcaggcgagagccgttccagttctttgcgtgagcagagacaatagaatgtctctgcgttgttgcgaattaggtggacggtctcgcgatattggtcaattcgcagagtttgggaatattgagttttgaagtcacccgtaccggatggaccctcttcatattccagacccatccattcaagtgtatggaaaatatcgtctatgtattggtctcgcacccttgtctggtccagatcgtcgattctcaggagcaggcgaccatttcccatccttgtatgaagccaggtgagcgcgaaattatagaggttgcccatatggagatagccacttggtgtaggtgctaagcgagaagtgatggtctgtgaggaggccatttcctaaaaatagtactgatagcttaatattgtctgtgtatgaccgcattgatgtttgtcggtatagcccaggcgattttccttgccttattgattggcaataagtcagctaagcatagtttcgactatctgcttatgatctggctagtgcttaatgctggcaacctgcttttctactattttgtattctctggtaaggccgatgagataaccgaatggatcattccgctagggctgatgccgtatgctgctacagcggtgctctacttgtatacacgatcgcttgtctccaggagtaggttacgattagcagaagtggtgatctgctttttgccctacctcctggttaatgcctctctgtatgctgactttttaaatgtagagatcaaactatctcttcttcaaggatactttgatttccaggggccggccggtttcatcagtcgatattgggcattgatcatggcaggtgttcacgttacattcattgcattcagcctgatacttctttttagacataagagcaggatcaaggaagagtttagttatgctgagcagatcaatcttagctggttaagaaactggctgatctactctatgcttgctttcgtattttcttttggttttgtatgggtgggagtgtttggttttattaagatgatcgaggttttttatggtatatcaggctttatcacattaaacatttttgtgattggctactttggactcaagcagacgaccatttttacgaatgtacggctcgatgaaaaggaattgaacaaaccaaagtcatctgatcaaagggagaaagagatgttggaagctcaggcgaataagatagagtcctatattgatcatagccaggctcatctcaaccccaggctgaccttggaggagctttcgcagggaacagcaattcccagaaatcaattatcagcggtgatcaatcagtattttcaacagaacttctttgaatatatcaatgacaaaagggttgatgagtataagagacgtatagttgatcctactttacagcacctaacgctacttggggtggccatggattgtggctttaactctaagtctagtttcaaccacatattcaaaaagagtacagggatgacacccggagaatataaacgacttcacagccaatgacccttcttactgcattgatctcactcatcagtatttctcgctgtgcatcagagatcatctacactccgactgtcgtaaattcagcttatgagaaaagacctcctgcttcttttgtcttccatagccttttatggttttgctagtgtgtaccatataggcaaccagcatgcggtaacccaaccatcttcacaagatagtctggttatgtccagaaaagtccatcttgacggcttacgtaagttgatcgttggtaaggaagagctgccagcagaagaggtatttatcaatatccaatctttaaaagggcgcaaagcaaaaacgctgctggccatcatggagtttggctatagccgatcattgggtgtaggttgtgaacattgtcataacactagtgactggggctctgatgagaaggtccaaaagcagatcgctcgtgaaatgagtgccatgtcttgtaagatcaacagggagttacttaccgatatcgatggattggcttctgaacagccagcggtcaactgtacgacgtgtcatcgcggacaagtcaaacccgctctcaacctagggaaataggtccgaagttatccgttcggacgatagacatgacatctgggcccacatttgatgaaaacgaaactcatatgtggtcgaattacttcatatccgtattccgtcattggaagaagaatggtacgtacatcatactcaatattctgagcctgtctgcaggcgtgggattaagcttgatggccgtactcaacgccaatttcaacttgacattcaatcatttctttaaggaggctgaccacatctatcgcgtagtggccatccatgatgggttgtctgaggaagatcttattggggagataccaaagaccctcgcagatagagtgtccggccagctatctgcgattgatcatactacacaatacatcaatgggcggcatacattccgagtcggcgagcgtgtgtacgaggagacagtaggttttgtagatgatcagttcctcactgtctttcaatatcattccactatcggtagcatgaaacacagtatgcaggtgaacagcattattctcagccatgagttagcactgaaatggatgggtactcctgattgtataggtcaaatggtagagttggttggaagtgatggtagcatccaaaacataaaaatcgaaaatgtgctggacccaataccagacaatacaagttttcgattttcgtgcctaatgtcccttgatcgtcttgaaaagtccgatcagccttttgaaacattaatgacagacggggtttttctaaaaaccgggccttctgctaagagttctaatattgagcatagtctcaatgcccttttttcaaatgaatcagagcttctagccagtcattcgatcgcttcatttaaagtgatcccaatcatagactggccatatcaggagaatcgaataaagaggtcacattttatgcaaggccttcaccctgcctctgtgctgggcactttcgctacggctattagtatccttttgctctcatgtttcaactatgtaaataccagtatctcaactactcaaaaaaggctgagggaaatggcagtccgtaaagtgatgggggctcgcaatgcccaattgctatctcaatggtggtttgagaactatctgaccatactggtagcaatgttgctcggatgtcttcttgcttatatcctgaccccagcatacaatgccatgctggagctcaacatcatttctattgctttcgtaccggtgtggcaattgatgtctttgttttttagtctgtggctgacaataggactcctctgtggcttgtatccggcaatgctcttgagcgaattcaacgctcttgatgctatccggaagcgaaccaaactgaaaagtaacggagtgatagccaaagtctttattgccttacagcttgctatgacggtctataccatgtactgtctttttgtattcctagaaaacagccaatacgtaagcaaactggaccgtggatatgagattgggtgggtgatcaacatcccgctccagcatcctgggcagtttagcaagctctataatgaacttaacaattggacggctataaacaacttaagtggtactgctgatgctatcgggttcaactcagttcggacccaaatctcttaccaggaaatggagtatgatgctgtgcatgtgtctttaggtcaccagtatcctgagaccttgagcttgagacttatagatggcaccacttttggcaaaaactcatggaatagaaatgaggtcatcatcaatgaaatgctggcagaaaagcttgatcatccattgaatagcaccttaaatctttacggacagccgatgagggtcattggtattgttgaagattttgcacatcgtccgattatgctgggtaacaaactgagacccatggtacttacagcggcaacagcagaaagctatcgttacttatcattgagagtagctgacggtatagatatgatagcgttcgaccaggaagtcgaggatttgtggtatagccttttcccttaccagctataccaggggtttatgcaacaaaaagtgctgaaaccgctggacactacaaccggtataacccttactatcaatacggtcagtgcagtgctttctgtgttgatctctatgattgggctgtattcactaatgtctcttcacattcaaaagcatttgaaggaatttgggatcagaaagatcctgggtgctacggtaggtcagatcgccatcatgatcaataaagagatgttgatctattttgcttgtgctgtggtagttgggattgtagcttcagactgggtggtgaataaggtactggatatcatctactcctatcatattagcacagggatgcaccattggggtcttcccgtcattttcatgactatcatggtggcaattacgataggcaagttgatttggcgtgcagctcatatcaatcccgctcatcatctgagatatgaataatcagtaataaccctttgccattaactgatcattctcttaattgatccattgaccaaaccaatagcatcatgaaaagaatcttaattattgcgctttcgctgagctgctttagtgtgatggcacaaaaaaaatattcaaacaaacagatcaatgctctcaaaaaggaagccgcggaaaaagtagccgccaatgccaaactagcgcaggtgatggtcgacaaggtattcagctttgctgagttaggctttcaggaagtagagacctccaactaccttaccggtatcctccaagagaatggctttactatcgagcggggcatcagcggcatcccgactgcctggacagccaagtggggcagtggcaagccggtcattgcgataggtagtgatctggactgtataccaaaggcatctcaaaaaccaggagtagcttatcatgaccctattatcgagggggcccctggtcacggagaaggacacaattcgggtacgcccctcaacatagtagcggccctggcagtgaaagagatcatggagcgcgatggcctgtcgggaaccttgatgctgtggccaggtgtggcggaggaacttgttggtaccaaagcctactataccagagacggctattttgatgatgtagacatcagcatgtttacgcatgtcagcaataacctcaatgtatcgtacggacaagcgcgaggtactgggttgatctctgtcgagtataccttcgaaggagaagcggcccatgcggcaggttcgccatggcggggaagaagctcgctggacgcagtagaacttatgagcgtaggttggcaataccagcgtgagcacctcgacccattgcaacgctcacatcatgtcatcaaaaacggtggtgatcagcccaatgtggttccgtctaaggcttctatttggttttacctaagaaacgtcacatacccgaaaatcatggagatgtacgaccgtgccaacgaaatagcggatggtgcggcactgatgacccagacgaaggtgacgcgcaaggtgctgggcagtgcatggccaagacatttcaacaaagtgatcgcagcgacgatgtatcaaaacatacgcgaggtaggcctaccggaatgggatgagaatgatcagacgctcgccagagcattgcagaaagaagtaggtgcgatcaacgtggatggcttggagaccaagttggacactatcggtctgccagtaagatctttcattagtggagggtctgatgatattggtgacattagttggaagcttcctacagtgacgatgagatttccatctaacattcccggcttacagggccaccactggtctaacgctgtgtccatggctaccccgattgcgcacaaaggtgtggtggccggagcaaaggcggaggccatgaccattctggattttatcctcaagcctgagttggtagaggaagcctggacctatttccgcgaggtacagggtatggagtttgactacaagcctatgatccctgatgatgaagtaccagccatttacttaaatacagagatccagggtgagtttcgggaagagcttgagaagtactattatgatgagactaagtatgattcgtaccttgagcagttgggtattacttaccctacagtgaaagaagggaattaggaaacaagacaactttaaccctgacctaatggacccatcggcatagtgtcgatgggttttttgttcgttcggccagagatggcttgctaataagaagcttaaaaaaagtcaaggttcagagcgttgacttcctttgaatccgtatggatgctttcaccacaaacaagtgagccctaccgaagcagggctctaggatcatatccttcggcttatagccttattgtgaaaagattaggaattgcttatttcttcttggctttcttggcctcctctaccattatttctaattcagcaactccaaaaaaacgtttgtttggagctttttcgaaatcatcgatcaggctctttgtttcttccacctttgcaccagtacgctctgatctgtttttcattaggaatacctacatccaagagttctacatcaaaagtatgattttttgaaaaaatgaagatagcgtatatgaactttctcccgttgacatacccaatattcaacacttccttcatatccgaagagccaacaagtatggaccggtcagatgagaacaactctatgatatcagccatgacaataccattaagccttttttgagctattaagtctatttttcgataatcgatttgaaacttcggcattgctattcaatcattttaagaaggtcgggtgaccagcacccgaccttttcctaatcaatccacaaccacaaacaagaatcgaacagagtcaggtcaattcaaatttgcgtttataattttaaaattaacgaaataaaagactcacacaaaaagtatatttacaaatgaacattgtttgcttagcataatagtgggcactattatggaggtaccataatggataagaaatataagattaggatggtacaagtggcaaaaaacctgttcaattatctgaattacccttatacatttaaaggagtgttatttcagattattatttatgctattttagtttatgtaagagtgtcttctgttacttgagtttgtacaccggcaagttggaacagtttaaatctggttggaaagctaatccgaaaatgacatttgttatacccaaaatgattttgttgccaacaactaagacaatatgcccaaaacactaggactcgatttaggcaccaatagtattggttgggccattgtaaatacagactttcctgaaaaaattctggacaaaggtgttcacatcttctccgaaggagtgaaaatagaaaaaggtgtcgagtcgtcacgagctgcagagcgcaccgcttaccggagtgcacgtaagcttatcgcccgtcgtagacagagaaagcaacaaaccctcaaggtcctggcggaccacaatatgtgccccctcaaacctgcagaagtccggatctgggtcatggacaaaaagcagtaccctaaaaaacctgagtttatcgaatggctcaggacagatgaggccgaaggcattaacccctatgcgctgcgagataaggcaagtcgtggaaaaataggccaaatggaactaggtcgtgcactgtatcacttagcacagcggcgcggcttcaaaagcaaccgactagatcaaactgatgaggacgaattggggccggtaaaagaatctaaaaaaagactttcggagaagattagtgatgctaagtgtaacacaatgggtcaatactttcactcagtgtacctgaaaaatcaaagtggctcaattggaaataacttagaaaatataaggaaggtatggatacctgatagagaagaacattacttggcagagtttgaagtaatctgcgaagtacagaagttggacgagcgtcttcgagaccaacttcgatcagccatcttctaccagcgaccactcaagtcccaaaagcatcagattggcaggtgtactttggagccagataagctccgctgctctgtatctcatcctgactttgaggagttccgggctcgacagttcatcaacagcattaagaagcaagatgaaaacggcaagttcaaacagctcaacgaggaagaacgtgaaaacctttggccaaagtttacccgactcagcaagccgacattcgagttcaaagacctaatgaaagagatcacccccgggggacaggaagtacgattcaactataagccttatgaggtcatctccggttgtccctttcacgccttgatcgaaaatctcttcggggcggattggaaacagaccattaccgggcgctaccagcgcagcacaaagaaggatggcagcatcaagtcacctgaagagatcatccatgacatctggcatgtgctgttctctttcgatgacaaggacaaggtcaaagcctttggaagtgacaaactcgggctaggtgtgaagcagcaggataagctcgcagacttccggcccaagcgcgagtatggcaggctgagcctcaaagccattcgcaaaatacttccgcacctaaggaatggtcacatcttttcctatgctgtctttatggccaacctaccggaaggcctggaagataagcagcaacgagagataggtcagcaactgtcccatattctcgatactcatcgatcacataccaaagaagtcgagatcgtcaatcgcctgatcggtaggttcagagaggatgggcttgcgtcacatggcgcataccaactggatacccaggataaaaaggaggtagtggcagtcatccatgaggtcattggtgaagccgtccttgaaggctggccagttgaaaagcagcaggagctcatatccgatattgaagcaagtttcgaaaagcaactgcgactacagcctcaggggaagtttgtacagccacaacggctcgacgaaaggatcaagacctacctatcggaagttggtttgacggataatcaacttgacaagctctatcacccgtccatcatcgacccttttgaagctccaaaagtagaccctaaggatggcaaacgctacttagctagtccggcaatacccagtatcaaaaatcccatggcgatgcgcacgctctaccagctgcgacacttgatcaatgcgctcatcagagaaggcaagctggatgaaaactacacggtcaacattgagctgacccgacaactcaaggatgctaatgagcgggcagctatccgtcgatatcaacaagagctaaggcgagagcgtgaggcgcaccgtaatgagatcatcaaactcttcaagacggagcatggtaagaatatagagccatcggttgacgaactgttaaagtacaagctttgggaagagcaagggcatcaatgtatctacacgggacttactatcaatgtatctgactttgttggtggagttccgatctttgatatagaacacacattgcctttcagccttagccaggacaactcccaggcaaataagacgctggcacaccaagcgtataatagaaaggtaaaaggccagaagctacctgtagaatgtccgaattacaacgaggaaaagacattgagtctggagggtaaagcagtctcctgtccacctattaccagagtcttcgaaaaatggcaaaagaccttggacgagttggagaagcagtataaccggcgcaagcttcctcctcgggggcgcctggagaccaagctccaaaaggacaggcgattacaggacaagcactacttcagacttaaacgcgactactggcgggagaagatcgcccgcttcaaaatgacagaagtgaagacgggcttcaaaaacagccaactcgtggatacgggtttcatcacaagacatgcacgtgcctatctgaatatgtacttcgacaaagtgtacagtatcaaaggagatgtcacagctgcatttagggtacactggggcttgcagaaagaaggcgagcccaaggagcgtgactaccatacccaccatgctgaggatgcgatcacgctggcctgcatcactaaagacctctatgaccgcctggcaagagccacgagatacgaagaggagggcaatccgcgtgagggccggaagcacatagcggcgaccaagccctggcccacttttacagaagatgtgaaggccattagacaagaggtgcttatctcacatcatacccctgaccagacccataagcagaccaggcgaaaactccgcaagaggggcaaattggtccgcgatagcaaagggcaaaagatttacgcccggggcgatacggccaggggctcactgcacaaagacacctactacggggctataagcgatagcgagggtgaggtcaggtatgtagtacgcagggctatcgcaacattgaaacccggtgacatagccaatattgtcgatccggtgatccgtgagatcatagagaaagaagtagctgccaaaggcttcaaagaagcgattgatgcaggtttcagcatggccagcggtgtacccgttaaaaaagttcgttgctatgccaaaacagtcactgaccctatccaccttaagccacataccttcgtacgaagcgtcaaaccgcgactgccacacaaggaagagtaccatgtggtcaatgatgagaattttgcgctagcggtatacgcaggggaggatgcacgaggcaaaaagcatcggcagtatgaggtggtcaatatgatggaggcggctgagtactataaactgagcaaccaactctcacaagaccaacctctcatacctggtgctacgactgtaggcaagaagcaggaggtcatactaccctatcaatacatgatcaaaaaaggtactatggtgcttttctatcaaaatgaattggaggagttgctgcacttgtcctctcgtgaactgaaccggcggctctacaaggtgaccaagtttgacaaagagggcagggtgtttttcaggtttcatacggaagcgaggcaggcgagtaccctcaagcctgcttatgctattgatcttcaagacccaccgccactggttcgtttgccttctaagagtgtggacaagtttaaaatcgctgtagaaggtgtccattttgatctgcatattactggtcgtattaagtggcggcccatcatggatcgataattgtagccattatcaaggcataaccagctaatagatattgtttcaactaaaacagtatcgttatgcttaagcgtacactttttttctccaaagcttatgagctcagcagtaagcaggagcaactcatcatcacctctccgaccggagacaagacacaggcacccatagaggacataggctttgtcgtgttagagcaccctaggatacgtgtttccagccatctggtctacaagctatcgcaaaataatgttgcgaccatcttttgtgatgacaagcacatgcctggtgctatggtactcaacctggagggcaaccagacacaaaatgagaaattcagagcccagatagctgctggcaagccccttctcaagcagctatggcagcagacagttgtcgcgaaaatcagtaaccaggccaatgtgctcaaagtgatcgacgaaggtgtggaagaggaaccatttcccatttggcaacctcttgagcaaatggccaaagatgtaaagtctgacgacagcactttccgagaggctaaagcagccaggtactactgggggcagctgtttggtgaaaacttcaggcgggagaggtttggcgatccacccaatccctttctcaactatggctatgccatcattagggctgctattgccagggcacttgtgggcagtggtctcctgcctacacttggtatccatcatcacaacaagtacaacgccttctgtctggcggatgatatcatggagccctatcgtccttatgtagacctactcacatggcagctcatccgtcactacagtgactggcacgtgctggataaggagcgaaaggcgcgctacctggagttgcttgcggcagatgtctacgtcaatgataaaaagcggccgatgatggtcgccatgagtgagacgacatcatcgctggtacagtgctttgaaggcaagcgccaaaagatcaaatacccggtactccaatgatccggtttgagcgactcaatgcctacagacttatgtggttatttgtattttttgatctgcccactgagaccaagactgaccggaagaattatgcccagtttcggaagcggctacaaaaggacggattcagtatgatgcagtacagcgtgtatgtgcgtcattgtgcaagcgccgaaagtgcggacgtacataaaaagcgcgtgcgtaagatgctaccgcccaaagggcaggtctctatgatgatgatcacggacaagcagtacggcctaatggaaaacttctgggccaagaccaggcgtgagttgcccccggcacctaatcagttggaactgttttgacaccagtaccctgttgtggggctccaaaccccgacaggattataaacaaacaataaaaatgccgctcagagtgatgttcccacctcctaagcggcattttcatcattgacattttcccctatatcgatcattatcagaaggttagcccaactgatactgtcaatactatcgattcctaatcaatccacaaccaactgcggggcctggaacgcatacgataaactgtcaatactatcgattcctaatcaatccacaactgggcccaggtaagtccaagctttggtacaactgtcaatactatcgattcctaatcaatccacaacttacggatgaaacacttaacctggataaggactgtcaatactatcgattcctaatcaatccacaacttcaaatcgtgtgttgtcgatcttgtactgactgtcaatactatcgattcctaatcaatccacaactggcagtcgaacggggatttgttttacaggactgtcaatactatcgattcctaatcaatccacaaccgatcccgtcgctagaccaaatgcagacttactgtcaatactatcgattcctaatcaatccacaactatcatcaagcggtcctttgctgttgaggtactgtcaatactatcgattcctaatcaatccacaactctactattccgcttattccactgtcataactgtcaatactatcgattcctaatcaatccacaacagcagctctagagggtatactacccttggcactgtcaatactatcgattcctaatcaatccacaacgcaagtgcttttctattactttcgttaaaaactgtcaatactatcgattcctaatcaatccacaactgagatcgacatacccctggttattgaactactgtcaatactatcgattcctaatcaatccacaacatacagttttttgttctctaatcagaactgactgtcaatactatcgattcctaatcaatccacaaccatcacccagatgtcgttttgctttttcaaactgtcaatactatcgattcctaatcaatccacaacgaaattgctattcatgaagcgggcggtacgactgtcaatactatcgattcctaatcaatccacaacgtttaagtattgttgtcattgcttttgttgactgtcaatactatcgattcc

SEQ ID NO: 4419 - DNA, 7559 bp, synthetic construct
  source 1..7559: mol_type = other DNA
  misc_feature 1..7559: note = Synthetic
cccccccccccccccagccccgcctccactaggcggtctttttttttactcccaatccttgctaatatatagaccttccgcacaacttaatgtgggaagcttttattctaaaaattcagcaatttaatctttgaaaacatataaaaaaggggacgactacaccgctataaaaccggttcgtcggagccccactcgaaaaaattcgattattatcgcttcctttccaattaaaacgcaaataatcgaaattcgataggaagaatattgtcataaatcaaaaaacgtgtcaagattcttataaattcaatttttaatatgggaataagatgaaaaaacgcatattagggttagatatcggaataggttctgttggttgggcgtttgccgaattaaatgaagtatattttgaagcggatgaacaagctgatttaggtgaaaacagactgaaaataaaaggcggaaaaatttccggcatgggagtcagaacttttcaacagccaattgacagaaacagcaaaagtttggctcttatccgtggaaatgatcgtcgtactcgatcgacattagagcgacgttcggaacgacttaaatattttgtgaaattatcaaaacggtatgtgttaatttcgaatgatttttccgcaagctcttttgagttacaaaaagattcggttgctgcagacacggacgtgtggacgttacgtaaacagggactttataggttattgacggatttcgaattttttagagtgctttaccacattgctaagcacagaggattctattttccgacgaaagcggaacgcaatcttctttcgaaggacaaaggaaaaattgatttgtcggaagataaggaggataaaatcattaaaggtgctttgaaaaaaatcatatccgacttcggcgtttctggttctatgactatcggagagtactttattaatacttatccatttccggaaaacaaatctgctgagtggaaaatgcaccggaagcataataaaaaagatgtatacgaattatccatacctagggaacttctgttggatgaaacgcagaaaatattcgagcgtcaacgccgttttggaaacacgaaagcgtcagcggaacttgaggaagagtatgttaaaaaagttttgatgtacgattatctttcagatccagagaatcaggaaagatatacaaaaaaactgcataaaatgatggggaaatgcgaattttttccaaatgaagagtgttgtccgaaggaaagtttttcttctgaaattttttcattttataatcggttgaatgctttaaagctttatgtttcatccgatgaaaagccgtacaagttttctttttgtaatcgtgcagggatgaaagcagaagatattgtgcttaaagagatcgatagaaaggacatttttgacctggttctatcaaaatctaaagtttcgtttgcagacttacgaatagcgatgaaacttgatatgaatatgcgctttaatttgtgctcttatcgtgaaaaaaatccggagtacacacgctttgtaacagtaaaaagacagaatgacgggcttgctacgattgcggatgatctggaattgtaccgaaacgatactggtgaaacggaaggagattgcaaagaagcttttttacaaaaggtacaaaagctgtttgataaatatccgaaaatgaaagaaaaaagatattcattttctgatgttcggaatatggtggggttggagcaggatttacggtttgtttttttgaaatcccactatgtgaaacaacctgctgaaatgaaaaacggtttaaaggattatttaaagcagtttgaaaaagaaaccttttttgaaatgaaaggttaccataagatcaaaacgaaattcggagaaaaatttgaagaaatcaatactcctgaaaagattgatctgatagcagaagctcttacaaaatacaaaacagatgatttgcggaaacttttcttagatggagaaggtttttctgttgaacagattaacaagattcttgaactgaatatgaatggcctttccggtttttcgtttaaagcgctaaagattttgaatccgttattggaaaaaggactgcgttttgatgaagcgaaagaagaatcgggtttgaaaaagatgcaacttaacaaacagggatatattcccgaatacaaaggattctttgaaaacaatcccactgttgcgagaatcattggtcaggtcagaaaagtagttaatgctgtgattcgaaaatatggtgtgccggatgaaatacatatcgaagttgcaacagatgttgctaactcaaagaaaaagaaagcattgatctccgatgggcagaaacgttataaggacgcgaaggaacgggcaaaagaacggtgcgaagaatttggtcttgatccgtacgatggggcaaacttactgcgttttcgtctagcggaagaacaggatttcaaatgtccgtatacaggactaggtatcgttggaattccggacgagaaaaacctgtatataaaagactgtgagatcgaccatattattccctttagcagatcctttaatgacagtctggcgaataaagttctctgtgcacctaaagcaaatcaggaaaagaaaaaccgtttgcctttcgagtggttgaatggggcaggtaattctgaagaatggcaaatcttcaaagccaggcttaagacgatgcgcttttcgtatcagaaacggaaaaatttgctgtgtgaacattttgacgaaaaagataaagagggctatatcacccgaaatctgaacgatacgcgttacgcgtgtcggcatattgcagaatatctgcgcgataattttgatttttcgctttctgaacgaaaggacattaaagatactcaccgtgtccgtgttctgggaggagggattaccgcatcgcttaggcatatgtgggggttagataagattcgtggtgaaaatagtcgtcatcatgcattagatgctgctgtaatagcttgcacaacgtttggccatgtgtactacatttgcaatataaagaaaaagtgtgagtttgcgggaaagaatttttttaagaattccaaaattgaaatgcgtccgtgggcatcaatatcggaagatattaaaaaaggtatatctgaaatttttgtatcccgtatgtgccgtcattcagcaactggagaagggcatgatggtttagataagaaagatggcaaatatccgattaatagatccggaaacaataagggattggcaaagtctcttggcaatatgttccgttttgatgtttttaaggatgaagaaggtcgttacagtgtgatacctgtgtattccatcgacctgcatggctacaaatatcctaaaacagatgcagacggaaacgtgatgcgagatgggcagggatctgctatcagtgccacaaaggaagaaattttgagagaaaccgaaaaaaacagaaaatttgttttcagtttatataaggatgattatgtaaagatatgggtaaaaagtgaaactacgccgacagaggggtacattgttcaatacggaggggaaacttcaggacagtttgttttaaaggctgctgatgattcttatgcatatcaaacacgttcaacaactgtttcaaatggtgatcggattttattggatggtaaaatttgggaaatagcttcttttgatccggctgaaggttgtttggaaatacggcatgatcatatggtcaaaaaattgtcagcaacagctaaaataaataaaaaaggagaattgtccgccaagtttaaaaccgaacagacgaatacaaaattaagcaaggaaaagaccgtaaaatatacggaaatcgttgatcttaaaaagtatcaagttgatccgttgggaaatcggatagaagttaaatcagaaaaacgcttggctgtgaattccttaaaatccaacagacaacgccgggcagatcgctataggcttgattttcacagacaacgtttaggtaaatcctgatgtcgtggcggattgttcaaatttcttcggaatgtaaactgtccgtcaaaaacaggcagttgttgtatgaaccctctgatggcgaaaaggttactttgccgttggaggatatttctgtcgtcattttagaaaacaggcatattttgttgacttcgaccttattaagcgaattggcagaatacggcatttgtttgttttcctgcgacgggacgcacacgccgaacggtgtttacgcggcgttcgggaatcattgccggcatagtgaagtggccaatttgcaagttaacgtgtccgagcctttgaaaaaaaggctttggcagaaaatagtcaaagctaaaattcgcaatcaggcggaagttttacgccgtgtcggaaatcgtttcgcggataaactggaaaaaatcgccgcaaacattcagtcgggcgacacggaaaacggggaagctttcgcggcggcgctttattgggataacttattttccgattttaaacggcatgacggcgacacgatcaatgcggcgttgaattacggctatgcaattatccgcggaactgtggcacggtctttggtcggggcgggattgttgccgtgtttcggtctgcaccacgccaacaaactaaacgcttttaatctggccgacgatatgatcgaaccgttcagggctttcgttgactgggtggtcgtaaaagccgatttatcaaaaaacgacgaactcaaaaaggaagacaaacagcgtcttgtcgccgtattgacgcgaaactgttcctatgacggggaagaaacaacgattttaaaagcggtggaacagtcggctttttctttggtcaacgcgtttaaagatcgggaagcaaaatcgctggtcctgcccgaattttcaaaagcgccgctattcgagtaaaaaaatggcaaaattgggggaaagatatatgcgcctgttggtctttttcgatctgcccgtgaagacaaaagccgaaagacggcgagcgactcgattcagaaaagacttgttggacgacggatacatcatgttgcagctgtctgtctattcgcgaatttgcaagggtgaagacacggcggaaaagcataaaaaacggctgaaatccttagtcccggaagaaggtagcgtccgtgttttgaccgtgacggaaaaacaatacgcgtcaatggacattttgatcggcatggtaaaaaaaacggaaaaaataggggcggaacaattagttttgctgtgatttttgttttgaaaaaaatgaaaaaagcccttgtttttcaagggctttttcaaaacatattatatcgcgtttttattggaaaggaagcgataaccaagtaataatcaacccactaattcaaattattatatcgcgtttttattggaaaggaagcgataaccttgtccgggatcattcggcaaacgagctaattatatcgcgtttttattggaaaggaagcgataactgcataccgggagaagcccgaaccctgtatattatatcgcgtttttattggaaaggaagcgataaccattatttctttctattatttccgcattttattatatcgcgtttttattggaaaggaagcgataacctgccaacgttaccggagtaattgccctttattatatcgcgtttttattggaaaggaagcgataaccgttgtttctttctattgtttcagaattttattatatcgcgtttttattggaaaggaagcgataacattcacttggggctgatgattacgaaaacaattatatcgcgtttttattggaaaggaagcgataacgctctccgtcggaataaatacattcacattattatatcgcgtttttattggaaaggaagcgataaccataggccaaacattatggatccctaaaatattatatcgcgtttttattggaaaagaagtgataatttacggttttcaaaagacgtaccactttgaattatatcagataattttttggccaaacctgatatttctaaaaataacgcgttataccacgtttttatggcggggaaaatgcagagctttttattcgggtgttcttatccgattattccgatctcgatatttgctttttcgttcagggctgttataatgacgctgaatatccgcaaggatattcggggcgtcagaaaccccttattgatgtagtcgttttatgcatagcgactttaaaaatgtatgccgacttctgtcccgttgggcggatgtcggctgaatacggctatttgtgcccaataggtcgagccgataacatcaatacggtttctgaacatccgcccaccgtttaggtgggttttttgatggatatttagggatttttccgtatgaataaaaaattcataatgtctgtattttattgccttgtctgcattggtttcctgagtattttattgcggccggaacgcagggttgaagtatttttttcgccttcttttgattgtgaagtcaatattatcgatgcgattgcgaatactgaaaatacattggatattgctgttttttcgatgacaaacaaaacaattttgaacgcgttgttaaaagcgcatgaaagaggggtgctgatccggtttttaggcgacagaacgatggaattgaacaaatattcggtctttccggttttaaaaaaagcgggaatcagttttcgttttaacgacgcgtttgaattagaacacaataaatttgcgatttatgatgataatattgttttgaccggatcatataactggacgcgttcggcttctgattctaacagtgaaaattgcatatttttacataatgataaaaaagtggttcagcgttacaaagaaagatttaattatttgtggggcttgaatgatgattccgcggaaaaacttcatgcggaaataatcagtaaagataaataaaacggatatcattcaattaaaacgatacaatttactatatttttattttgtttctccttgctaaaataaggcgtaagttttatttgagaggttgaaatgtctgcgacggccgttcgttcttatacttggaaagaagaagtttttaacagtataacgcatggtataggtattttattcagcatcacatgtttaactttgctggtcactttgtcttccgtttacgggaacatgtggagcgttatttccagctgcattttcggtttcagcatgatgatgatgtatacggcgtcgacggtttaccatgcggccgcgccgtctgaaaccaaaaaagtattaaaaaaaatagatcatattgcgatttactttttaattgccgggacatacacgccgatattgctggttttaatgcgaaatcctgtcggttggacaatcttgggcgccatatggggactggcgctggtcggaacggtattaaagctggtattgacgaatattgacgggcggttttggtctgtagctctttatttgatcatggggtggctgattgtcggagcgtttcggcatgttttgaacgttttgccgcccagggcattgttgtttttatttttaggcgggattttttatacaaccggcgtctttttttatgtctggaaaagccggccgtacacgcat

SEQ ID NO: 4420 - DNA, 23096 bp, synthetic construct
  source 1..23096: mol_type = other DNA
  misc_feature 1..23096: note = Synthetic
caccggcatctgcaggcccgtacgaccaaagcggcggtagtacatgcaatggggtggcggcgccggacggccggctcaggccgcggccggggcggaacggcgcgaggcggtcaggtagttcaaataggtgatgaggcgcgagcgcagttggggacggggcacgatggcgtcgatcagtccgtgttccaggaggaactctgccgtctggaagcccgggggcaattcgctttgcgtggtgtccttgatcacgcgcggcccggcaaacccgatcatcgcgccgggttcggccaggatcagatcgcccacagtggcgaagctggccatcacgccggcggtggtggggtgggtcagaacgctgatgaacggcaggccggcgcgggcatggtaggccagcgccccgcaggtcttggccatttgcatcaggctgaagagtccctcgtacatccgggccccgccgctgctggagacgatgatcaggggcagctcacgatccgtgcaaacttcgatcaaacgggtgagtttttcgcccaccacggaacccatcgacccgcccaggaatccaaagtccatcacgcccagcccgcaaaaatgcgggccaatccggcagagacccgtgaccaccgcatctttcagtcccgtggcgcgctggtattcctccagcttggcggtgtagctggcggttcccgtgaatccgaggacgtccacgctggccaaatcggcgtccatctcctcgaatgtgcaggtctccaccagcgaatggatgcgttcccgcgcgctcatctggaaatgatgcccgcatttgggacacaccttcaggttctcatcgagttccttgtcgaagaccatggcctggcacttgggacacttggtccacaacccttccgggatgtcgcgtttgcgtcccttgctggccaacttgggcttccgcacgaaggtggtcccggggtccccattgggggaagacgcctggggaaccgcatccttgggttccggccccacgggcttgcgcgtgaaactggtcgtcgccatgggcgattttcgtttggatgttgacacaacgttgcgccgctgcaatcgggaccattctagcggattacagcccgcgtgcaaccgtccaaacacagacctctgccgccccggccctccggagcgccagggcgcaggcgctggtcgtggctccggtggtcaacacatcatccaccaggatgatgcggcgacccgacacgacggcgccgcgtcgcacgcgaaaggcctcccggacgttccgttgccgttcgtcccgactcaacacggtttgggtcgaggtgggtttgctgcgttccagccagccggattcgacgggcaaccctgtggcccgacccagccactgcgccagccgatgcgcctggttgaacccgcgttcccgctgccgcaccgggtgcaacggaaccggcacaatggcgttccaaccctctctttgcaccggaccggctgcggcccgcaccagcagtcgggccaggaatggctcgaaccacagggcttcctgatacttgtatcgatggatcacttccaggaccacgccgtcggcggcgacggccgcccgcgcatagcgaaagtggagagccagctcccgacagttggcacattcaaagggaacggtggcctctcccgggatgggcagcccacactttgcacaccagggcggccggagccaccgcacctgctgacagcagcgtcggcccacgtaaccccggccgggcccggctggctcctgccgacagacctggcaaacgggcggatacaccagacccagcagggcttcccaataccgctgccaccttctccatgtcgcccctggtttctggctccacatcggccttgcgaagcgggaacgcccggcaacggttggaacgcccggcgacggttatccagagtttcggcgcgcactgtaccgggcatccccggcaaggcaagtgggatccacgggtgcccggtcggccacttctcgacgcgggtttcgaagaacggaaaacctggggatcggttgcggccgaggatcgttgcgatgaatgggcgcgatgctgcattcgctccggtggtttcttacctgcccgcgcggattcgttggttttgagggtggactggcggaggctttccggccggtccgcggccggctgtcgaatcagcccttcgacggctcgaagcgcggggcgcgcaccgtcctggccggcgtgtggccgggaatgaagcagccgaccccttgggtgagcctgttctgccgcctcgggggtcactggccggctcccgctgggtggacttgggtccgcgctgccgggttgggcgaagctcttcggcagcggttataggctcgggggacgttgcgcgtggaaatcgccaacaggacttgtcaccgagtccgcagcgctcggccggcttcgttgacagggctttcgggtttgttagggtcaactcgtgcacgcccgaggaaaggaagggagcgcgaccgaatcctggaccggccgactgcgtcagacatggatcggggaagccgacgcgggatttcacacgcgcgcctggtgggagcggacggcgcagttctgtgtgctggtggtgcgggggtttttggagaatcgcgggccggtgcgggcggcggccttgtcgtatgccacgctgttgtcgctggtcccttttttggcggtggtgctgggcgtaaccagcagcctgctcaagggccgaagcgaggccagcattgaagccttcgtcgatcggctcgtgcatgccgtgattccgccggccccgaccacgaatctcccccccagcgcccagtacagcctgtggttttctcagttgcatgccggcttgtgggcgccgggactggtggggagtgtggagccctcggatgcgacctcccccgccgcgggagcgaccgccgtcggtgacccggtggccgtcggtggttcttcggttgccgatgcgggggcggcccggacggccgtgcccgtggcatccacgtcggaaatgcgggatctgcgccgtgcggtggcccagcgcatccgcgcgttcatccatcaaacccgcagtgccgagctgggtgtgaccgggagcattgcgctggttctcatggccatcctgctgctggcccgggtggagaacacgatgaatgacatctggggcgttccgcaggggcggccctggtttctccgggtggttctgtactggtcgttcatgaccctgggcccgctcctggtgattggagccattgctctgggctcggggccctattgggaggcgacgagtgcgtggttggcccgcatgcccctggtcgggggactggtgtttcaggcgctgccggtcttgcttctttggttggtgtttgccggattgtacaaactggtccccaacacgcgcgtggagtggtccgcggcccttctcggaggactgctggcggcggtctgttggcacctgaacaacctgctcaacgtgttgtacgtttcgcgcgtggtcaccaatttcaaaatctacggcagtctggggttggtacccgtgttcatggtgggactttatgtggcgtgggtgatcctgctgttgggcgcgcaggtggcctacacgtggcagaatcgtcaggcctatttgcagcagcaactttcccgccggatcgaccagcggggccgcgagtttctggccttccgcatgatggcttgtttggggcaggcctttcaaaacggcgagccgcctccgtcggtgagcggcctggcggcaagcctcggagttccgccgcgcctttgccgggagatcctgggacaactgcagagggccggattgttgtgggaactggccggtcccgagcccgcgtacgtgccggctcgtcccttggaaaccatcagtctgcacgatgtgctgctggccatgagaacggagaacggcagtcccatggcgcccgctttggagccggccggcggggagatctggggcgagtatcagcggattcaggccgccgaggaacaaaccgccgcagccattacgctgcgggaactggtccatcgcctgggcgcgcggcccgtgcttgcgcaggggatcgtccctccgctgaagctggctcaagaggccgggtcgggcgcaccgacacaggccggagggggcgaacagccgccgctttcggggtctggtgtccccggcggggcgaccggcgccgaaacggcccagcccgccgattccccagaccccggtccggcccgggttccgccgggctcccagggctccgcggcggcgatcccggaggacgaccgcggctttcccttatgaccattggcgtgcccaaggaaatcaagcggcaggaacaccgggtggccctgtccccgtcggcggcttatcagttgtgtcggcgcggacatcgcgtggtggtggagcgggacgccggcgtgggcgccgggtactccaacgccgaatacgagcaagccggcgccgtgctggtctccgaagcctcggccgtgtacgccgaagcccggctgctcgtcaaagtcaaggagccccagcccgaggaataccccctgttgcgtccggacctgatcctgttttgttatctgcatctggcggccgatcgcaccctcaccgaggttctcctgcgctccggggtgaccgcgatcgcctacgagacggtggagctccacggacgattgccgctgttggagccgatgagcgagatcgccggacggatgtccgtgttggtgggcgggtactacctggcccgccatcacgggggcagcggcgtcctgctcggcggtgtgcccggcgtgctgccgggtcgcgtggtggtgctcgggggcgggacggccggcgtcaacgcggcgcgcatggcgcaagggttgggggccgacgtgaccatcctcgaggtcgatttggagcggatgcgtttcctggacatcacgctgcatacggcgcacacgctttactccaacgaagcgcatttgatggacctgttgccttcagtggatctcctcatcggggccgtgctggtgccgggcgcccgggccccgcggttgatccgacgcgacatgcttcgtcgcatgcgaccggggagtgttctggtggatattgccatcgaccagggcggctgtgccgagacgtcccgtcccacgacgcacgacgaccccgtgttcgtggaggagggcgtgattcattactgtgtcaccaacatgccggccgcctacgcccgcacggccacccaggcgctcacacacgtcacgtaccgttacgtcgaagccatcgcggatttcggactgccggaggcctgtcagcgtcatcccggcctcctcaggggcatcaacatcatggccggccgggtcactcatccggccgtcgccgaagcgcatcaaatgccctaccatccaccgcccatccatgtggatcccgacccgtaccggcccgacgcgggcacttgccgaccttgaaacctgcgaggagcctccctgcgtgatttgccgccggatcttcggtggccatgcaggtccctcgagagatgcgtggtttcgatcccgggcggggatgcggaaatccagcgcgactccgagagctgggaggtgcgcttcccaggtcgcgacgttcgttctgaccccggaaaagcccggccccctttgcctgcatggccgcctcgaccgccgtggaccccgtgccggtcggtcgcaccggccgaggggctcttgcgttcccgggcccctcagacgcggagagaatcaagtgcgcgccggcttcacacgggtgcttgccgggtcccgtctcgacccggttacgccggaggcgggcgcggcgtctctgggacctgcacaggcatgaatctcgacccccgatccacaccgcagggctggatttactacgatgcccagtgtcgatggtgcacgcgatgggtccgccgcatgggtcccgtgtggatccggcgcggttttcaattcgagccgctgcagagcgcgcgagcacgggccgccctggccggaagcgcagccgccgcggatgaactgaaagtccggacgtccgacggacgcatttacggaggcgcggatgctctcgcccacctgtgtcgcgccgtctggtggctgtgggcgtgcggatggctcatgagccttcccggcattcgaagcctcgcccgttggatgtaccgccaagtggcatgccggcggccgaccggctcttgcatgcgtccgccggccctgtccggctgaggcgcctgctcagtttttctgtcgcatgcgcggaaagaaacgttcggcagtggcgcaggtgcagcggctcagttcgttcagggtgattcccttcaccgcggccacggtgcgagcggtttccaccacgaaggccggttcacaacgttgtcctcgaaagggctccggtgccaggtacggggcgtccgtttccagcatgagcgcgtccagcggagtggcggccaccgtggcccgcaagccgtcgtttttccggaaggtggtcatgcccgtgtaactcacgcgggcgccgagcgccagcagccgctccaacgcggcgaccggttcggcgaagcagtgaaacacggcccgcacctgcggcgcatactcggcatagacggccacggtccgatcgaaaatggctcgttggtgcaccacgcagcccagcccggtctcggccgccacctccagatgctgtcggaaaagccgctcctgaatgtgcaacaccggttcgcgtttggtcggatccgccggcagccggaaggcatccatgccggtttctccgagcgcgaccaccttggggtgtgttgccagttcgcgcagggcggggcgcaggtcctccggcgcctctgcggcatgattggggtgccatcccaccacggcatacaaatcgggatgacgctcggccagttcgatgcagcggcggctttccgtcaggtccgtggcaatgaccaccatgccgcgaacgccagcagcccgggcccggtccaacaccgcctccaaatctccggcaaaggccggatcggccaggtgacaatgcgtgtcataaaacaccgcctgctcgatcgcagtttccacggggtccagcatggctgttcgtgcggttccgggcaacctccgggcattcgaggtggcagcaactcccagtgaaatccgctcggccggggacaggtttggggtgccgattcgatttcggcatggcgggctgcgatgcccgaggccgccggtgattcgggcccatgggcggtgtccgggcccctgtcagggctgggccgggcgagtcggctgcctccgttgaataaaccggcccgtgcgcgcgtctggcccggcatgagaccagtcctcgtggcctgccttttgtcagcactcgcgacagtcatcccgggtccggcgcagcctgcggatgcattcgcgcaaaaccagcgtctcggacggggcgtgaatatcctgggttacgaccccatctggcgggatcgacaacaggggcgctttcaggagaagcattttcgcctcatccgggaggccggattccagtccgtgcgcatcaaccttcatcccttccgccacatggatgcgggtgcttcctgggccctccggcccgcctggtgggacaccctcgagtgggccatccgccatgcgaccgggcaggggcttcaggtgattctcgatcttcacgagttcaacgccgtgggtgaggacccggagggcacgagggaacggttcttggccttttggcggcagattgccgcccggggaacggcctggccggattccgtgatgttcgaattcctcaatgagccctgcaagaagctgacccctgcgctttggaatcagtggctgcgggacgccctggccatcgttcgaccgcagcatccgcatcggacggtcatcatcggaccggcgttttggaattcggtggatcatctgcacgagctcgatttgccggcctccgatcgccagatcatcgtcacggtgcattattacaagccgatggccttcacccatcagggcgctgcctggacgggccaacagaatcaggtcggcatcgattggaagggtacggaagaggaagtggccgccattcgacgcgacttcgacgcggtcgcggcgtgggcacgggaacaccgacggcccgttttcctgggcgagttcggcgcttacgacaaggcccccatggaggcccgcgtgcgctacctgcgaaccgtggcccgcgaggccgaagcgcgcggttggagctgggcctattggcaattcgacagcgatttcattctttgggacatgcagaaagacgactgggtccggccgattttggaggcgctgattccggaatccaacaagcgctgaataggtcgtcccgtcgagcgacacggcgcccggcgttccgatcctggcccttgggcttcatcgaccagggggcgtagactctatgggggcgcggccatgcctcggggcgtagcaaggcttggattggtcgcaccgacggcccatcagaatacccgggcaccgggccggccttcgctaaccacctggcccctcgtggcggaccggggagagggccgcgtatcttcgcaactgcttcacggccgcttcgaggtcgcggggccagggcgcctcgatgctcaccggttgacccgagaccgggtgaaggaactgcaaacgctccgcgtgcagcgccagacgcgacagcaaggggcgttcgggctccccacgtttgaaccggtatccgggcttgatccgcgacaggtacaagggctgacccccgtagagtttgtcgcccaccacgggccattgccgatgggccagatgaacgcgaatctggtgcgtccggccggtcaggggccgacattccagcagcgtgtagccacgatagcgctcccgcacccggaactcggtgacggacaacttcccccgtttccggaccaccagaatccgttgaggctctctggggtcgggagccaaccggacttccacgcggaacgtctcctcgttcacttcgccgtggatgagggctacatattgtttttccgggttgccgagctcgaactgtcgggccagttggaccagggtctcgcgggtcttggccagtagcagcactccgctggtttcgaaatccagccggtgcacgttggccaggtaggtcagcccgcgagccgtcgcccaggctttgccctgggcaatgccctcatggagcagtcgcatcagattcgggcgctgcggatcgtatcggtcgggcgagctcaacagcccggccggcttgtccaccgccagcaggtggtcatcctcgtagagcacgggaatttcccagaactcccgggtgtgcggagaagacaatttgatgggagggaacacgggttcggcgggatggtggttcaggggattcgatgaccccgggaggcgacgcagaacacggtcagggggcacaaagccccgctctggacttcttgcagacacggctggagttgccgacccgagcggtctcggggccggtgacgggagacagtcatggatgccgccgacctagtgtgtacgctcatcactctggagagcatgctggccacgggcgggctgggcaaccccacgccgattgtcttctgcttcggggtacgtgctgggaggcgctgtgtgttcgggccttacggtcatggaggcccaccttcacctgaacgagtctctggaccaggtgggtaggacgaaacggggtggggtgggaattccgtccattgggtccactctttctgtgggggtggggctgctctcactatttgcgccaggggatgaacggtagcgctggctgtcaatgagacttcgagctttcggctcggttgaagaattccagtaagctttgcctcgtcagaaaacgaacttcaaagaacacgcggctccggcccggggatcatgccccggacgcgaagccgctacctggtcccatcagaggaccacagttccgggaccaaggtcccttgctgtgaatgcaggacacttggccgctctgatacactctggtaagttttctacgcagtctgtgcaacttgtcaacaaaagaatgcaaccaccatatgctcatcccgaatgattccctggtgctcgggttggacattgggtcctcgtccgttgggtggagtttgattcaaaatcgcggtgaggccgtggagatcgttgcgagtggagtccgcgtgtttccttggacggtagatgagcaaaccctgatgtcccgtagcgtggagcggcggagggcgcgacagcgtcggcggcagctcgagcggcgggctcgccgccgtcggttggtggccagcttgctgcaacgccaggggttcctgcccccgggcccgcccgatcatcgcgatccctcgtggaaggcggtcctggcgatggatccatacgagctgcgcggccgggcgttggagacgcgcctcgagccctgggagttcggccgggtcatgtatcacctggcccaccggcgaggcttcgctggttctggtcggggcgctgacgattcggagaccggagtcatccaggaacagatcgaaaagaccgcacgggagatgcaaaaggtcaacgcccggaccctcggggagtttctcgctcagctcgatccacgtgaacgtcgccgtcggggatggcacacggctcgagaatggtaccgaaccgaatttgaggccattgtgcaagcccagcaacgaatgggtctgaacttggatcccgactgggtcaagcggcttcgtcgcgcgatcttctttcagcgccccttgcggacctcgccccgggccgtcgggcgttgcggtctcgtaccgggccggttgcgggctgcatggggccttctggaggcccaacgttttcggtacctgcaaaagctcaacgacctgagggtcttattgcccgacggccaggttcggcctctgacccctcaggaacgggagcttgttcgtggagagttggaacgatccgaacggttgaccttcgaccggctgcgcaggctgttgtcatcttgcgacccgtccgaggcgttgggcgaaccgtcaaccgggaaggcggggaattgcgatgaagatccgggggctcgctcgacctcggacttttcgcgccagaaggcggggcttgcgttcaacctggagtgtggcgggcaagattgcctccccgggaacacgaccgcagcacgaatccggagcgccatcggtcaaaagtgggaccaggcttccgaagacgtgcgtcgtgccatggtggagctgctgctcggagtgaaggaccggaagctccgggcgcgcctggctttacggcgaaaagagtgggctttgagtgatttggaagccgagcgtctggcccaggtcaatttggagccgggccgttgtcggttctcctctgctgctttgcggcggttggttccgcatttggaggcgggttgtgctctgaccgaggcgattgcacgggagtttcccgagcatgaagcccgcttccgcaccgaggccgatcccccgccggagacaccggtgaccaacccactggttcgccgtgccctggccgagacacgcagagtggtcaacgcgattgtccggacatggggcctgccgggtcggattcacatcgagctcgcgcgtgaattgcgcaaacccctgaggcggctgcgggagctccttcgaagaaatgaagaacgccagcggcaacggaaacatgcgataaagtacctgatagagaagggtatccaggatccccgccccgatcagatcgagaagttcctgctttgggtggaatgcaagcagatctgtccgtataccggccagtccatttccgacgtcgacctgtttggcccgctcccgcggttcgacgtggaacacattattccctggagccgctgtctggatgactcgtttgcgaacaagactttgtgcgaggtggatcacaatcgaaatcggaagcgcaaccggatgcctaccgaggtgtacagccaggatgagctgagccagatcctccgacgcgttcgagccttccaaggcccttacagatttgaaaagctgcggcgcttccaaatgacggaggccgatctgaccacggaaacagggtggcttttgcggggcgatcaattgcaggcgactgcgcatgccgcgcggttggccggacggctcctcgggcgttggtatccagcggaagaacggctttcgaggatccagatcacgaacggggcagtcaccagctggcttcgcgtggcctggggtctgaatcaactgctcggagtggccgacgagaagaatcgctcggatcatcggcatcacctcgtggatgccaccgtgatcgccctcacgaccgccgcgacggtgaaggccctgacggaagctgctcgtcgctctgctcgaccccggcgctttgtcgacatgcccgtgcctccggggcttgtggacagcctcaggcagcagctggagaccgtcattgtgtcgcatcgggtcgatcgccgggttcagggccccctgcatgaggaaacattttacggtcgcattcagacgccccccactggcgagtcccgaaccgtggtgcgaaagcgcatcgatgctctttcggcgaccgaggcccagcgcatcgttgatccgcgggttcgtgagctggttgcgcaggtttgcaacggccgcgcgccgaaagaggttttccgcgaccccagcctgattcccgaggtgcccttcggatcgcgcaaggtccggatccgccacgttcgcatctgggtgagcgagaacccaatctcgctgaaggatggggacccgagactcgtcctgcccgggtcgaatcaccatctcgagatcttcgattgtcgcgagggcccgcggccgggttggcgctgtgttgtggtgagtcgttgggaggccatgcggcggttgcgagccggcaagccggtggtgcgccggttcgatgagcacggttgtcctctggtctgctccctggcccggggggagacggtgaggctgaacctgcccggcgggcccgtcattgcggtggtgcaaaagctttcccaggacgattacaactttcgcttgcacaccgacggacggcgggcagcggacattcccgccagcgagagaatccgaatacgcagcagcaaggcgttgaaaaagtgcctgggttgcaaactggttgtggatgttttggggcgttgccatgtcagccgagattgaaaggatcatggatgtttccgaaggaccggcccggttgcgactggagaatcgcctgctggtgttggaagggccggagaaccgttgttggagtgcgccagtggaggaaatcgcagtggtcgtcttgagtacggaatgggtgcgattgagtgcacccgtccttactgctctggcggcgcatggcggcgtcctgatcgcgtgtgaccggcgcgggctccctgtggccacaactctgcccttgcgtgggcacacgctgttcccgcagcggctgcgcttgcaaatcgccgccgggcgaccgtgccagaaacgggcgtggaaggcgttggtgcgggccaagattcgggcgcaggcgggtgtgttgcgacgcttgcatggcgaggacggcgggttggagaccctggtggagaaggtgcggtccggggatccggagaacgtggaagcggaggctgcgcgtcggtattggccccgcgtgtttgccctacccgagtttcggcgggacccggattcggccgaggcgcccaacaacctgctcaattacgggtatgcggttttgcggggtatggtggcgcgggcactggtggcggccggcttgactcccgcgttggggttgcatcatcggcacagggaaaacgccttcgctcttgcggatgatctgatggagccttttcggccgatcgtcgatgagcaggtcgcgcgaattctacgagggacggggcgtgaggtcggcctggaccaggagatcaagcggcgccttttggagcccatggtggggcgatatttttatgagggggcctggcgcaagcttgccacgattctgcattgtttggcggcgcgcctagtggacgtctttgagggtcgggccaataaggattggccgctgcccacctcgtgggatggggtgtggcgatcggaatgatgagtttttccgcctacaagggcatgtggctgatggcgtttttcgatttgccggtcgacacgcccgaccggcggcggcagtacgcccgctttcggaaggcgttggtccaggacggtttcatgatgctgcagtactcggtgtacgcgcgctattgtccaaacgaggatttctgtcgcatacatgcccgcaaggttcaggaggcggtaccgccggatggggaagttcggttgttgcgggtcacggagcggcagtttggggggatggaagtgtactggggaaaaaagcgtgtgccggcagaggaaaagccggtccagctggagcttttttgaaagtaaaacaggcgtaaggcccgtaaccccaagaggttacgggcccactagtgtatcagagcggccagtccctgccaatcacagctcgctacctctatccctcctccgagttcgcagtgtatcagagcggccagtccctgccaatcacagccgaatcctgcctgcggtcgatttgcgtccaagtgtatcagagcggccagtccctgccaatcacagcgagagccaggaaaacatcttcgacatcgaagtgtatcagagcggccagtccctgccaatcacagcacaagaggggcggttgctcccgcaagctccagtgcaccaaagccgccagaccttaccgatcaaagcatggcaaggtcggccttgacttgaatgctccggttgccgcgtaatgcgccccctcgtatgaagatttgtgcactgggcatcccgcaactggtcgtcggacggcacaacgtgaaggacccgcgtctggacgcggccgaccgactggtcgaagccaagaagaagacctacgtccaggtggatgtggtgggagaggacgcgttgtcgacggccgacgtgttcgtggtggcgccggagcgccgccccgatctattgctgcaggacctggagttcgtcgagacgcggctgggccgaacgccttccgaagtggagcgcagcgccctgctgaagctgaaggccgccttggaacaggatcggtcggcggccgaggcggctttgtccccggacgaacgccaggccatggccgtgcatgcgggacttttgacggcgcggcccttggtggtggcgacccccgaggaattggaacgacccgagctgctggtcttgcgggcctacgcggccgccggttacatcagctttttgaccgtgggcggcaaagagaatcgcgcctggatgatccgtaaaggggccacggcttgggaagcggcaggggtcatccattccgacatccagcggggcttcatccgggccgaggtgatcagctacgacgacctgattgcgtacggcggcgagaccggggccaagcgcgccgggaaacagcggttggaaggccgggattacgtggtgcaggactacgacgtcatgcacttccgcttcaacaagtaggcgcctcgaccgccgccggaggcagggcccgagtggcagggaccgcggtgcgggggtgcggtgccacggggcatccacccccggggctccaaaggcgacgctgactccggcgagacgcgagtcagcgaagcgccagataccacgccaggatggtgagtgtggcggcgatccagccggccagcagattgagcgcgccgcttcgtgtgcgggtgaggtggggcaccaggacaccgcccaggagcagtccggcaccgaagccgccgccgtgggccagcaggtcgctctcgggcgccgcgcccagcaacacgaacaacatcagtccggcggccagtgccgcaaccgcccagcggggtcgcacgtggacgcggcgggaccaccacacccccagggcggtgagcagtcccagtgcacccaacaccatcccggaggctccgaggctccgatgtgccggtccggccaccgcgagtgcggcggcgttcccgaggatacccgcgagcagggctgccaggaatccgcaacccgagccgtaacctcccatggccagggccaacaggggaatgccgaagctcaggttcatggccaggtgcgcggcgtcggcgtgcaaccagatggcggtgagcaagcgccaccactgcccctcccataccgcggcgccgtccaggaaacctcgttctcgaagcaaggggaaccgatcggccagcaggaaaaaggcgatcgccacgagcgcccatgccacggatgcccaatcgaagatcagtccggtcccgtaaagttcccgttgccagggtcggggccggttttccgcctcgtacctggccagcacggtttgtgcggtggacagcgatgcggccggcacgcgcaaccgccagccttccggtgcgtggacgatcacgcattcgatgccctggctgagcagcaccaggctccagtccatggcctgcgccgcggaagcggccggcaattctgaccagctctcggtgccggggtcggcaggtgtatgcgtcacggcttagggctgcagatgttggaccaacgggtcaggctcgagagatttgcttgggcgctcaatgcccgccagaaacgcgccgggtcgggcgcgcaggccttccggcgacccccggggtcacagcaattcgaggagccgatgcagttcggcgtccgtgttgtagaaatggggggagacgcggatgtagcgctgtccggagcggtccgtgcgcaacgaagtgacgatcttgcgatccaagagcttttggtgaaggtctgccatctccgcgcccggtttgtggaagctgacgatggcgctggcgcgttccggtggtgcgtctgcgtgcaacaccacatagcccctggcctgcagggccggcaccagccaggcccgcttgcgcaacaattcccgcgcgatgttttccacccccacttcgagcagcagttccagggcggctttcaggccgaccagacccaggagattgtacgtgcccggctcgtaacgggccgggccggaccggaactggatctcctcctgggcgatgaaattcgggcagcgcacgttgttccagccgtaccagttggggcggagacgttcttgcaagtcccgccggacatagagcagaccggcgccgcacgggcccaacaaccatttgtgcgcgtccgcggccaggaaatctgcggcgctggcgggtgtgggaaacgcgcccagcgtctggatggcgtccaggcaaagcagaatcccgcgctgccgcaattggcggccgatggtttcgtgatcgatgcggtagccgctgacgaagtggcaggtggccagggccaccagccgcgtctgttcgtccacctggcccagcacgtccaccggtcggatcccgcccagcgaacgggtgttcagcagccggactttgacaccgcgttcagccagggccatccacgggtacacgttggaggggtaatcgtcgaagtaaacgacgatgttgtcctgtcggcgccagggccaaccggcggccaccaggctcagggcgagggaggtgggccccacgaaggccacctcgtcggccgagcaccccaataaccgtgcggccaggtgccgggtttcgctgaggatttccggatagacgatgcgctcctgatcatactcggccgcggcgcgggcatattgcgcgagggcctcggacacgcgacggggcaggggacaatcccccgcgtgggccaggaacacgcacttggccgtcaccggaaactcgtgttggcgcagctcctcgttttggaggatttcctcgattgtcatgggcgggaaagtaacggcagttctacccgagcgaaagtcggcaggccaccacggtgctgcggacgcaaggtgccgcgccggccgggtgttttgctggacccctgggctgtttcggatgctcaaggaggccggggagggcggcggcaggtacgggtcacggcgggcggctcaaagattccttccgaagtgacaacgtgcgtcggggcttccggacggctcggcctgtgtggcccggtgaccggttgcggttcgatttggtgcggagcgagcgtcggcgggttccgcggcgaccggaatcagtgcctgcgcaagatgagccggtgatccacacgccgtgtctggtgcggctccagcggtggcaggtcggtcagcgtgggagagttggtctcttggaggatgctgcgggccagggcctggagggcttcccatcgtggccagggcaaggccggggcatgggagatctggcgcagcaggctgcgccattcgatgatcatgcggtcgatgtcaccgatgcccacggattcgttgacccagccgtgtttgctctgggggtcgcggtggaccgaggcggcgatttcggccgcgccggcgccgtactttgggggcacgccgtgctcgaggtagccggggatggtttggagaccgtagcggtcgcggcagacggcggcgagtcggccgccccaacgattgtcctccccggcgaagcggtagcccgcatccaggttggccagatcgtacaccagttcctccagcggataggactcgtcttcgagggcggccgcgagggccagtccgtggccttgagaaaagaagctgaccagacgcccgcgcagggtgggtcggccgtgctcatcgatcagtcccagtcggcgccagatccagacggtggccgtggcgggggagagactcttgcaggtttggacccaggcgcagcgggcacagtcgtagggttgcacttcgcggaccaggggacgccagaggggcacgccgtgtcgatccaccggaacgcgcagcgtcagttcggcgaggctgacgattgcgaggagtcgatgttcctgctgcgcgatgcggaggagcggggtccgccgttcggccagccggccctccagtcgggggagaatctgttgctcccaaaccgcgcgggccacctggcgggcattccagccgaccagacggcggacccatttctggagcacgacccggtcgttggccagttgctccgccacggtcagcgcgcgaccgtagatccggccgtgcggggtttcctcgatggggatgagcgttccggtgccgagtttttccaacgcggcaggcacggtgagtgcggggacgagggaaagggggccgttgatggttgcggctgcggtggcgttcgggggtggcactcccgcgggcagcccgggcaacgcgggcacctgcacctggcggacgggcacttcccggggcggcggcacgggttcccattcgccggcactattgagcatttcccggatgcgccgccgcacgtgccgggctcgctcggtgtcggttttgagtccgcagggggcgtcgggatgccgcagcgcaaactccacgcccagggtgatgggttgagtggtgaacaggcgctcctgcaggcggactgcctcgggaaggggatcgcgaccggcgtcggctgcggcgctcatgacgctgagcaatgccgcccagtccaccagcccgcaccggtgaagatggaccggggcggcgtcgcgcaggcgcaattggttgctggtcaccaggatgaacccggtggtgtccagcccgcggcggccggcgcgaccgaacatctgcaggatttcgtccgggcgcagaggggtctcgacctggtcacgccgataggagtcggcggccagggccacgctgcgcagggaaaaattgatgccggcggccagacccatggtggccaccaccacgcgcagttgtccggccttggccaggggttccaccactccggcccgggcggcgtaactgaggccgctgtgatggtaggcgatccggcatttcagcaatcgcgcgaggtgttcgccgacgagctgcttttgcgtcgggctgagggtgagcgggtggggattcgggagttgccgggccagctccacggcgagggcctcggcggcctggcggcgcggggcaaagatcaggatcggtcccaaatcttcggccagggctttggccaccagacgcggccagtaacccgagatttccgacggaacgtgatagctgagctggtggggatcgacctcctcgagcgggacgggccgttcgtcgtggcggatgagcacggcccgccgtcccagccgctcaagccagcggacgacgtgatgggggttggccacactgccgctgagcaacaggagtcgcgtatgcggcggcgccatcgcaatggccagctcgtagttcagtccgcggtccggatcggccagcatttggtattcgtccaccaccagcaggtcggggccttcgccccggagcagccgggctttttgggtttccagggtggcgaccagcaccggggcggtgagattgtcggacaggtcaccagtggtgatgcccacattccagccgcgggcccgccattcggcgagtttgtcgttggccagggcgcgcgtgggcaccgtgtagatggcctgtccgcggcatcggccgtggttggcccagagctcgaagatcagtgttttgccggcgccggtcggggcctgaacgaccacatcgtggcccgcccgcaatgctgccacggcctgttgttgccacaggtccggcacgaccatggcattccaacccgcgctcgcagccggccatccctgttctgccaaggactgcacggcttcaagatacggcaggcgggcacggccgcgaaccagtttttgcttcccaaactccggacgggcggcaactttaaagcttccgatgatgcagacattgacgcctctggacggcgccttgttggtggacaagccggtggggcccacgtcgcatgacgtggtggcggcggtgcgccggcgttttgacctcaagaaggtggggcactgcggcacgctggacccgaatgccacgggtctgttggtgctggtgttgggccggggcaccaagctggcggaaaaactgatgtccgacgacaaggtgtacgagggcgaaatcaagttcggagtgaccacggacagttatgacgccgacggcacggtcacggcgaccgctccggtgccgccgttgacgctggaacagctgaaccgatgggcggcggagttcgtgggggacctgatgcaggtgccgcccatggtttcggccgtcaagaagggcggcgtgccgctttacaagctggcgcgcaaagggctggaagtggagcgagaaccgcggctggtccacatctaccggtttcgcttcctggaataccgcgaacccatcgggcgtttcgagctggcctgcaccaagggcacgtatgtgcgcagcatcgcgcatgaaatcggccaaaaagccggctgcggcgcgcatctggccaccctgcggcgggtccagtccggcaactttcacgtgcgcgacgccacgccgctggaccgggtcctgcagtggtcgaaggaggaactggagcgtcacgtgatcccgctgcttcaattggcgcaggcggcggggctgtttccgcccaacccggcgcaggtgcggccctgagacgaactctggccggcgcggcgcgatctccatggccgagcctctcgtgatttccagccccggggcattgccgcggcgtgacgaacaaccggtctgcgtggcgctgggatttttcgatggcgtccatctgggccatcaacaggtcatccggcagatgctggccgaggcacgccagcacgattcgctcggcgtggtgatcaccttcgaccaacatcccaacaccgtcgtggccccgcaacgggttcccccgttgctccagacgctttctcagaagcttcgctcgctcggcgccctggggccggacgccatctggctgatgcgcttcgatcgggccctgagccggctgagcccggaacagttcgtgcagcagctccgggagggtctgcctcgactgcgcagcgtgtatgtgggagccaactttcgattcggccaccggcgggccggcgatgtcgcgctcttgcaggcgctggggcaacgattcggatttgccgtgcatggtttgtccgtgctggccctggacggcagcgtcatcagcagcacccggattcgccaggccatcgccacaggccggctggaggccgcggcgcaaatgctgggccgaccctacgcgctggcgggccgggttgtccggggcgacgggttgggtcgtcaactcgggttccccacggccaacctggacaccacgggcctggtgttgcccccgcggggtgtgtatgccgcgcgttgcgaagtggatcagcaagcgtatcgggccgtgctgaacattgggacgcgccccaccatcacacctcatgcacagacctggcgcgtggaagttcacctgctcgatttcaccggagaactgtacgatcgcgaaatcgaggtggtggtgctcgacaaactgcgcgaggagcagcggttcccgtccctggaagcccttcgccagcagatcgaagccgacgtggcccgggtgcgggcggatcggtaggacggcaacgcagcgtgcaagggcgcaatcagcggctgggagagatgcgagagcgcacgccgcgcggaccggcccttgcccacttttcgcgagcggcttcgaaaagcattcccgggaatccgtccccccgtcaccctggccacgtcgctggcccggatccccgcaggggaacaccggatgcctcgagcgccgtcccccacgacctcagaagcagaccaagggtgggttttgaggaagccgcaccaccaccgtgcccgccagcttgtcgtgccacgcctgtcgatctttgtcccatgcaatccagaggaagcccagaaacaccaccagcatcgacacaatggcgcccagtgcgcgcacgagggccacttggaactgcaacggctgcccatccagccggacgactttgagcttgagaatcacgccccccagcgtggtgccccgccatgtccacaatcccacaaaataggccagcgcgaccagccaaccccacggcggccctcccaccagcgccatcaacagggagaccaccaccagatcgagcagccccgcggccatgcgctcccaaaacccggcgcgcggaaacgcccacgcctccggaaccggcggcgcggtcgtcacaggcgggggcatggacagcgaagagacgacgttctccccgggagggaggccggggttgcccagggacactgtcagtggcgacgccgacgcggcaccacttgcggacc

SEQ ID NO: 4421 - DNA, 14612 bp, synthetic construct
  misc_feature 1..14612: note = Synthetic
  source 1..14612: mol_type = other DNA
cccgatttgtcggtgccgatggttactcgggtgcctcctgctgttggccggaccggccacggcggaggtcgtcccgatctctaccggcggccgcaacgtcgtgcggcttacggtggccaaggacctcatcgtgggatccacctacgatcagcgagtgtgcgcgtggacgctcgacggccgactcgtatgggaaacccccaccactgggtttgtgttcgaccttgcatccggggacctcaacggcgatagccgggccgagattgtgggcgcggccgctgatgggcgcgtctacgcttggagtcactgtggtcagcttttgtggagccaagatctcactgcgccagtttatcaagccgccgtggcgcgactggatggagcccacccctgcgtgctcgcaagtgggatcaatcggcagctggtcgcgctgactccacgcggcgaactcattgctgaggccacgttgaacggcgcaggccgcatgatgcgcgccggcgacctcgatggcgatggcgccgatgaagtcgtggtcctgcccattcgtggccaggccaaagacctggtgctgttcaagggaacgaacctggctcgagtgaagggcatggcgattcccagtggggagattccatggaagccgcaagagcgattcgagatggcgcgcgcacgcgcggcggtggaactccgcgaaggctgggacggtcagtcgctgaaaaaagctaatggcgtggtggcagatctcgacggagatggctgcgccgaactcgtctacccgccgggcgtgtacacgcttcgaggtggcgttcgccaagttttcgcgctgccaggaccactccggcaaaacagttacgacgcttactacaacatgcgcttgctggccgtcggcaatctcacggacgaacccggcgcagaaatcgtaatcgtcgaaggcccgcaactctgcctatactcctcgtcgggacgtgaattagggcgcgcgacggctccttggggcttcacagacgtggccgttctgcctggcgctcctttgggcagcgccctgctcgcctccgcgccgggcggcgacgatcacctgtatcggctgacgttcacccctggttgggaacgagcgttctccagcctccgtgcgcaaggacggcgttcggcgatttcctccaacatccaggcgatcgcgcaacgcgccgcttcatggcatggcacgccgatgcccggtgccgacggcccgtacgacgtcgtggtccaccactacctttggagtggcgcaacgttggctcgattcgaccagtgggtgtcagaagttcgcgcgtacgagcaggaattcccatacccctgtctgcgcttctccacgtgcatctggcccggcgagaaggcgccattgaagcgtccggacggccagccctggccgcgcgaccaccgcttggcgcacgacgtgccgcgcgatctgatcgtggaagcagcgcgaaaattcgagcaggccggttgtcacttctgggtgcaggtcggccacggctgttccccgcacctcgaggtggcgaccgcggccgccatgctcgacgccgcgccgcggaccttgctgggattcgtcaccgccgaagacgagcaactcgaccaaatcccgtactactacgaccaccatatccggcccatcctggaactctgcttgcgacaccacaaacggttcatctgtcggcacaaggacatctggtgggctcattggccggcggagccacggatgcggacctcgattttcgacggccggttccgctcggtgatcttgccctcggtggaagacagcaattctcgatgtgccgaggtcaacttggccgctcggatcggcctttggctcgacggccgcgtggacgattgggccagccgatgttgcgccgactggtattgcgtgtcccgagcttgggagtgggagtacgtgatgagtggccacgggccattgcggtactacgtcgcgcaggcgttgtggggtgcacgcgtgttcatgttcttgaacggtgaaaaagaccgcgacggaaagtggacccgcacgggacgcgaaggggcggccacgtttctgcatttgctcggcaagggaattattactccgccacgacgggaacaactgcgcgccatatcgcccgtggccttggtggtcgtcacaaacagcgcgcggttcgtgcagcatggcagcaacggccaccacgaggagcagtggaatacggatggcaccgaccgccaacgctgggcgttcgaccgtctggacgcctactgggccatggcgccgttgccacccaccgacgtcgccacgtacctgtggggacggactcgcagagatccccgccatttgcccgtgacggctccctatggactcgtcctgctgtgcccaggcggcgtgtcccgccccggtctatggcgtgccttgtggggaacggacggcgatcggatctggcccctccacgaggccgatgcgcctcctgccgcgagcccgccagatctcgaagaggcccgccgaaggctttgcgccgacctcgagcactggaccgcgaccttgccgttccgagtcgagggccccgtgttgcacaacgtgatcgaatgcggtcccgaggcgtacgtgacgttgatcatggattcaggttggctcgatccggcggatcgcgtcgcgacgttgtccagccccgtggcggaccggtgggtggtgcgcgaccgcctgaccggtgacttggtcggcagcctcgagcccggtggcgctccgctgcacgtccacgttcctgccgggacctttcgtttgctcgacatccagcgcgcacgttgatcccgctggcgccttcgatcctgtgcgctgcgccggcttccccgggttgcgttgcggccgtggtggacgttgtggactcggcagcgttgtgctacacctgccccgtgggtccatacaggagacctagccatgatgacccatcgagagcgagtgcttactgccttgaatcaccgtgagcccgaccgcgttcccgtggatctgggttcgaccgccgtcactggcatccatgtctcggcgctggaccgcttgcggcgcgcggtccttggagagcgcgctcgtggccgcgttcgtgtgcacgagccctatcaaatgctcggcgaagtggaccgcgacctccgcgacgcgctaggtgtggacactgtcggcgtgtttccacgctacaccatgttcgggttcgaatgccgtgactggaaaccgctgacgctcttcgatggcacggagtgcgaggtgccgggcggattcgaaatcacggtcaccccggaaggcgattggctgatctacccggaaggcgaccgctcggcaccgcccagcggccgcatgcccgccggaggatattttttcgatgccatcattcggcagcctccattggacgagtccagattgaaccctgcggacaacaccgaggagttcaaagatctcaccgaggacgatctgcagtggtacgaagcgcgcgcccaaacggcggccgccgagggccgtgcggtggtgctgagcatgcccggcaccgcgttcggcgatatcgcgttagtgccagctccgtggatgaagtatcctcgcggcatccgcgacgtggccgaatggtatgcctcgctcgtcgagcgtccggcctacgtccgcgaggtctttgaccgacaatgcgaggtcggattccgcaacctggaccggatgatccgccgactcggcgacctagtggacgtggtgctcttgactgggacggacttcggcgaacagcgcggcccgttcatctccccggagatgtaccgcgatctgttcaaaccctaccacgtcttcttcaacgagttcgttcaccagcatagccgttggaagaccatgatgcattcctgcggctcggtgtacgatttgatccccgacttcatcgaagcgggtttcgacatcctcaacccggtccaatgctcggcggccaagatggacccgcgcgtgctcaaacgggagtttggccgccagatcgtgttttggggcgggggcgtcaacacccagcaaacgcttcccttcggcacgcccgaagacgtctaccgcgaagtccgtgagcgcatcgaaatcttcagcgaaggcggcggattcgtatttgacaccgttcacaatatccaaggcaacacgcccaccgagaaccttctggccatgttccgggccatccatgacagccaaccgaagtagcccaatgagccttcttgcccgacgccgacccatcctggtggcctcgcgggtcgcagcgcggtccctacagcggactgcatgtgccgcgatccttttggccatggcgtccgtgcgcgcggccgaacgtgccaccctttccttgaacggacaatgggaaatcgccgacggtgtgcttccgaccgaattaccggaccgctatgaccgcaccgtggccgtgcctgggttggccaacctcgcgcggcctccgttcgagcacgtggaccggttcatcagtcgcgaaaacatggccaatcgggtccgcgggaaccgggtgcccgccgactggctgcgcaagtactggctcggcaaagtcgagcagccccgcaactacttctggtaccgccgcatgttcactgctccgtcgccacgggcggtggcgatcttgaagatccacaaagcccagttcggaacggatgtttggctcaacggcgtgtatctcgggcactaccctggatgtttcaccgccagttactgggacctgacgggtgccatccgctggaatgcggaaaacgaactgatcgtccgcgttggcgcgcatcccgcggtactgccggagacgtatccgaccggctcggacttcgaaaagaacaagtggacggccggcatctacgaccgcgtgtcggtgttcttctgcgacaacccggtgatcgaaaccctgcagatcgcgccgcgcgtcgccacgggcgaaatcctagtgcaaacgaccgtccgcaaccgtggccgcacgccagtttcgtcgccattgtcccacaaagtccgaggcacggatgcggcggccgaggtgcgcgtcgagctggctccgggcgaagagcaaacgtggacgctgaccttgcgcgtgccccacccccggctttggtcgccgaacgacccattcctgtacgtgctggagtcttcgacgtccggcgactccgtcgccacccgctttggcatacgagagtttcggttcgacgccgccagcaaccgcgcatacttgaatgggcaggtgatctacctgcgcgggtccaatatcacattgcaccggtttttcgaggaccccgactgcggtgacctgccttggcgcgaggaatgggtacgcaagctgctcggggaaattccgaagcgcatgaactggaactactttcggttctgcatcggcccggtcccggagcgatggttcgagatttgcgacgaagtggggctgctggtccaaaacgagttcttcgtgtggaccgggcgccccacgtggtacccaggatattcacggtcgtacgacgttcaggagatgatccgccaataccgcgactggatgcgggaccattggaaccaccccagcgtggtcgtttgggacgcaaacaacgaaacggaggatccgatcttcggggaacgcatcattcccgccgtccgagccttggacctttccaaccgtccgtgggagaacagctacaacccaccgctggcgccggacgatccggtcgaaggccatccgtacctgatgagtggatatcagcgcggggacttccggttcaacatgacgatgctcgagaccatgaacggaggccccaggccgggatcgctgccgtcgggcactcacccgcggttgatcaacgagtacggatggctatggctcaaccgcgatggcacgccgacgcttttgacgcaacgcgtgtacgatcacctgttgggcccccatgccacaccccgacagcgtctcgacttgtgggcctacctgttggccgcaaaaactgagttctggcgtgcacaccgccagtacgctggggtcattcacttcatctacctcacctgcagctacccgggcgtgtacacctcggaccatttccgtgacgtccgcacactggaattggaccccgcgttcgtggactacgtcggcgaggcgttcaagcctttgggcgtctaccttaacttcttccaacctaccttgccggccaaccgctctcgggagttcacggtcctgctgatcaacgacgaccccgttccccagcggggggagctctcggtgtcgctggagacgcgagccggtcaagtgcttacccgggctagccaaccgttcgaaatcgaaccgctgggcgcccacacaagcgtcgtgaccctggccatgcccgcgggttcgggggaatgcatcgtgaaggcggcggctcggacggagaaagggaccaccctcagccgccgatggacagttttgactccgtgagcgatccgtcaaaacgccgagatttttctctagccaaaggttcttagctgcgaaggcgtggcttgcggttcggttgcgagatggccgtcctaggcggcgtcgtgggcttcatggtcctgcgtggtttgctcgcgtgcgcgatgaaaggcttggcgaggggcccgcgggaggttaggaagctcgccggttgttcgcaggtgcggggtggccagcgggactgcggagcatgaggccccttgcggggaactgctcgtgcctgccgagcaaaggatctgcgacgccagtgcccgtcctttgggagcggcagggcggagctccgcggatccgtggcttgcgccagagcgcgtttgacgtcgccccgccgatgcgatacccttaacgcgcgtttttttgggttcgaccgggtcgaggatcccgggttcgttgtgttcagcgcagattcaagaagaaaggaaccaaccatgccagcgagtaaagcgatggcgaaatcgaaggtcaaaaagtacgtgtacacgtttggtggcggccgggctgaaggccgggccgacatgaaggagttgttgggtggcaaaggcgccaacctggctgaaatgtgccacctgaaactgccggtgccgccgggattcaccatcactacggaatgttgcacggattatttccgcctcggtggtcgcttcccgaagggcctggaggagcaggtgcgcaaggggatggcctacgtggaaaagatcatgggcagccgctttggcgatccgcagaaccccctgctggtctcctgccgctccggcgcgcgccgctcgatgccaggcatgatggaaaccgtgctgaacattggcttgtgctcggcgaccattccgggcctgatcgccaagacgaagaacgagcgcttcgtctacgatgcgtatcggcgtctgatcatgatgtacgccgacgtggtcatggaaaaagccgaaggcatcgagcccgaagaaggccgtggcatccgcaagcagctggacgacatgctcgaacaggtcaagaaacagcggggctacaagtccgacaccgatctgaccgcggatgagctgaaggccctgtgcgatgcgttcaagcagcgcgtccgcgaggtgttggggcgcgagttcccggacgatccgtggcagcagctgtggggcggcatcggcgccgtcttcaagagctggaacggcaagcgcgccgtggcgtatcggagaatcgaaggcattccagacgactggggcacggcggtgaacgtgcaggccatggtgtttgggaacatgggcgaacactctgccactggcgtggccttcacgcgcaaccctgccaccggtgagaacctgttctacggcgagtggctcgtcaacgcccagggcgaggacgtggtggcgggcatccgtacgccgaacccgctcaataaggccaccaagaacgagcagaacaagcacctgccctcgctcgaagaagccatgccccaggtgtaccgcgagctggagcgcattcggacgatcctcgagcggcactaccgcgatatgcaggacattgagttcaccattcaggaaggccgcctgttcatgctgcagtgccgcagcggaaagcgcacgggcacggcggccctgaacatggccatggacatgctcaaggagaagctgatcgacgagaagaccgcggtcatgcgcgtcgagcccgcgcacctcgatcagctgttgcatccattcgtggatccggccgcagaaaagaacgcgaaagtgatcgcgcgcggtctgcccgccggtccgggtggcgcgtgcggacagatcgtgttcaccgccgacgatgccgtgcgctggacggcggaagggcgcaaagtgatcctcgtacgcgaagaaacgaaccccgaggacatcgaaggcatgcgcgcggcgcagggaattcttaccgcccgcgggggcatgacgtcgcatgccgcgttggtcgcgcgcgggtggggcaagtgctgcgtggtgggcgccggggagatccacgtggatccagtggccaagaagatgaccgtgggcggccgcgagtaccctgaaggatctgtgatcaccctcaacggcacccgcggcctggtctacgagggcgagctgcccatggtggatccctccgagaatccgcgcttcaaggagttcatgaagctggtcgacaagttccgtgtgctcggcgtgcggaccaacgccgacacgcccgaagacgcccgagtggcacggagcttcggcgcggaaggcatcggactgttccgcaccgagcacatgttctatggcgcagggtcggacgagccgctgttcctcttgcgcaagatgattctgagccagaaacccgaggagcggagccaggcgttgcgcgatctgttcccgtacatgaagcgcgacatcaaggcgacgctcgaggcgatggaagggctaccggtcacgatccggttactcgacccacccttgcatgagttcgtgcctcagagcccggagaagcaagaggagatggcccgcgcgctgggcatttcggtcgaggaagttcgcgcccgtggcgatgcgctgcatgaaaacaaccccatgatggggcaccgtggcgtgcgtttgggcatcacgtacccagagatcaccgaaacccaggtgcgtgcgatcttcgaagcggcggcggaactcatccgcgacggccgtaaggccatgccggagatcatgatccccgtcacttgcgacgtgaacgagctgaagcaccagaaggccatcatcgcgcgcgtccacgacgaggtgtgcaaagcgatgggtctgcggcggatcccgcacttggtcggcacgatgatcgaggtcccgcgcgccgcgttgttggccgaccggatggcggaggaagcggagttctttagcttcggcaccaacgatctgacccagatggggttcggcttcagccgcgacgacatcggcgggttcctgcagtactacctggacaagaagatcctcaaggccgatccgttccagaccatcgatcaggacggcgttgggcagttgatcgaaatggcggttcagaaaggccgggccacgcgaccggacttgaaggtgggcatttgcggtgagcaaggcggcgatcctgtgtccgtggccttttgccatcgggtcggtctgaactacgtcagttgctcgccgtaccgcgtgccgatcgcgcggctggcggccgcgcaggcggcaattcagtttggcgctgtcaaggcggcaaagaagccggcgagtaagtccaagtcggcatccaaagcggcgcgaggacgttaacctagcatcgagccgagcttacgaagccgctccggagtcctccccggagcggcttctggttttgaccaacctcccgccagccggtggtggaattagacatgctcattggcttccggtgtgcctccacggcgtgtcgcccaaaaccgcatacgaagtgcaactacgcgagaagtcttgtcgcccgggaaccacgttgtcagtcggttgaaagaaaaggcgggaaaaactaagcggccccggcccaaaggcgcgaggccgcgactggtcggcttacaccgaacctagttccgggaccaaggtcccttgctgtgaatgcagagacacttggccgctctgatacactacggtaaaacttacctgcaacgtcgggctcagtcaagctgggatcgtagaaaggagtttccaatgcaggaaacatctcggtctttagtgctcggtctggatatcggatcctcgtcggttggatgggcactcgttcgatgcgatgagcaaggtcgagctcaggtggtggatggaggcgtacgggtcttcccttgggccatcgaggaagacacattaaagtcccggaacctcgagcgaagagcagcccggcagcgacgtcggcagctggaacgccgagctcgtcggcggtggaaggtcgctcgattgttgcaccggtatgggtttttgcctccttggccgtcggacgcgcgcatccacgggttccatcgggatccgcagtggggcccgctgctcgccaaagatccttacgaactacgtgccaaagcgctcgaccagcggcttgaaccctgggagttcggtcgagtgatgttccatctggcccaccgccgaggattctctggtttgtgtgcagcccgcgacgatgaggagctcacgcagatccgaaaagaaatcggtcagcttgaggaagagatgaagcagacaggggcgcgaacgctcggcgaatacctggcgcggcttgatcctcgcgagcgccgccgacgagcccgacatacatctcgggattggtaccgtgacgagtttgagatgatcgtcgaccggcagcgagagttgggcttgccactcaccgacgacatgatcaagtcgttgcgacgtgcgatattccatcagcgccccctcaaagtcgtaccatctgcgatcggaaaatgtcctctggtgaaaggacggcggcgcgcgccctgggggctattggaagcgcaagaattccgataccttcaaacgctcaacaacctgcgcgtgacccttcccaacggtgtgcaacgccctctcacaccgcaagaacgtgaacgagtcattcagcggctcgagaccgttgaagagctcacgttcaatgccctgcgtaagcttttgttcggcgatcagtgcaaacgcgtgcgctcaggccatgggagggaatttcaacgccttccttcgctgttaccactaattgcgggtcaggacacgtccgaaacagcacctcgagacagcgtgagcgtcactgcagagggcgccgaggagtggcagcctggctgggatctcgacagcgtgcgcttcaacttgcaagaaggaggacgcgactgcatcgaaggaaatgttacggctacacgtatccgcaaagcgatcgggacgaaatgggatcaagcgacgccggaagttcgccgggcgatagtcgagctactgcttggggtggaacatacgaacgtccgcaagaacgttgcgttgcggagaaccgcttggggcctcgacgaagccgaggctgaacgactcagcgaggtgaccctcgagggtggccggtgtcgcttctcgtccaccgctctgcgccgtcttttaccccacctgcgccaggggctctcactctacgaagccatccagcgcgagttccccgaacacggcgaagccgccgcgctcgaccgggtgccgccgttgggcgaagaaatcaccaatccgcttgtccgtcgggcgctctctgaaacacgcaggatcgtcaacgcaattctcaagacatacggcaaacccgaccagatccacattgagcttgcgcgcgatcttcggcgtcccttgaaggcagtgagggacatgatttggcagatgcgcgagcgtgaacgtgagcgaaaagaagccgccgaaaagttacgagagtttggaatttctgagccgacttctcgcgacatcgagaagtaccttctttggaaagaatgcaacgcccggtgcccttacacggggctgcagatcgctatggaacaattgtttggcccgcatccccgctttgacatcgaacacatcattccctggagccgatgtctggacgacagctttgccaacaaaacgctctgcgaggtcgaacacaaccgtcaacgcaagcggaatcgcatgcccaccgaggcctacgacgcggacgagctgcaggccatcctcgcacgtgtgcgtgagttcaccggtccattcgcgaagcagaagcttgatcgtttccaactgaccgtgcccccagaacttgaactggtccaccgaggcgaccaactccacgcaacggcgcacgcggcgcgcgtggccgcgcagcaactggcacggctgtatcctcaagaggagcgaacccgccgaatcttggtgagttcaggccgcgcgacggcgtggctgcgggtggcatgggaactgaaccgattgcttgggctggccgatgagaagaaccgcgccgaccaccggcaccatttgatcgacgcggtggtggtcgccctcacaacacccgcaatcgtaaaacaactcacggaagcagccaagcgttccctccgccccaggactttcgtggacatgccggttcctgagggactcgtcgattcgctgaaagagcgtttggagcaagtggtcgtttcccaccgtgtggaacgcaaagtacagggccaacttcacgaagaaactttctacggcttgattcgatcgcccgaaaccggagaagtgaaagccgtcgtgcgaaaacctatcgattcgctaagcctgaacgaggcagagaacattgtcgatcgccggatccgggaaattgtgctcgaagcgtgcgaagggaaagcgccgaaggatgtgttcaaggaccctacacggattccgatggtgcggttcgggaaccgcgaagttcgcctacgccgtgttcggatttacgtcgaaggcgatccggtcgaactgaggccaggagatccccggcgagcgttcagcggatccaaccaccacgtggaggtcttcaactgccacagaggatggcggtgcgaggtggtcagccgttgggaggccatgcggcgacttcggttgggggaacgcgtggtgcggcggcaggatgaacacggctgcccgttggtgtgttccttagctcgaggcgatctcgtgagactcaactggaaaggcacgacgctcatcgccgttgttcaaaaattctcggaacgggactacgtgttccgtgctcacaacgacgggagaatggacaaggacatcaaacaagatcggatccggatcaccagcgaccgcggcttacaaaaagcgttgattcagaagttatccgtcgacgttttagggcggtaccatgtcagtcgagagtgagcgaatcgtcgatatttccgacggcccggtccggctctggattgagaaccagcagttgatgctcgaaggtccggaagatcgccggtggagcgcgcctgccaacgaggtggccgtggtcattttgggtacggaatgggttcggatcagcgctccggttctcacgaccctggccgcccatggtggagtcgtgattctgtgcgacggccgagcgatgcccatcgcgatgaccgtgcctttgcatggtcacacgttgtttccgcaacggttgcggatgcaaatcgaagcgaccgagccgcgtcgaaagcgggcgtggcaagccattgtgcaagccaagatccgtgctcaggctgcggtgttgcaacgccgacgcaaggacgatgctggactgggagccttggtggaccgagtgcggtcgggagatcccgacaacatcgaggccgaggctgcgcggcggtactggcctgcgctgcttgggtcaactttccggcgggatccaatgtccgatgatccacccaacagctttttgaactacgggtacgccgtgctccgagcgatggcggctcgtgcggtcgttgccgcggggtttacggcagcgctaggcttgcaccatcaccatcgcgagaacgtattcgccttggctgacgatctgatggaaccattccgaccgattgtggatgagcgagttgcggggctatgggatgagctggggctgacggcccggatgagccgggaggtgaaacggaagctattagaaccgatgatcggacgctattcgtacggcggcgagtggcggaagctttcggacattttacaccggatggcggcggggcttgtggacgtgtttcaagggcagttacaggattggccattgcctgcaacgtgggaggggattcgtgtagacgagccgtgacggtttcgggactcaaaggcatgtggttggtcgtgctatttgacttgccggtggacacgaaaagccggcgtcggcagtacgcgatgtttcgacgatcgcttctgaaagacgggtttatcatgctgcagtattcggtgtatgcgcgctattgtcccagcgaggaggcatgtcaagggcacgccaaagtggttcagcaggcggtacctcccgagggcgaggtgaggcttttgaggataacggactttcagtttgggaagatggaggttttttgtgggaaaaagcgcgagccgccagaacggcggcccgtacagctagaacttttctaagcgacaaggccgcgtaacccttggatattcagggggttacgggccacgtagtgtatcagagcggccaatccctgccaatcacagccgcaggattagctcgttgtcatcgctcttcagtgtatcagagcgg

SEQ ID NO: 4422 - DNA, 22866 bp, synthetic construct
  variation 12326: note = note, n is a, c, g, or t
  variation 12527: note = note, n is a, c, g, or t
  variation 12623: note = note, n is a, c, g, or t
  variation 12213: note = note, n is a, c, g, or t
  variation 11246: note = note, n is a, c, g, or t
  variation 13266: note = note, n is a, c, g, or t
  variation 10427: note = note, n is a, c, g, or t
  variation 10333: note = note, n is a, c, g, or t
  variation 11648: note = note, n is a, c, g, or t
  variation 12662: note = note, n is a, c, g, or t
  variation 10761..10766: note = note, n is a, c, g, or t
  variation 10769: note = note, n is a, c, g, or t
  variation 10527: note = note, n is a, c, g, or t
  variation 10550..10551: note = note, n is a, c, g, or t
  variation 11669: note = note, n is a, c, g, or t
  variation 12276: note = note, n is a, c, g, or t
  variation 10612: note = note, n is a, c, g, or t
  variation 11884: note = note, n is a, c, g, or t
  variation 12031: note = note, n is a, c, g, or t
  variation 10586: note = note, n is a, c, g, or t
  variation 11501: note = note, n is a, c, g, or t
  variation 12509: note = note, n is a, c, g, or t
  variation 13369: note = note, n is a, c, g, or t
  variation 10929: note = note, n is a, c, g, or t
  variation 11222: note = note, n is a, c, g, or t
  variation 11141: note = note, n is a, c, g, or t
  variation 10536..10537: note = note, n is a, c, g, or t
  variation 11405: note = note, n is a, c, g, or t
  variation 11833: note = note, n is a, c, g, or t
  variation 12581: note = note, n is a, c, g, or t
  variation 12113: note = note, n is a, c, g, or t
  variation 12146: note = note, n is a, c, g, or t
  variation 10082: note = note, n is a, c, g, or t
  variation 10743: note = note, n is a, c, g, or t
  variation 11418: note = note, n is a, c, g, or t
  variation 12247: note = note, n is a, c, g, or t
  variation 11795: note = note, n is a, c, g, or t
  variation 11056: note = note, n is a, c, g, or t
  misc_feature 1..22866: note = Synthetic
  variation 10204: note = note, n is a, c, g, or t
  variation 12217: note = note, n is a, c, g, or t
  variation 10752: note = note, n is a, c, g, or t
  variation 12266: note = note, n is a, c, g, or t
  variation 12904: note = note, n is a, c, g, or t
  variation 10439: note = note, n is a, c, g, or t
  variation 12021: note = note, n is a, c, g, or t
  variation 12511: note = note, n is a, c, g, or t
  variation 10787: note = note, n is a, c, g, or t
  variation 11179: note = note, n is a, c, g, or t
  variation 10898: note = note, n is a, c, g, or t
  variation 10754..10755: note = note, n is a, c, g, or t
  variation 12441: note = note, n is a, c, g, or t
  variation 10595: note = note, n is a, c, g, or t
  variation 10794: note = note, n is a, c, g, or t
  variation 12605: note = note, n is a, c, g, or t
  variation 11593: note = note, n is a, c, g, or t
  source 1..22866: mol_type = other DNA
  variation 10740..10741: note = note, n is a, c, g, or t
  variation 10541: note = note, n is a, c, g, or t
  variation 12659: note = note, n is a, c, g, or t
  variation 12224: note = note, n is a, c, g, or t
  variation 10890: note = note, n is a, c, g, or t
  variation 11687: note = note, n is a, c, g, or t
  variation 9960: note = note, n is a, c, g, or t
  variation 12385: note = note, n is a, c, g, or t
  variation 10784: note = note, n is a, c, g, or t
  variation 11330: note = note, n is a, c, g, or t
  variation 12341: note = note, n is a, c, g, or t
  variation 10442: note = note, n is a, c, g, or t
  variation 10939: note = note, n is a, c, g, or t
  variation 12566: note = note, n is a, c, g, or t
  variation 10758: note = note, n is a, c, g, or t
  variation 10416: note = note, n is a, c, g, or t
  variation 10782: note = note, n is a, c, g, or t
  variation 10772..10773: note = note, n is a, c, g, or t
  variation 12219: note = note, n is a, c, g, or t
  variation 11468: note = note, n is a, c, g, or t
  variation 10737: note = note, n is a, c, g, or t
cacacttcgaggaaggtcaccccatcgacctctggggcactatctacaaaggtggtttcatcgtgcctatccttcagactctcttccttactgttatcgttctttctgttgaacgttacatcgctctcaaatcagctaagggcaaaggctctatcgagaagttcgttgccggtgttaagaagtgtctcgccgctaacaacattcagggtgcaaaggatctctgcagcaagcagaagggttcagttgctgccgttgtcgctgccgctctcgtaagctatcaggaaatggacaagaacaccactctcaccaaagagcagaaggttgccaacctccagaagactgttgaagaagctaccgccctcgaaatgcccgccctccagcagaacctccccatcgtcgctaccctcaccaccctcggtactctcgtcggtcttctcggtactgtgatgggtatgatcaagtcattccaggcactcgctgcttctggcgctcctgactcaaccgaactctcaaccggtatctctgaggcacttatcaacaccgccttcggtatcgcaaccggtgcgttcgctgttatctcttacaacttctacaccaacaagattgacaatctgacctacgcaatcgacgagatcggttactctatcgtgcagacattcacagctacacactaatccctgattacagatattcaaactttccaaggttaaaattaaaaatccacaacctctaaacaatagattatcgtaatatgggaaaagtaaaaatgaagagaaagagcaccctcatcgacatgaccgcgatgagtgacgtgactgttcttttgcttactttcttcatgttgacatctaccttcctgcagaaggagccggtcaccgtgctgaccccctcctctgtttcggagcaaaaggttccgaccgccaacctcgcgtcggtacttgtaagccccgaggggaaaatctttatctccattgccggtgacgctgatgcggaaaccaaagacacatggggatcggaggctctccgcaagacgattcttgatgaagcagttcagctctacaacaagcagaacccctcgaaaccggttcagctcaatgtagcacagcgcgaagcattctctaaaatcaatatgttcggcgttcctttccaggtactcccccagttcctctccatgtcacagaccgatcaggacaagttcatcactgacatgactcagaagggtgtcgggatacctatcaacgacaacaaggatatggatcgcctcaacgagttccagatctggatgcgcgccatctacaactcaggaaacgacaaccttcagaaagccatgaaaaaaggcgaaggtatcgctgtcaaggccgacaaggacaccccctacaacactgtccatgacgtactcgacaacctccagactttgaagatgaaccgcttcagcatcatgacagctttaaaaactgagcaagaataatcattatggcacagatagaacaatcagacggcggcaaaaagaaaaaaggcgcccagaagaaaatgtcgatccatgtggacttcacccccatggtggacatgaatatgcttctgattacattcttcatgctttgtaccacaatgattaagtcgcagactctcaccatctcgctcccctcgaacgagaaggtagaccagactcagatgaacaaagcaaaggaatcagaagccatcacactgatcctgaccacagaccgcaatgccaacggcgatgtcaagaaagacgaaagcggacgtccgatgaatacggtttacttctacgaaggtatgcccgatttcgctgacgagaacggcgacggtcttcttgacaacaacaagctcaaagctgaacacttcctcggcaacgacggaaaaatccagcagggcattcgcaaaatcctccatgaccgcaacaaggccgtgcttgacaaaatcgagaaagagaaggaaacatggcgcaacaagggattctcatcaatctctgccatcaacgactcaatctatcaggcccgcgcccgtgagatccgtaacgactctaccctcacccgccctgttgtgatcatcaaggctactcctgaagcttcatgggaaagcttaatcagcgcccttgacgagatgcagatcaatcagatttcacgttatcagattgacaacatcaacaagaatgactcagtgctcatccttgactacctcgccaagaaccccaagaattaatctgttgatgactgatatatattaacccgaaaaatctctattgaaatatggcaaaagatgtagatctttcatcatcagaatggattgaccttgtatttgaaggcaagaacaaagaattcggtgcttacgagctccgaaagcagtccgccaagcgccacaaccgcgctatgattgtaatcatcatcgttctcgtcctcatcgccatcatcggtcttctcgccaacaccgtgctccagaaagctgaggcacgccccgaagaccagatcgagcaggcaatgatcgactactccgctgacgagcaggaggaggaagaacccgatgagcccgaacagcagcgcgtcgaagagcagcagcccgaagctctccccgaggagattctcaacactgtaaaagctaccgagctccagatcacccgtgacgaggaggttgttgaggaaatcaaatcgcaggacgacctcaaggaaactgacaccgccgtaggtaccactgactttgacaagggtactgacgacctcaacgtggtgcgtgaacacaaagaagaaatcatcgtcgaagaaaagaaacccgaacccgtggatgacaaccaggtatttaccgtggttgaacagaagccccagttccccggtggtgatgccgccctcctcaaatgggtaggtgagcatatccgctacccggccatggcgcaggaaaacaacattcagggtcgtgtagtcgtccagttcgttgtgaccaagaccggtaaggtcggtgaggtcaaggtgatccgctcaaaggaccccgacctcgataaggaagctgtacgcgtggtcaagtcgctccccgacttcgtccccggcaagatgaacggtcatgcggtgaacgtatggtacaccctccccgtgaccttcaagctccagggcgtctaaaccatatctgacacgatactcccctaaactactgacagtcgccgccaacccgcaagggtctggcgacgacttagttatatcctgatttgaaagagattgtgattttcattgatgtttttggcatgacagctcaaccaattggcatgatttttgttaaaatagtatagaaagtcacggacggacacacacacactgaacgagtcccgaacacacactccgttcattccggacttccttttgaaaacaatactaagaataaaactcacaacttcaacatagctcatgaacttcaataattttactatcaagtcacaggaagcgattcagaaggccatagagattacccgtggcgcgggcaatcaggctatcgagccggtgcatctgctcaaaggagttatgaccgaaggggaatcactcatcaacttcattttctccaaggtcggtgctaacgtcgccaccttgatgcgtcaggttgacaccaaaatcgcagccgaacccaaagtgtcgggcggcgaaccctatctcagtcgcagctccaacgatgttctccagaaagctctcgacatcgccaagaaacagggtgacgaatatgtcactctcgaagcattactcttagctatcttcacggtcaactctcccgcgtcgaccatccttaaagatgcaggattgagccaacgtgaactggaatcagctattgcagagcttcgcaaaggcaagaaagcaactgaccagagcgcagaggacacatatcaggcactctcgaagtatgccatcaatcttaatgaacgcgcccgcgaaggcaaacttgacccggtcatcggccgtgacgacgaaatccgccgcgtgttgcagattctctcgcgccgtaccaagaacaacccgatgcttatcggtgagccgggtacaggtaagaccgcgattgccgaaggtctcgcacagcgaatcgtccgtggcgacgtccccgaaaacctccgcacaaagcagatctactcactcgacatgggtgcgctcgtcgcaggtgcgaagtacaaaggtgaattcgaggaacgcctcaaagccatcgtcaacgaagtgaccggcgcagatggtgaaatcatccttttcattgacgaaatccacactctcgtcggtgccggaaagggagaaggagccatggacgcggccaacattctcaaaccggccctcgcgcgcggcgaactccgctcaatcggcgccaccacccttgacgaatatcagaaatatttcgaaaaggacaaggctcttgaacgccgattccagaaagtaatggtcaacgagcctgacgaggcagcagccatcgccatcctccgtggacttaaagaacgctacgagaaccaccacaaggtgcgtatccgcgacgaagcgattattgcagccgtcaccctctcggagcgctacatcaccgaccgtttcctccccgacaaggcgattgacctcgtcgacgaggcagcctcgaagctccgtctcgaaatcgactccgtgccgcaggctcttgacgaaatcacccgcctgattgcccagaaggaaatcgagcgtgaggccatcaagcgtgaaggcgacaccgagaaggtcaaggagattgaaaagtcgcttgccgacctccgcgaccaagagaaggaattcaccgccaagtggaaagctgaaaaggatctcatcaataagatacagcagaacaagatagacatcgagcaactcaacttcgacgccgagcgtgcggaacgtgaaggcgactacgcgaaggttgcggaaatccgctactcgaaagtccagcagaaggaacaggagaatgccaccattcaggagcagctcaaaatgatgcagggcgagaaggctttcatcaaagaggaagtcgactcggaagacatcgccgatgtcgtctcacgctggacaggcatccccgtcaacaagatggtccagagcgagaaggaaaaactcctccatctcgaagccgaacttcacaaccgtgtcgtcggtcagaacgatgccatcgcagctatcgctgacgcagtgcgccgctcgcgtgccggcctcaacgatccccgccgacccatcggctcgttcatcttcctcggtaccaccggtgtcggtaagaccgagcttgccaaggcactcgctgaatatctgtttgacgacgagacgatgatgacccgtatcgacatgagcgagtatcaggagaaacactccgtcagccgtcttgtcggagcgcctccgggatatgtcggctacgatgaaggtggccagctcaccgaggcagtgcgccgcaagccctattcggtcgtcctcttcgatgagattgagaaagcccatcccgatgtgttcaacatcctccttcaggtgcttgacgacggtcatctgaccgacaacaagggtcgtctggtcaacttcaagaacaccatcatcatcatgacctccaacatgggttcacacgtcatccgcgacaatttcgccaagatgacccccgagaaccgtggcgaagtcatcgagaagaccaagggcgaggtgcttgacctcctcaaacagcagattcgtcccgagttcctcaaccgtatcgacgaaatcatcatgttcaccccgctcaacgagcaggagattgaagaaatcgtcgggttgcagattaagtcgatccagcgaatgcttgccaagaacggcgttacgctcgaagtcactcccaaggctctcaaattccttgccgaggaaggctacgaccccgaattcggtgcgcgtcccgtcaagcgagtcatccaccgtatggtcctcaaccagttgtcgaaagacatcctcggtcagaaagtcgaccgcgagaaacctatcgtcatcgactacgacggctcggacatcgtcttccgcaactgacacccgacgggaccgtccacggacatcagtcaaccgacacacacatcatcctacatttttccataaactcttttattttaacgtacacacaactatgaaacgtcttatttatttgcttctggtgcttccgttgctcgggctcgtctcctcctgcgacgatgacaaggacctccctcaggtaagcctttcaattgactatacaggcgcgaccgaagaagatggtaccatctatgtggttcagggtgacaccctcaacgtcaccgcactccgcgccgtccccgccgaagggaccaaggccgcgaccctcggagtagtagcctacttctgggacggtatccctcagggccgtacagccatctcgcccttcgccatcagcatcaatactgccgacatggaacttggccagcactatctcggtgtcaacgccactgtccttcaggtcgacaaggaagtaggcttcgcagtgacgcggttcccgattgtcatcgtagccaatgattccgagcagcccggcgacggtaacggcggcaccatcacccccgatacccgcatctcggacagcagcgagatgaactgaactgattcataatatttacaaacatcctatcccctgccccgcggcttccgctgaccgataaagtcagactgaaccgcggggcagttcattattccacccgagatggatttttattttggatatatgacaatttgtttgtaactttgcacccgaaaatcaaagtggacaaatttggctgcttgcaaccacttcaaaaaaatgctaaaactgcccccaccttttcagggatgcgccgtctgaggcacgggattcccctcccccctctcctccggcaacgctctttcaggcggggtgatattaagtcagatgctctctccttcctgaacgtattgaggatttagacttttgagattcatattgtgtgccggacatccgcgaggacaacgacacctgatgaaagaaatgttgaagcaggcagcgcgcaatccacgcattttcatgccgacttcgacattttatttttttataccatatactatcagatgaaaacatatctcttcacatccgaatcagtctctgagggacaccccgacaaggtggccgaccagatctcagatgccatactcgacgaatttcttgcacgcgacccgaaatcgaaagtcgcctgcgagaccctcgtgaccaccggtcaggtagtcatcgccggcgaggtcaagagcgaggcttacatcgacctcatggaagtgacgcgcgatgtcatccgtaacatcggctacaaccgcagcgccctcaaatttgacggtgaggcgtgcggcgttttctccgccctccacgagcagagtgccgacatcaaccgaggcgtggagcgcagcgaggccgaggcacagggtgcgggcgatcagggcatgatgttcggctatgcctgcaacgagaccctcgactatatgcccctcaccatcgacctctcccaccgcctccttcaggaacttgccgacatacgccgcgaggagaaggagatgacccacgaaaagcgcggacgtgtctacacctatctgcgccccgactcaaagagtcaggtgacggtggaatatgacgagaacaaccgtcccctccgcgtcgacaccatcgtcatctctacacagcacgacgaattcatccttccgaccgacgactccgacaccgcgcgtgcggccgccgacagcgccatgcagcagcgcatcgccgacgatgtccgcaacatcctcatcccccgcgtcaaagccaaactccgtcccgaggaagcagccctcatcggcgacgacgtcaaactcctcgtcaacccgacaggaaagttcgtcatcggtggtccccacggagacaccggtctgacaggtcgtaaaatcatcgtcgacacctacggcggacacggtgcccacggcggcggtgcattctccggcaaagacccctccaaggtcgaccgctcggctgcctatgctgcccgccatatagctaagaacctcgtcgccgccggcgttgccgaccgtgtgctggttcaggtcgcctacgctatcggtgaggcgcgccccgtcagcctctgcatcaacacctacggcactgccagagtggatatgtctgacgctgaaatcgccgagaaggtcagcgcgatgccctgttttgacatgaccccctacgccatcgagaaacgtctcggactccgcaaccccatctaccgcgagaccgcaagctacggacacatgggacgcaaacccatgaccgtcaccaagaccttccactcgaaatacgaaccctccttcacccgcaccgtcgaactcttcacttgggagaaactcgacgccgtccccgccgtcaaagaagccttcggattgaaataagattgtagggacgcgccgtggcgcgtatgccggatgaactacatctgcctgaaaacacacggacaggctgttactatttcatttggcatacgcgccacggcgcgtccctacaaccatttcatacgtgcgaccgcgcgaccatacatatagaaaaaatgaagacgaccccccataggaggggccgcctactgttttcacaacggaataatccttattgtgaattgctcattttttgtatcacaaagttatgcactattatttggatatccaagaaaataacagtatttttggaaaaaatatctttccaaccactttaaggagccggcaaaaatgaaaacgatattagggcttgatttaggaccagcaagcattggctgggcatcagttttagaagatgaaatctatctgttcaattcagatattttggctgccggcgtttgccgttgccctttaaccgataatgaaagtaccgaatttgggaaaggagacaaaattacaacgaactctaaccgcactgcaaaacgtggcgcacgtcgcaataacttccgtttcaaactaagacgggaaaaactccgtcaattactcattgattatggaattatcacccacgacactatcattgccgagaatggtgcagattccacctacaatctgcttcgcctaaggtcactggcagcttccgagcgcattgagcttgctgatttcggaagggtccttatgatgcttaataaaaaacgcggctacaagagcaatcgaaagaccgaccccactgacaccggcgatgatgctatcgactcaatagatattgccttagaacttcagaagcgcaatatcactcccggtcagtatgcccttgaactgatggagcgcggagccaacagattgcctcaattctttaaatccgacctgaaaaaagagcttaagcagatttttgaaaatcagcagcaatattatcctcaactcacctcagaactccttgactctatcgatgagaagaacgaaagcaagacatggggtattatcagcaaagtgctgaatatagttggtgtcaaaagaatcatcggcagaggaagggataagaaaatagaggaactgcaatggcgtgtcgcttcactcacccggcaggttgatgcagaagtgctggctcaggtgatttctaaaatcaacggggctattaccgctgccagcggtaatctcagtgcaatgagcgagcgaagcaaaaatctttttgtaagcaaaaagaccataggggaatataaattcgatgttctttcagataatcctcactattgcttcaaggacatcactttctatcgcaaggactacgaagaggaatttgaaaagatatgggaaactcaagccagattccacaaagagcttacgccggaactcaaaaaattggtgagagataagaccatcttttaccagcgtccgctcaaatcacagaaacatacagttgccttctgcgaactcgaatcggtccaaaaaacagtggagaacgacggcaaaacgataaccgtacagagcggtccgagagtcgcgcccaaggcatctccgatattccagcaattccgcntattggaaaaactttgcaatctcaaaatcaacggcaaacctctcagcattgaaatgctcgacaaactggctgacaatcttgagttttgcgacaagatgtcagccaaagagattctgctgctnttgggtcaaaaccctaaaaccgacaagctcaattacaaagaaatcctcggcaaccgcaccgcatcgaccatcctgaatgcctgtgtggatattcttgaaatgtcgggctatgacatggaggngctgcttgaagggctcatccctgctgaaaaagcaaggaaagtagccgatatgcttgccggagagggtattgattcctcgatactctacttcgaccctaccctttcgggagatgaaattgaaagacaacncgcctaccgcctttggcacactatctattcagccgaggatgccaaaaacgagaagctgatccataccatagcatcattactgnatatcgaaccngagcaagccaanatnttcgcctacctcagatttgaacctgactacggctctctcagcagcaaagccataaagaaaatccttccattcttaaaggagggcntgccatacnncacngcttgcaanncggcaggctataaagagccggaacccatattgacngaccatctngaccctctgcctaaaanctcattgcgcagccccgtggttgaaaaaatactcaaccagatgatacgagtggtaaatgaacttatggcaatctacggtcgctttgacgaaatcagaattgagctggcacgcgaaataaaaaaancgnnanaagagcggnannagntannnnnngcnatnnataagcgancnaangacaacnatcggattgtcgagattctcaaagccgagccatttaagattaaacatccgagcgacaacgacatcctgcgttacagactctatatggaactggaanttaacggnttcaaaaccctgtattccaacacctatatcnctaaagaaanactatttagtggagacttccaaagggaacatattattcctaaggcactcgcatttgacaactctttctccaatcaaactcttgaaacaagtggagttaacgatgaaaagggtaagangactgcaattgattatgtgatttccaagggagaaataagcgtcgacgactatctgaataaaatagacacgcttgagaagaagggngccatatcccacacaaaagctaaaaatctgagatgccntgcagaagatataccctcggatttcctaaaccgcgacctcgcnctgactcagtacatcactcgtaangcccgtgaaatcctcgaacaggtgacacccaatgtcaccgtcaccataggctccataaccgcccgactcagggaggactggggncttatcgacttgatgaaggaactgaactgggacaaatatgaccgtctcggtctgactgaacaatacaaaaatagncatggcaaaaccntcaaaaaaattaaaaactggaccaagcggaatgacaaccgccaccatgcnctcgacgcaattaccattgcattcacccgacgngaattcatcaagtatctcggcaacctcaatgcacagtccgataaggacggagagatttatgcaattcgcacgaagttcctgaagaaagattncgaccataagggaaatcccaaatttaaatcaccgatgcctgaaggtaaaattagncagagagtaaaagaggtgctngaatcaatgctcatcgcngtcaaagacaaaaacaaggtagtcacatcaaattttgttaaaacaaagtctaaatcccgcaaagataagacgatagaggagaataagaaaaagaaggagataaagaantatctcaccccccgactgcagctccacgacgaaacttnttacggcagaaatctgcgctacgacacctccgaagtcaaggtcggggcaancctgaccgccgagacgataggcaaggtagcttcaaaggcgtatagagaggcactgttgcgcaggcttgaggaatttggcggagacagcaaaaaggcattcaccggcaaaaactctcttgccaaaaatcccatctatnttgacgaggntcatacatcatctgtgcctgaaaaggttaagattgtagagcttaaaccaatctacactaaacgaactgagattaataagaanctcaatatcgcaaacgtgcttgacacaggcgtnaagaaaatcttggaggagagattggagcaatatggcggagacaaggcaaaagcattttcaaatcttncggnanacccnatttacctcaaccgtgaaaaagnaatcaccatcaagaaggtnactgtaaagncatcgcgtgtctccaacccaatcgccatacacaaagcaaaggaccatttnggcaatgaattgcangccgaggacgggagtgcaatcccggtagattatgttgctcccgncggcaattatcaggcagctttctacgagacacccgaagggaaagtcgaagagatanttgtaacaaacttcgaggcagtccgtagagccattcagaatcccccgctccccatcatagatcgtgantncaactccgataagggntggaaattcctcatgtccctaaaaaagaatgaatatgtngtgttcccggcatanaaaacctcggaatccggcaaaacngaaatcaagacctttganccgaaggaaattgatcttctcaatcctgcaaactanccnctcatcagccccaatctgttcagagtacagggtctgtcaaaacgttattatgaattcagccatcatcttgaaaccaccagtaaagaaacgaaagaattacttggcatcacatacaaaaggattacctccacaaatcgattaaaggatattgtaaaggtccgtattgatgctcttggcagaatcgtcgcagtcggagaagagtaaatggctgagttatgattaagaaagtgatttatttcggnaaaccggcatatctttctctgggcaataagcagttagttgttcacagtacagataagtcaaaaccgaaggttactattcctattgaggatttgggagttgtagtgcttgacaatctacaaatcaccattactctcggagcaatggacgctctgctgcaaaataatgttgcgatcgttagctgcgattctaagcatttgcctgtcggattgcaacttccacttgaaggcaacacattacaaagtgaacgcttccaatatcagttgtccgcctctcagccattaaaaaagcaactttggcagcaaactattaaaagtaaaattttaaaccaaagttttgtcctgaaaacaatgcggggcgtacngaccggaaatatggaagcatggagcaaacaggtgaaaagtggcgattcaactaatcttgaggctcgtgcagccgtctattactgggataaccttttcgcaganattgaaaatttcaaccgttatcgctatggggatatgccaaattcccttctaaattatggctatgccatagtgagagcaatgacagcacgtgcattggttggggcgggattattgccaacattaggcatacatcaccataacagatataatgcttattgcttggcagatgacataatggagccttatcgcccttatgttgaccgtctggtagtggaaatggtgaatgaagcgtttcataacaagcagcttgagatagctatgactacagaaattaaaaggaagttgctttctctgccggtgtgtgatgtacatatagatggacaaaggagacctatgatggtggcaattgaaataactgcaacaagtctactgcactgctatcagaaaaaaagtcgtaaaattatttatcctgaaatgatggaaagcgagaacttagcaaatgaggacatcacgatatagccagtatagggtaatgtgggtaatggtgttttttgacttgccgacagatacaaaaaaacgacgtaaagcatacaccaaatttcgtaaggatattatgggggatggttttactatgtttcagttctctatttatattcgtcattgtctgagtaaagaaaacgccgatgttcatataaaaagagttaaaagattcattcctgatgaggggtgcgtgggaattctgtgtataaccgataaacaatttggatcaatcgagttattttatggagcgactaccaccacgcccccaatggaaggtcagcaattagaattgttttaggatcaaaaaatggagtagatataataaaaaatccgagattaaatctcggatttttatttcccctatacccattcaacttattgactgataattatttactaatatcttgttgtgagtatgagtacaaagatacaaaaaatgaaagcaattcacaacagactcagataacggaagacaccgccgaagttgtgagtatgagtacaaagatacaaaaaatgaaagcaattcacaacattgagccttgcgtgtagtcacccatggtagttgtgagtatgagtacaaagatacaaaaaatgaaagcaattcacaaccgtcgatgaaaccgtagtcgagggcttcttgttgtgagtatgagtacaaagatacaaaaaatgaaagcaattcacaacggagggcataaaggtagaactgtcaagtttgttgtgagtatgagtacaaagatacaaaaaatgaaagcaattcacaacatacacctcttctttgtctatggttatcggttgtgagtatgagtacaaagatacaaaaaatgaaagcaattcacaacattttggcagaggttgcagccagcgaaaagttgtgagtatgagtacaaagatacaaaaaatgaaagcaattcacaactcggtttactccttgattccgtaggcgaggtcgccggcgtcgccgagtccggggacgatgtaggagtgttcgttgattacctcgtcaatcgcacctacccagacagtggtcttgtcggcggggaaggtagacttgacataatccacagccttgcgcgaagctatgattgaggcaacgtggatgtgggaaggttcacccttggtcagaagtgcgcggtaggaaagctccatcgacgcgccggtcgcaagcatcgggtcggcgattacgagggtctttccgtcgatacgcggagaggcgatatactcgatgaacacgtcgaaattctccttttcgcggtacttacggtaggctgacacaaaggcgttctgcgcatggtcgaaatagctgaggaaaccctgatgaaacggtatgccggcgcggaaaatggtagccagcaccacctcctcgtcaagcacctgcgagggagcgacggcgaggggcgtggtcacgtcgaccgtcctgtagcgcatacgcttcgacatctcgtaggccattatctcaccgatgcgttcaaggttacggcggaaacgcagcatatccttctgcacattgacgtcgcgcagttcactcatgtattgccctacaagcgagggagtgtcggcaaaattgattacttccataatgtctgtttattttgaatagattgtcatcactgtgattataacaacaaaagtagcaatttttcactcgcgcagcaaattgtggagcatattggtgaactgatagtttttgaggttccagcggggatagatgagcagtccggggggcgactgggagacgaaacgctcgacggctatgccggggcgcagacggcgcaggagcttcacgcagagggcggcatagctgtcggcagtaaagcgcgggatgtcgtagcagcccgcctcgacgtcgcgcgccatccgcgtaccctttataagctggagctgatgaatcttcaccgtatccaccggcagctcgttgacgcggtcgatcgtcgtgagcatcatctcctcgtcctcgccggggagtcccattatcaagtggagtccgcagggaatcccggcggcatgggtacgcctgacggcatcggcagtatcagcccatccgtggcagcggtttacgaattgaagggtcaggtcgtgggaactctccgcaccatattcaatcatcacccacgccgggagtgcagcaaggcggtcgagaagctcctgcggcatacagtcggggcgcgtaccgattatcagcccgactacatcgtccaccgccaatgcctcctcatagagacgcatcagcctgtcgatgtccgacgaatgggtgttggtgtaagcctggaaatatgccagatatttcatgtcgggatacttccgcccgaaaaacctcttcccctcctctatctgttccgccacactgcgcacaggggcacagtaggcgggattgaacgactgattgttgcagtaggtgcatccgccggtgcccttcgtcccgtcgcggttcgggcaggtgaagccggcattgaccgcaagtttctgcaccttgcagccgaaatgtccgctcagaaaatcagcgaaatcacgatagggcttcatagacgtgccgcacggttaagcaacacagcgtcgagcagcactatcgccgccatagcctcgacgaccgggaccgcgcggggaacgacacacgggtcatggcggccacgcgctttgagcagcacttcgttgccgtggcagtcgacggtcgttatgtcctgcatgagggtggcgacaggtttgaaggctacgcggaaatagatgtcggctccgttggagatacccccttggatacctcccgaatgattggcggcgacacatatattaccgtcggaatccaccttgaaggggtccatgacctcactccccttcatcccgacaccgccgaaccccatgccgtattcaaatcccttgctggcgttgatgctcatcatcgcttccgccagacgcgcacctagacggccgaaaaccgggtcgcccacgccggcggggagtccgctgacgacgcaactgaccacaccgccgacagtgtcaccttcgcccttgattttcataatcagggcttccatctcggcggctttcgccggatcgggacaacggacgggattgctctcggtcagcgagaggtcaagcgaagtgtagtcatcccctacggctatcgtccccacctgagaagtataggcggatatggtgacacccatccgggcaagagcctgacgagcaaacgctccggcgacaacgcgtgtagcagtctcgcgcgcgctcgaccgtccgcctccgcgatggtcacggagtccgtatttggtcgtgtaggtgaaatcggcgtgcgacgggcggaaagcctcgcggagctgaccgtagtcctgcgaatgttggttctcgttgcggatgatgaaacctatgggacaacccgtcgtcaccccctcgtagagccccgacaggatttcgactgtatcgctctccttgcgggctgtcgtcactgccgactgccccggcttacggcggtcaagctgacgctgcacttcttcaaggtctatgctcacgcccgcgggcattccgtcgatgactccgcctattgccgcaccgtggctctcgccgaacccggtgaaggtaaaaatcttgccgattgtattcataaataaaatttactcctgattctttaatcacttttgcccgccttcatcaaaagcgggcttcactgacgtggattatattgattttatttccttatttccattcattcactttccaagcccgtggctacgtcggcgacctccgcaccacagtagtcaatcagctccttcggagcgaccttcagctgcaatccgcgctgcccggcggaaacatagatgaaaggatggtcaagtgccgtctgatggaaataggtcggaaagggctttttcatcccgacaggcgaacagccgccgcgtatatagccggtcagggggagaagctccttgacgtgaatcatctccgccttcttcgcccctgctaccttggcggccttcttcaagtccacttcaagattgcccggaatgacgcatacgaagtgtccgcacttgtcgccgtgaagcacgagtgtcttgaacacacagttgatgtcctcgcccagctcctctgccacatggtcggccgccagattgtcggggtcgaccgtgtagggaatcagttcatagttgattttcgccctgtcaagcagacgcgcggcatttgtcttggctattttttctttggatgaattcatagctgcaaatttactcaatcaccgcctatattgcaacatccatgcagataaaaacgtcattccactatatcgtgaaccgtcatttatccggtttgcatacgtttttttgattactttttggaataattaaggagaggatgtttaaattattgcaaaataattgttaactttgcaaaatccgcgcggatatgtcaagaagcacattccgccccgaattaagctgcaaaaacgaagatattaaaaagctgaattaaaacctgtttatgaatccaatcaaaaaaaccatcgagctgcctgacggtcgcaccattacgcttgagaccggcaaacttgcaaagcaggccgatggagcggtagaactgcgcatgggcaacactatgctccttgcgacagtcgtaacggccaaggaggccggtgaaggtgtggacttcatgcccctccaagtagagtacaaagaaaaattctcatctaacggacgtttccccggcggtttcctcaaacgtgaaggccgcgcgagcgactacgaaatcctgacatcccgccttgttgaccgtgtgttgcgtccgcttttccctgacaactaccatgccgacactatcgtacaggtgaccatgtactcatctgacggcgtggatatgcccgacgctctcgcaggtctcgctgcctcagcagccctcgccgtgagcgacattcctttcaacggacctatatcggaagtgcgtgtggcccgcatcaacggcgagtttgtcatcgaccccactttcgaacagcttgaaaaggctgatatggaacttatggtaggtgctacctacgacaatataatgatggtcgaaggcgagatgaacgaagtctccgaagccgacctcctcgctgccctccgcgccgcccacgatgccatcaaggttcagtgcaaggctcagatggaactcgccgaggaagtaggttcgaccgtcaagcgcgaatactgccacgagactaacgacgaggaactccgcaaggatgtccgcgagaagtgctacgacaaggcctacgccatcgccaagaccggcagtgccgacaagcactggcgtcaggagagcttcgacaagatctgcgaggagtatctcgaatcactccccgaggaggagcgcgaagaaaagaaggcaatggtcaagcgttactaccacgacgtcgagaaagaggcgatgcgccgctgtgtactcgacgaaggtgtgcgtctcgacggccgtaagaccaacgaaatccgcccgatttggtgtgaggtagactatcttcccggccctcacggatctgccgtgttcacccgtggcgagacccagtcactcgcaaccgtcaccctcggcaccaagctcgacgagaagattctcgacgacgtactcaatcagggtcgtgagcgtttcctcctccactacaacttcccccccttctcgaccggcgaagcacgcgcaccccgcggcgtaggccgtcgtgaagtaggccacggcaatctcgcccaccgcgccctcaaacgtatgttccccgatgatttcccctatgtctgccgtatcgtcagcgacatcctcgaatcaaacggttcatcgtcaatggccaccgtatgtgccggcacactttcgctcctcgatgcaggcgtgaagatgaaacgccctgtcagcggtatcgcaatgggcctcatctctgacggtgagaagtatgccgtgctttccgacatcctcggcgacgaagaccacctcggcgacatggacttcaaggtgacaggtacccgcaacggtatcaccgccacccagatggacatcaaggtcgacggtctcagctatgaaatcctcgaaaaggcactcaatcaggccaaggaaggccgtctgcatatcctcgacaagattcaggaagtgattcccgctccccgcgaggactacaagccccacgtcccccgcatcgtcaccatgctcatccccaaagagcttatcggtgctgtcatcggcccgggcggaaaaatcattcagggtattcaggaagccagcggcgccactgtcagcatagacgaaatccccgagggcggctacatcgaaatcgctgccgccaacaagccctctatcgacaaggctcttgaaatgatcaacgccatcgtcgaactccccgaggagggtaaagtctacaacggcaaggtgcgctcaatccttgatttcggtgcattcgtcgagttcatgcccaaccgcgacggtctgctccacatctctgaaatctcatgggaccgtctcgaaaacatggaggcttccggtctcaaagagggtgatgcagtcgaagtgaaactcatcgaaatcgacaagaagaccggcaaataccgtctctcgatgcgtgcgcttcagcccaaacccgaaggctatgttgagcgtgagcgcgctccccgtggcgaacgcggcccgcgccgcgagggtggcgaccgtccccgccgtgaaggtggtgaccgtccccgtcgtgacggcgaccgcggtccccgccgtgacaacaacaaccacggtggtccccgcaactaatccgaataagattatttgactgcgatacacgcacttagttaaccaaacacatcatacctaccattgaatcaacgccccggcgagttccccacacgggagcttcgccgggttttcatttaccccccgcaaaaaacgcattgaatcccatggccacacttaattcatgcaccccggagcctaccatcaaggctaccgacaatgtacatatcgtcgtcgccgccggaagcggttcgcgctacggcgggaaccttccgaaacagttctgcgaccttgccggacgtcccctgctgatgacgaccctcgaacagctccatgccgccaccccggactggcggctgattgtcgtactcagtcccgacatgacggaagaatgggaaaagatgtgtgtgagccataatttcacactgccacacctcatcacgagcggaggagccacgcgcgcccacagtgtaaagaacgcactcgcacttctccccgactccccgaccggctttgtaagcatccatgacgcagcacgcccggtggtcagcaaaaatctgattgccaatctgcttgaaggtcttgaaggagccgacggcgtaattcccgccactccggtcacggactcgatacgccggctcaatgccgatgggtcgtctgtcgctgtcgaccgctctgaactccgtgccgtccagactccacagattttccctgcctcacggcttctggctgcctaccgtcaggaactacgcccgacattcaccgacgacgcatcggttatggaagcagccggctttaccgacctcagacttgtcagcggcgatccgcacaacataaaggtgaccaacccgggcgacatggccatcgccgagctttatctcaacctgctctgacacatccgtccgccatcccccctaccgcacaccttatataatacattagaacaaccgtcgttataatctgacccgaaccaatcccccctatatatcccatgaacggattgcgaagaatggacataaagttcctgcggggcataggtcccaagcgtgccgagcttcttgaaaagaatctcggcataaggacttaccatgaccttctgtttcatttccccacccactacattgaccgccgttccatcttccgcatagctgacttcgctggcgaggatatgccgtcgttgcaggtcaaggggaaattcgtcagtttcagtgttcagggcgagggggcgaagacacgtcttgtcggactcttttccgacggctcggctgtgatggaggttgtctggttccagcgcataaaggccatcaggcaactctaccatacagcgacggagtacatactgttcgggaaaccgaaccagttcaacggacattggagcatggttcaccctgaagtggacacgcccgaggctgcttcggcgcgcggaggattccgcggtgtctatccgctgaccgaacagttgcgcaatcgtggcttctcgtcgcgtacattctcccaggccgtcagcgatatcctttcaggcatccgcaatatggccgagacactcccgcaggagattatcagccgccacggactgatggggatacgcgatgccatcttcactatccacaatccgcagtcgcccgcgcaacttgaacaggcgcgcttccgcttcaagttcgaggaactgttttatctccagctcgacatccagcgctacgcgctgaaacgcaactccgacatccggggcttccacttcccgcgcataggccactttttcaatacgttctattcacaattcctccccttccctctcaccaacgcacagaaaagggtcatcaaggagatacgggcagacatggccaccggacggcagatgaaccgtctgctccaaggcgacgtagggtcgggcaagacgctcgtcgcactcctctgtatgctcatcgcgctcgacaacagcacgcaggcctgcctcatggcaccgaccgagattcttgcgacacagcactacgagaccatcagcaaaatggtggctccgatgggaataaatgtccggctgctgacaggttcgacgcgcaaaaaggagcgcgaggttatccacagccaactgaccgacggttcgctccatatactcatcggtacccacgcggtcatcgaggacaacgtgcgtttccataacctcggcttcatcgtcatcgacgagcagcaccgtttcggagtggcacagcgcgcccggctctggaccaaaaatgtcattgccccccatgtcctcgtgatgacagccacccctattccacggacactcgccatgaccgtctacggcgacc

SEQ ID NO: 4423 - DNA, 15902 bp, synthetic construct
  variation 14036..14037: note = note, n is a, c, g, or t
  variation 13837: note = note, n is a, c, g, or t
  variation 15630: note = note, n is a, c, g, or t
  variation 13888..13889: note = note, n is a, c, g, or t
  variation 14799: note = note, n is a, c, g, or t
  variation 13354: note = note, n is a, c, g, or t
  variation 15543: note = note, n is a, c, g, or t
  variation 14172: note = note, n is a, c, g, or t
  variation 13020: note = note, n is a, c, g, or t
  variation 14026: note = note, n is a, c, g, or t
  variation 13831: note = note, n is a, c, g, or t
  variation 13360: note = note, n is a, c, g, or t
  variation 15234: note = note, n is a, c, g, or t
  variation 13610: note = note, n is a, c, g, or t
  variation 13893: note = note, n is a, c, g, or t
  variation 14119: note = note, n is a, c, g, or t
  variation 15288: note = note, n is a, c, g, or t
  variation 14623: note = note, n is a, c, g, or t
  misc_feature 1..15902: note = Synthetic
  variation 15636: note = note, n is a, c, g, or t
  variation 14829: note = note, n is a, c, g, or t
  variation 14110: note = note, n is a, c, g, or t
  variation 15006: note = note, n is a, c, g, or t
  variation 14113: note = note, n is a, c, g, or t
  variation 15030: note = note, n is a, c, g, or t
  variation 13855: note = note, n is a, c, g, or t
  variation 13846: note = note, n is a, c, g, or t
  variation 14325: note = note, n is a, c, g, or t
  variation 15562: note = note, n is a, c, g, or t
  variation 14337: note = note, n is a, c, g, or t
  variation 13159: note = note, n is a, c, g, or t
  variation 15787: note = note, n is a, c, g, or t
  variation 15540: note = note, n is a, c, g, or t
  variation 15429: note = note, n is a, c, g, or t
  variation 15300: note = note, n is a, c, g, or t
  variation 13915: note = note, n is a, c, g, or t
  variation 15619..15620: note = note, n is a, c, g, or t
  variation 15270: note = note, n is a, c, g, or t
  variation 13994..13995: note = note, n is a, c, g, or t
  variation 14071..14072: note = note, n is a, c, g, or t
  variation 14044: note = note, n is a, c, g, or t
  variation 14149: note = note, n is a, c, g, or t
  variation 14663: note = note, n is a, c, g, or t
  variation 13154: note = note, n is a, c, g, or t
  variation 13790: note = note, n is a, c, g, or t
  variation 15545: note = note, n is a, c, g, or t
  variation 15497: note = note, n is a, c, g, or t
  variation 13987..13988: note = note, n is a, c, g, or t
  variation 13942: note = note, n is a, c, g, or t
  variation 15710: note = note, n is a, c, g, or t
  variation 15547: note = note, n is a, c, g, or t
  variation 14122: note = note, n is a, c, g, or t
  variation 15090: note = note, n is a, c, g, or t
  variation 13849: note = note, n is a, c, g, or t
  variation 14283: note = note, n is a, c, g, or t
  variation 15135: note = note, n is a, c, g, or t
  variation 13885: note = note, n is a, c, g, or t
  variation 14823: note = note, n is a, c, g, or t
  variation 13526: note = note, n is a, c, g, or t
  variation 15039: note = note, n is a, c, g, or t
  variation 13222: note = note, n is a, c, g, or t
  variation 13819: note = note, n is a, c, g, or t
  variation 15342: note = note, n is a, c, g, or t
  variation 15633..15634: note = note, n is a, c, g, or t
  variation 15693: note = note, n is a, c, g, or t
  variation 14047: note = note, n is a, c, g, or t
  variation 15467: note = note, n is a, c, g, or t
  variation 15297: note = note, n is a, c, g, or t
  variation 13882: note = note, n is a, c, g, or t
  variation 13985: note = note, n is a, c, g, or t
  variation 14008: note = note, n is a, c, g, or t
  variation 15653: note = note, n is a, c, g, or t
  variation 14157: note = note, n is a, c, g, or t
  variation 14820: note = note, n is a, c, g, or t
  variation 13798: note = note, n is a, c, g, or t
  variation 15789: note = note, n is a, c, g, or t
  variation 13124: note = note, n is a, c, g, or t
  variation 13612: note = note, n is a, c, g, or t
  variation 15773: note = note, n is a, c, g, or t
  variation 13804: note = note, n is a, c, g, or t
  variation 15732: note = note, n is a, c, g, or t
  variation 14805: note = note, n is a, c, g, or t
  variation 14030..14032: note = note, n is a, c, g, or t
  variation 15129: note = note, n is a, c, g, or t
  variation 14065: note = note, n is a, c, g, or t
  variation 15641..15643: note = note, n is a, c, g, or t
  variation 13792: note = note, n is a, c, g, or t
  variation 13236..13237: note = note, n is a, c, g, or t
  variation 15264: note = note, n is a, c, g, or t
  variation 13794..13795: note = note, n is a, c, g, or t
  variation 14247: note = note, n is a, c, g, or t
  variation 14808: note = note, n is a, c, g, or t
  variation 15572: note = note, n is a, c, g, or t
  source 1..15902: mol_type = other DNA
  variation 14524: note = note, n is a, c, g, or t
  variation 14041..14042: note = note, n is a, c, g, or t
  variation 13039: note = note, n is a, c, g, or t
  variation 13876: note = note, n is a, c, g, or t
  variation 13879: note = note, n is a, c, g, or t
  variation 13063: note = note, n is a, c, g, or t
  variation 13806: note = note, n is a, c, g, or t
  variation 15622..15623: note = note, n is a, c, g, or t
  variation 14053: note = note, n is a, c, g, or t
  variation 13003: note = note, n is a, c, g, or t
  variation 15701..15704: note = note, n is a, c, g, or t
  variation 14858: note = note, n is a, c, g, or t
  variation 14223: note = note, n is a, c, g, or t
  variation 15713..15714: note = note, n is a, c, g, or t
  variation 14050..14051: note = note, n is a, c, g, or t
  variation 15534..15535: note = note, n is a, c, g, or t
  variation 15707: note = note, n is a, c, g, or t
  variation 14250: note = note, n is a, c, g, or t
  variation 15638: note = note, n is a, c, g, or t
  variation 15613: note = note, n is a, c, g, or t
  variation 13243: note = note, n is a, c, g, or t
  variation 15553..15554: note = note, n is a, c, g, or t
  variation 15549: note = note, n is a, c, g, or t
gtaaagcgtttgctgaagttatcgaacctgctaaaactatcctttggaacggtcctgccggtgtatttgaatttgacaacttcactgcaggttcgcgcgcaatcgctgaagctatcgttaaagcaactgaaaaaggcgcattctcgctcgttggtggtggtgactctgtagcttgtgtaaacaagtttggtctcgccgattcagtttcatacgtatcaaccggtggtggtgctcttctcgaagcaatcgagggcaaagaactccccggcgttgcagcaatcaaaaaataataattgttcatgcaataatattgggttgccatcctttaattaaagggtggcaatctttttacttatgatacaactcgacacacgattttatgattttctaaaggctcactcgggtgaagatccggtcaagctgaggttgcgttatggtggtgacaaaagtgacgactcgataaagtatgcgctcgaccatatggcatgtgttgccaaagccggaaataagtttactcttgatgatggcgactcgtggatgcctgaacttatgcttaacccgctgtcggttgagcaggcatcgtcggctaatgttgcaaaatcgagggctcttttgatagatgaagggttgaaaattttggatatgacgtgtggactcggtatggatatacgcggatttcttacccgaaatcccaaagaagtaaccgggtttgagttgaatcatttatcggctgaggttgcggctgtcaactttgccaaatatagcaatgtcaagataatagagggggatagtgttgagtatctaaagactattggcgacgatagctatgacttgatttatatcgaccctgcacgtcgtgacaaaaacggggggcgggtttataatcttcatgactgtctgcccgacttgaccgagattctccctgagatgctgaaaaagagtcctatggtaatggctaagctgtcaccgatgctcgatgtcactcaaacgatttcagaccttcccggaatttgccgtttgattgccgttgaagagaaaggggagtgcaaagagctgttggcaattataaagcgtggatttagcggtgaaccgttgattagtgtcggattaggcgataatgcgatgtcgtttacacagtctgaagaaaaagaatcaccgataacctatgccgaccccaaggagggaatgtggctttatgttccaagtgcttcggcaatgaaggcgggatgttttaagttgatgtcatcacgatttgatatgtcggagattgctccgaattcacatctctatatatcagacaaacaaaatgatgctttccccggaaaggctttcaaaattgatgaggttgtcgattttgcatcatcaaatattaagcgacttgcgagcagggttaaaagtggcgaaataactgtcagaaatttctcgtttacgtcagccgaacttcaaaagaaactgaaacttaagcccggcaatggctgtcgaatttttgcaacaacgacttcatcaggcaaaaaaataatgattttgaccgacaagaaatcaacggatgttgattaatttgtgggtttgaagtgataaacgccaatggggattagccttgatgtagtcaatggtcgattcgatgttcttgcccgaacatggttgtagaaaattatgttgtgtttcaggacacgattttctaattgattcaacgtcttgaccttgataaacgattttcagttcgtcgatacgatcgagcacaaccggtttatatttcggcgagcaagtaatccagtcaatcgggtagggacatttaaatgttccattggtttcgatgtgtattcttttgccggctttgtgtagaaggtcaacgagcgcgccgattggctgcatgagaggttcgccaccggtcagaataacggttttagcaggatattcggttacaaggtctaagatttgttgttcggtcatcggggttgatgaggtgtgatctgtatcgcagaagtcacatttcaggttacaccccgacaggcgcacgaatacagccggcagcccggtccaaaatccctcaccttgtaatgaatagaatatctcgttgatgttaatcatttgtcagtcaatttgataggatgcgatattgccctcgctttcctgaacgtcaactcgccagcagttttcaacttggtcacaaatccagcgtgcgatattttcggctgtcggattaaacggcagaacgtcgttgaagttggcatggtcgagcagtcctgagattttttctttgatatgggtaaagtcggtaaccataccatcggggttgagtgttgccgatttgcagtggacagttataatccagttatgaccgtgcaggtttgaacatttgcttttgtatgacaattcgaggcggtggctgccggatatttcaagtcgtttggttacgtaatacattgttttgaaatttagttgttttttgtttgatcaacgggcatcaaaccgagttcggcacctttttcatacatcagtttcagggcgattgccgggtcgtttggattgtcagatgcaagaagcatttctctgacgtatgttttgataattccgaccataggtgactggctgagaccgaaggttttcatgattgttgtaccatcgaccggcggttgccaattacgaagggcatcgcgttgttcaaggtctgccatctttcggcaaacatcgtcataatttgcaaggtagcgttttactttctcgctgttctttgaggttatatcggcgcgacataatatcataaggtcgttgatatcgtcgccggcatcgacaagaagtcgtctgacagccgaatctgttaccgtttcttcaacgagggcaatagggcgcatgtgaagctcgacaagtttctgaacatatttcatcttgtcgtcaagcgggaatttcatcgatcggaagattgccggaatcattttagccccgataaagttgtggttatgaaatgtccatccaacgttatcatcccatcgttttgttgacggtttgccaatgtcgtgaaacagggcagcccagcgtagccacacgttatcgctctcggcggcaaccgaatcaacaacctggagtgtgtgataaaaattgtctttgtgggcacgtccgttatggctttcaaccccatgcagactttcgagttgggggaagatgagtttgagtagtcccgagtcgagaagcagtgaccagccgattgacggtttgggcgactgcatgatctttgtgagctctgaatagatgcgctcttttgagattatcttgatgcgctcggcgttacgtttgattgcttcaaatgtggcgaagtcgatagagaatttaagctgtgtcgcaaatcgtatagcgcgaagcattcgtagcgggtcgtcgctgaacgtaacgtcagggtcggttggggtgcggattatcccttttttgaggtcggaaataccgtcaaatttgtcaacgagctgaccaaagcgatcggcattgacacaaatagccattgcgttgattgtgaaatcgcgtcttaaaaggtcatcgtcaagggtgccgtcttcgacgaccggttttcggctgtcgggagaataggactcgcgacgcgcaccgacaaattcgagatcaatgcccttgtaaaccatttgggctgtcccgaagttcttgaatacgttgactttgactttgggtccgatagaagctgctaattgaccggcgacttcaatgccacttccaattgtcagaaaatcaatatcttttgagtggcgttcaagcaatatgtcgcgtacaatgcccccgactgcataacattcacggctcaattggtcggcagctttgccaacggcatgaaagacgggcttgtcaatttttttggtgatttcagaaacgtcgatcatagggcgataatttcttcgggggcagttgttaagcattgcatcgggccgtcggctgtaacaacgtatgtgttttcgatgccgactgcgcctgtgccgggtattacaaacttgggctcaagggctattacgttaccttcgcgaaggatatctcgactgcgaggcgcgattacgggatgttcatttatttgaatgcctacaccatgaccgatgaaaccggcatgctgacggtgtcccatgaaatagtcttcgagattttcaccgcgaacgatttcgattgctttttcataaagatattttgcctctactcccggtcgggcgatttcggcaagtgtatggcagatgaggcgtgaacactcatgggctcggatagcgtcatcggcaattttgccgagtgcaaatacgcgggtcatgtcggtcatatatcctgtgaaattgccgtttgcatcaaccataacggtttgtcctcgcttgatgaccgacccgtcggctccaaccgggagtgacggatgtgcgccatgtccacccatcgcaaaatcgtatggcgagggattgtcggcattgtctccgacaagaatgtttgccatgaaaagttccattgagtcaccggcaattctgaattgaccgaggcatcctgccatgcggagctgacgttcaatttcgatttgaaagtcgaggtcggtcatgccctgttggtagagcgatggaattttgcgatagacttcactctggcgtatgcctgaggctgcgataagcttgatttcggcaggagtttttaccgagcgggcagccatgagaatatggtcgatgttgcatatttccctgccttcaaaaacttttgagagacggtgtatggtggtccatgatgagttgtcgcgttcaagcccgattttatcaccgattgagatgttgttctcggctgcaatcgccggaatatcttcgggctttctgattgaaaaggttgtcggacccgaaatgtcggacggacgtcgcacgaatgcttgcatcgatgagttttgactgtcaatgagaaggtatccgtcaatcactcttccggtaaaataaaatatgtttgcattgtcgttgatgactgcattgtcgatgctctcatttttcattaaatcgacaaccttgccgagtctcaggctgagctcttcgggagagagtagtatggtgttgtttgaacgtggcattaatgtcgttattttgtgagatagtcggttagctcggcaaacgaatcaaatgaaagctgtgcatcattacatttgccaaaaccgtatgtgacgtgtatcatgtcaataccggcagcatgggcggcatcgctgtcgcgttggatatcgccgacgtatgccggatttttcaaattgtttcgctcggcaatcaggcgaatgttttcggctttgtcgagcccgttttcgccgttagaaagcgtgtcgatgaaatatggagtcagtccggtgaatttcaggaagtcgggtagcccggttgctccacagtttgaaaccattgtcagtttatatttcttggcgagacgggcgattccttccttaactccatcatatagtttccctcctaaaacgggcatcattttagggtcattctctgcaataagtttctgatatttttcggcatcaacgttcatgccgtcaaaaagagcatgaaatatttcgttaagcggacgtcccatgtatcgaagaaggtcatcgcgggttacaacacgatcgaccccaagctcgcgcgaagtggcgttccatatttcggcgtatgaatcgacagcatcccacagggtgccgtccatgtcaaatataagactgtcgtatggttgtgacattgttaatcgggaatgtattttattccaacaatatcgagcccgcgcagggtgtcgagtttcataatatgacgcacttcgattgagcggtccttgatatggttgattttagagttgagaggggtctcgacctggatgtaggcaccgcttccgctgccggtccagttgccaaaacggtcgatgagcggaacatgaatcgtatcggctactcgactcccgtcaagcccttgcgaaacgacttcaagcgacagcgactcgtagggaaaagatgaactgtgacgaaatgtgaccgacagctctccggtcgagattgagtcgtcatgctcggggttgaaaagctcgggatgaccgaaacaccaccccccgtcaggaagatggtgaaattcggtgtaatctttcggctcggaacatgctgaaagaatcaacattgacagaatcgcaattataaaatcagtttttagactcatttgttgaattgtcgttttggttttgttgctgattttgacgatcgcccttgttgcgctgacggtcgtcgttaaatcggcgtcggtcattgttgcgtttacggttattttgttctccttcagaatgttcggctgaggatttgtcggcgttggactggttttgattgtgattgttgttcttctttttcttctttttctttttatcaaaacgggtgatgtcctgaccgagaatgtcattatactgcgtaccgggcttttcggtttccttgtcgtcgtgaacaagcgacatcggtttttcgccgcgtttgttcattgctataatctcaaaagcacggtcggctgagattgtcacaaggtttgccggcaccgatttgtcggtcgagtaggtgagttcttttttgaatatgtcggtcttgaagtggtagtatgtggcatcggtagtttcgagtctgatttcttttgacggaagctgtttgacacattccacataggcgtcggcttcaaagttgagacagcatttgagttttgcacactgtccggcgagtttctgcggattgagcgagatgtcctgatagcgggcggcactcgtggcgaccgaaacaaagttggtcatccagcttgcacagcatagcggacgtccacacggaccgataccgccaatgcgacctgcttcctggcgtgaaccgatctgcttcatctcgacacgtatcttaaacgtatcagccaaaatcttgattaactgacggaaatcgacgcgctcatcggcgatataatagaaaatggctttgcaaccgtcgccctgatactcgacgtcgccgattttcatatttaggttgagactttcggcaatttttcgcgagcgaatcattgtgtcgttttcgcgtgctttggcttcctcgaatttttcgaggtcgttggggcgtgctttacggaaaacacgtttgatttcggcttcgtttttgatacctgcctttttcatttgacagcgaacgagtttgccgacaagcgtaactttgcctatgtcgtgaccgggcgatgcttcgacagcaaccatgtcgccgatttcgagaggaatgtttgtcgagtttctgtaaaaacctttgcgggtgtttttgaaaagaacctcgacaatttcatcgtcggcatgttgccccggaatgtcgccgagccagttgaagctgtgtagcttacctcgcggacattcgtgcgattcagcccggtggttttgttcggcgggctgctcgtcgttaatctcgggattgtcgtttatgatatcttcttcagacatgggcgtcgattattttgcgaagctgacagagcgggtttcgcggataacggtaatcttaacctgaccggggtaggtcatttcgtcttgaatacgttttgcaatttcggctgaaagtttttcggtctcaacatcgtcgatcttgtcggcaccgacgatgacgcggagttcgcggcctgcctggattgcgtatgttttgagaacgcctggatatgagagtgcgagctgttcaaggtcgttgagacgtttgatataggcttcgacgatttcgcgacgtgcaccgggacgtgcccctgagattgcatcacaaacctgaacgatgggtgcgagcagtgatgtttgctcgatttcgtcgtggtgagcaccgattgcgttgcaaatttcgggtttttctttatatttttcggcaagtttcataccgagaagtgcgtggggcaattcgggttcttcgtcgggcactttaccaatatcgtggagaagtccggcacgacgtgcttttttaggattaagtccgagttccgatgccatgatagcacaaaggtttgcggtttcgcgagagtgctgaagcaggttctgaccatagcttgagcgatatttcattttgccgacaaggcgaatgaggtcgggatggagtccgtggataccaaggtcgattgctgtacgtttaccggtctcgatgatttcttcttcgatttgtttacgcacttttgcaaccacttcttcgatacgggcggggtggattcgaccgtctgaaacgagctggtgaagggcgagtcgggcaatttcgcgacgaacggggtcaaagcctgaaagaacgattgcttcgggggtgtcgtcaacgatgatttcaataccggttgcggcttcgagagcgcggatgttacgaccttcacggccgatgatgcgacctttgatttcgtcagagtcgatgtggaagattgtaacagaattttcgatggctgtttcggttgcaacacgctgaattgattgaacgacaatacgttttgcttctttgttggcagtcatcttggcttcgtccataatatcattgatatatgacgcagccgctgttttggcttcgtctttaagcgattcgacgagcttttctttagcttcttcagacgaaagtcccgagatgtgttcaagttcggtgcgagcctgatgtatcagtttgtcaagttcttcgtgacgaatttgattggcagcttcttgagcttcaatggtttggcgttgagcctcgatttcattgagcttgcgctggttttcgctttgctgctggttgagctggagctcacgctgtttttgacgggcttcctgagcctgaatcttagaaagacgctggttggcttgtttttcagcctcggctttgatttggagctcttcttcgcgagcttcaagaagcttgtttttttgtataacttcagcctcacgggtggcttcttcaatgatagatttggcacggctgtgggccattgttttttgaattgcgagcgagacgaggtagccgataactattcccacgactcctgctactatgtaaaatatagctggcatgctgtgattgattttatgtttgtactaagttatatttctaatttttaagatattatcataaataaaaagcgcacaattgactctcagtgaaagctgacagacaaaagtgcggtaatcaaaagtcgtcaaagacggctgtatgagttgggtagtttagttttcagacaaatcgtcaaccaaaagggtgtcgagcgtttgttctatttggtcaaaagcttttttggcttcctcaagctgtatattgctcacttcaaatgcctgagcaaaacgtagcgtcatcattcccaagatatcttggggtgatctgtcgggaaaacgcagactccaggttttccaaaggttgtttatagagtctgccgcttttctccaacttagttcatcgtcagatgaaactttcagttgtataggagccaaattggctatgcgtaggttaatctcttttacttcactcatcgttgcatcattgttttaggtcgttgatgcatttattgacatcccgcacaagttgggtcaagatttggcgactttgctcaagttcttctttagaaggagcaattccaaccgcagttttaaggtattgaatctcgcgatttagactttcaatttgtcgatcacgatcttcaatagaggctttaagctgcgtaatttccttgtctgcccccatcttttgctgtttgagcaattgataacggctaaaaagcacttcggctttatgcttcagtctttcaattcggctcggaatttcgccaggcatcttatatcaatttttttacaaaagtagtaattattttccaatttccaataatcccgccaattttttgttaaaaaaacaacagagcgacctttcagccgctctaatgttttcacaacggaataatccttattgtgaattgctcattttttgtatggcaaagttatacactttttttggatatcccaaattttattgatatttttggagaaaaataagtaactcccacattttatatataatatgaaacgcattcttggtcttgatctcggtactgccagtgttggttgggcagttgtagaagaaggtgaaatcgacaaatttgattccaatattttggctgccggtgtccggcgatatcctttgacagttgatgaaacaaaaagtttttcaaaaggagacccgatattgaccaacgttgatcgaagattaaagcatggtgcacgtcttaataatttccgatttaagttgcgtcgtgaaaatttacgtcaacttttaatagagaatggaattatttcgcctgaaacagttttggctgaaaatggcccggattcaactttttcattattggaacttagagcgaaagctgcgaccgaacgaatcagtcttgaagatttcggtcgagttttgatgatgttgaataaaaagcgtggctatcgtagcagtagaaagtctaatgacgctcaagatggggatgcggctatcgacacgatggatattgctatggagcttcagaagcgtaatattacgccgggacaatatgctttggaaaaaatgcagaatggggcttcgcgagttccgcaattctatcgctctgatctcgaaaatgaatttcaccgaatagttgattttcaatctaaattttatccccaactgtctcctgaatttgtcgagtctttaaaaggcaagaatgacagtcaaacatggaagatgctcagcacagtattagatataaaaggtactaaaagagcatcgggacgtggacgagaaaaaaaaatcgaagaattgacttggcgtgtaatggctttgaacgaaagagttgacgctgaggttcttgcccatatacttgggaaaattaacggttcgattgcgtcggcaagtggattgttgagcgcaatgagcgaccgtagtaaggagctatttattaataatgtgacgatcggtcagtataaatatcgcaagctgagtgagaatccccacttctcattcagaaatatatcgttctatcgtcaagattatttggctgaatttgatacaatttgggaaactcaggcaaaatatcataaagagttgactccggaattaaagaaagaagtgcgcgattgctgtattttctatcagagaccgctaaaatcacaaaaagacaaggtggcgacatgcgaattggagtcttatcaaaaagaagttgaagttgatggaaagaaaaagaaggtatttattggtccgaaggtagctcccaaatcatctccattattccaacaattccgcatttatcagattgtaaataacatcaagataaatggcaacccactttcagaggaacagcagattatgttgtgccaaaatcttgaattttgcagtaagttgagcgataaagaaattcttacccttttgggcctcaagcctaaagatgccaaattaaattttaaagaaatactgggtaatcgtacggcaacagctattttatcggcttgtgaagaatttctggcattaaacggatatgatacagacttgcttgatggattaaatccggctgagcgtgcaatgaaagttgctcataaagttgaagaatatggacttaacgcggcatacctctatttcaatgctcaagacaatgatatagagagacagcctgcatatcgcctgtggcatactctttattcggcagaggctgatgattctcgtagcggtaatgaaacgttgaaacgtacattgtcaaaattactcgatattcccattgaacaaaccgctccgtttgtctcggttgcatttgaacctgattatggttcgttaagtgttaaagctataaagaaaataatgccttatttggctgacggacttgtttatagtgatgcttgtgaaaaagccggttataatcattcaaagcgttctgaaactcgcgaacaaaaggaaatgcgtgtttatgattcgcatattgacatattgcccaaaaactcgttgcgaagtccggtcgttgaaaagattctaaatcagatgatcagaatcgtaaatgagttgatggagatttatggtcaatttgatgagattcgagtggaaatggcacgcgagttgaaaaaatcggcaaaagaacgcaagtcgatgactgattctataaacagtcgagctaaggagaacgagcggattgtaaatattttgaaaaatgcaccgttcaatatagccaatccgagcagtaacgatattgtcagatatcgtctttatgaagaacttgaattcaatggatataaaacattgtattctgatacatatattccaaaagaagaattgtttggcaagggatttaatatagaacatataataccacaatcggtagcatttgatgattcatattcaaataagaccattgaaactacgactgtaaatcttgccaagggtaatcaaaccgctattgattatatagaggcaactttgggagcctcggcaatgaatgactatttgcaaaagatagaagttctcgaaaagaaaggtgttatttctcatactaaggcaaaaaatctgaagtgtaaggctgaagatattccctctgaatttttgaatcgagatctttctatgtcgcagtatatcgctaaaaaggcggtagaaatacttgagaatgtcacaccgcgagttacgcctactattggattaattaccgattgtttgcgcgaagactggggcttgattgatgtaatgaaagaaatgaattgggataaatatgaccgtttggggttgacaactcaatttacaaatcgcgacggcaaggttgttaaacgcattgttgattggacaaagcgcaatgacaaccgtcatcatgcgcttgatgctataacaatagcgtttactcgtcctgtttttattcagtatctgaataatcttaatgcacagtcagacaagggtagtgaaatttatggtataaagaaaaaatatttatatcgtgatgagcatggaactcttagctttttaccaccaatgcctgccgatcagatgcgtaaacgtgtaagagaaacattggaatctattcttgtttcnaccaaagctaaaaatanagttgtgacggcaaatgtngataagattaaaaccggtcatggngatgtgaaaaagaaatatctgactccgcgtatgcagttgcacaacgaaaccgtttatggangatctctgcgctatgaaacgcagatggtangcgtnggtggcaatatggacatggagatgatcaaaaaggttgcgactaaatcttatcgtgaagcgttngaaaaacgtcttgnngaaaanggcggagatgccaagaaagctttcaccgggaaaaacgctcttgccaagaatccgatttatatcgatttggcacatactcaatgtgtgcccgacaaagtaatgattgttgancttgtnccatgttttacccaaaaggtggccattactgaaaatcttgatattgctaaagtgttggattcgggaatacgtcgtattcttgaacagagacttgaacagtttggaggcgacaagaaaaaagcattcagtaatttggaagaaaatccgatatatcttaataaagacnagggaattacaattaaaaaagtcaagataaaagcacgtatatctgatccgatagcaattcatgacgctcacgatcatcttgggnanttgatttatcaagccgatggaacgacaattccgagtgactatgttgctccggcaggaaatcatcatgtcgcactgttcgagactccgactggagctgttgaagaggttatggtctcaaactttgaggctgtgactcgtgcaatagctgttccgccaatgcctgtgattgatcgaaatntnannagngatgangnctggaaattcttnatgacattgaancgaaangaatatgtngtnttcccngaatatcatcttgatgaaaanggnaanccnganngcangatatttgaccccaaagatatngatttgctcaatcccgataactatgcnttaatcagtcctcatctctatcgagttcaaaaattgtcaagtngnnattatnngtttagacatcancttgaaacaacggttgangaannnaaannactnntnggnatnncntataaacgaatnacttcnntaaaattaatgaaagatgtcgttaaggtaagggttgangcnttaggncgnattgtccatgtcggagaatattaaatnggtaagcncttatgattagacgngtggtattgttcagtaatccggtttatttatcggtttgtaataatcagttngttgcaagaacgcctgatgaaaanaanccgttaactactattccggttgaagatatcggngtgatagtgcttgataataggcagataacaataacactcggnctactcgacctnttgcttcaaaacaatgtggcggttgttagctgtgactccaaacacatgcctgtagggttgcagttgccactcgatggaaacacgttacagagtgaacgatttaaatatcaaattgaggcatcgctacctttgaaaaaacaactttggcaacaaaccatacagactaaaattttaaatcaaagagcantcctaaacaaaatagcaaagattgaaaccgggaatatggaagcgtggagtcggcaggttagaagcggagaccctgataatctcgaagctcgtgcggcantgtattattggcgaaatatctttgcgtcagatgttagagnttttatacgtgatcctgatggagaaatgcccaatgctttgttgaattatggctatgctattgtcagggctatgatggctcgtgcattggtctcggcaggattgttgcctacgttggggattcatcatcataaccgntataangcntattgtttggcngangatatnatggagccatatcgaccatacgttgatgnggctgttattgagataatgaaagattataaaaaatgtgatgatgaagaatttatacttgataaagatgtaaaacgtcgattattgtcgttgcccgtaactgatgcgataattgatgggaaaaaacgcccgatgattaatgcaatcgangtgacggctacaagtttgatgcantgttatcanggaaagcggcgtaaaatactatatccttttattcaggacacaaattctgantaatagttaaactttgggttgtaaatgagtagaagtcgntttagncaatatagatctatgtggataatggtattctttgatttaccgaccgagacaaaggctcagcgtaaagctgcaactcggtttagaaaagatataatgggngatggctttacgatgtttcagttttcaatntatatnagacattgtgcaagtcgngaaagtttngangtccacttaaatcgagtaaaacgtttcattcctgaagagggnagtattggtattttgtgtataactgataaacaatttggtgcaatcgagctattttatggagcatcttctacacctttaccgatgggnagtcctcaacttgaattgttttagaataaaagaaatcnatagcaaaataaaaaatccgagttcaaatncccggatttttttattttacaaaacctttgtatcttnntgatntgnantnanatanncatatcgngttgtggttncagatacaaagttacaaaaaatgaaagcaattcacaacacncctcgnnanntttcccnatnnangnatnnngttgtggttncagatacaaagttacaaaaaatgaaagcaattcacaacanaatctgcnnnnatncangannaaggaatggttgtggttncagatacaaagttacaaaaaatgaaagcaattcacaacctnatgcaggtctcggnangtaaattcatgcgtcggttgtggttacagatacaaagttacaaaaaatgaaagcaattcacaacatctcggtggtgcaaagaatcctattgttagttgtggttacagatacaa

SEQ ID NO: 4424 - DNA, 12754 bp, synthetic construct
  source 1..12754: mol_type = other DNA
acgctagcgacaggcttaacacatgtgctttgtttctcaaaagcgagtgcaaagttactgcgttttttcataacctccaaatttgttcagtttattttttatcacttttttcgctataaaacttgctacactttgattacttgcgacttagactctttttcttattgaaatatttaactttcattaactaatgatgccagcaaaatccatcatattgcataaattcactacttttaccgaactaaatactacatttaacatccctcatttttgaagtggaaatgattctctgtaaatttgtactcggattagagacataggtctcctcccctcaccttaattaaataaaataagaatgaaacctttcgtacacctacatgtacacacccaatattctctattggacggacaagcatcagtatctgcgctcatagacaaggctcttgatgacggaatggcaggcatagccataaccgaccacggcaatatgttcggaatcaaggaagtgtacaactatgtcaatggtggatgcatgaagggctataaaaagaagctcgaaaaagcgcaagaaaagggtgacgataaaaccattgaaaaattcaccaataggataaacagaatcaagtccaaggacttcaaattgattattggctgtgaaatgtatgtcgctaacggttctctccatgacaggaccgacaaaagagacatagggcgccacctcattgtgcttgcaaaaaaccatacaggatataaaaatctcatcaaacttgtaagcaaagcctggacagaaggattttacacgcatccacgaacagacaaatcagaaatcgccgcccatcgggaaggtcttataatagcatctgcatgccttggaggcgaaataccacgacttctgcgcgaaggcaagaaaaatgaggcgattgaaagcgtaaagtggtggaaggaaacatttggagatgactactacattgaattgcaaagacataagacaaatgttccgagcggcaataccgaagtgtatgaaatccagaaaagcgtaaatgccgatttaatcgaaatagcaaaggaattgggcatcaagatgattgccactaatgatgtacatttcgttaacgaatctgacgcagaagcccacgaccgcctgatatgcgtaagcaccaatagcaacctcacggacccatcccgaatgagatacactaagcaggaatggatgaaaacgcaggaggagatgaatcaaattttctctgacgtgccggagtcgctggaaaatacccttgaaatcttaggcaaggtagagaattactcaattgaccacggacctatcatgccatttttcgatatccctgaagaatttggcactgaagaagagtaccgttcaagaattaccgaacaagagctttttgacgaattcacacgggacgagaatggaaatgtcgtactttcacaggaaaaagcggaagaaaaaatagaaaaacttggtggctacgataaactataccgcataaaatttgaagctgactacctcaaaaaacttgcatacgaaggcgcagaacgaagatatggcaatcctcttacacctgagcttgaggaacgaataaagtttgaactgcatataatgaaaaccatgggtttccctggatacttcctgattgtgcaggacttcatcaatgctgcaaggcatcagcttggcgtaagtgtcggaccaggtcgtggttccgcagcaggaagcgccgttgcatattgccttggcatcactcaaattgacccggtgaaatatgacctgcttttcgagaggtttttgaacccggaccgaatctcacttcccgatatagacatagacttcgatgatgacggacgcgccgacgtgctccgctatgttaccgagaaatatggcgaagaaaaggtagcacacattattacatacggcacaatggctgcaaagagcgctattaaagatgtggcgcgaatagagcaattgccgctcagcgagagtgaccgcctcaccaaattaattccccggcgaatgccggaaataaacggcaaggcgttggatccgactcttgccaactgctatgaatatgtgccggacttcaaaaatgagttacacagcaacaacccactcgttgttgaaaccctacgttatgccaaagaacttgaaggaaacgtccgcaacactggagtgcatgcttgcggagtgataatctgtcgtgacgatatcactgattgggttccggtgagcactgccgtagataaggcatctgattcaaaggagaaattcatcgttacgcaatatgagggcaaagtaatagaagagaccggactaatcaaaatggacttccttggattgaaaacactgagcatcatcaaggaggcggtctcaaatatcaagcgcactcgaaatgtcgatattgacatggagacaattcctattgatgacccggcaacctataagctgtattgcgacggaaacactgtaggcacattccagtttgaaagcgctggaatgcaaaaatatcttcgcgaacttcagccgagcactttcgaggacctcatcgccatgaacgccctctaccgtccgggacctatggattacattccggacttcatcgccagaaagcatgggcgtgaacctattgtctatgatattcctgagatggaaaaatatcttaaggacacatacggcgtgacagtgtaccaggaacaggtcatgctcctttcacgcctattggcgaatttcacccgtggacaaagcgacacactccgaaaagcaatgggcaaaaagctcattgacaagatgaatgagcttgaaaaactgtttatggagggaggtcaggcaaacgggcatgatccggcagttctttctaaaatatggaatgactggaaaaaattcgcttcatacgcgttcaataagagccatgccacatgctatagctgggtagcattccagaccgcataccttaaagctaactacccggcagagtacatggctgcggtactgacacgaaaccgctccgatatcagcaaactttccgtattcatggaggaatgcaaacgaatgagaattgatatcaaaggtccatgtgtaaacgaaagtttccttgaatttggcgtgaacgcccgcggagatatccgctttgggctcgcggcaatcaaaggcatcggagaaaatgttgtcaatgaaatcctgtcagcaaggaatgctggagggtcatttacctctatatatgattttattgaaagagttaaccttggcgcagtaaacagaagggttattgaagcactcgcctatgcgggagcattcgactgcttccagcacgaactccgcagggaagatttcttcgagaaaaatatcaaaggcgaaacattctctgaacttctaatccggtatggtcaactttttcaggcagacaaacagaaccggggaatgtcacttttcggtgacgaagacactaccattaccgccgcaggcagaccaccggttactcctgctaccccatggattgacgcatatcgcctgcaaaaagagcgagaattagtcggtatctaccattcggcacatccgcttgacccctacttcatagaaatccactatggtatgacacctctcaaggattaccagagtgaagatgttgtggaaaatactgaatatacctatggcggattcattgttgacttctctaccaagccgactatgaaaggcgacatgatgggaataattaagattgaggatacatcgggagctgcagaaatccgcctttacggcaaaaacttctacgatttctctaaatactgcatcgcaaatacttcaatctacataaaaggaacgtatggaagaaatcgcgacgggaaattaatcttcaaaattggcactattgggcttttgagcgaccttaaaggcaagttgattaaaggtatcacacttactatggatttcccgcaggtagaccagaccataatggatgtactttcggagctactgacacgagaagaagataacggagcttcacgcggcacgctcaccttaaaactgtttgagccgagcgcaaaccgctttatcaaatttgattctccttatactgttccacttgaccgaagggcgctcgacaccatcggtgaccttggcatccagtaccgccttgaaaaaatggaagaaaatcagtaaaaagcaatctacaaataaaaaatcaagggctgcgttaccgtagcccttgattgcttttgccggtaaatcagtcccggtcaagaatttctttgattttctcagaggcggtaataaccacattctgtagcttgattatttctgccttatgcactcgtgcaccctgcattttcactaactcctcaattacagtcttgatttcctgcatggagtacttgctgtagtcaatttcctctttcgccaatgccttttcgagcaatgatttttcttttttcggtcgtgccattaattctgatatttgatgttaataattctattaaattaaacgcaatttacggtctttatgttcattccacgtctatacttacctcctccgggtgcgaaaaatcatttttttcaattattgcattcttaaccctctgcaatttgaaagtaaattgatttttgtggaatgcaggataatccttgttgacagtcacgctattattacgaaaaacgagtccattgaccgattttgcataaagaactggtttgtcaaacgttgcaaacctgttcccttcaattacaattccgctgtggaaataatctttttgtgacgcaaggttcggaatttctggataaatagatattatcgcctcggtaaactgaaacatgcttgtcagcgagtttataaaagtattatccttaatcaacacatcacggcaagcacccgtttcaaaccaaccgttgcaatctccgcatagcaggattgccgtgccgctcgtatggtcaaacaggtttgtcatggctacaacacggcggggagtagagaaaaggctgccacgggcacgattattacgtactgtattatggttgaattccacacttggagtccaggtaagattctctatcccgcagctattttcaggtgttatgctattgtcaagaggctcaacaaaagtaaccttcattaactttgcccctgtcaccacgctctggtcatacggttcgatggatgcaataacattagcaacgccggcaatatccattgtgcggcttgcaacaaactgaacgctgtccccagcatcaccccatttgaaaccataactctgcccatgcatatattttccaacaagtgttttgtcatccaacctctcgacaaccttcaaataagtcccgtggacatttatcgcatcgtccatcatgttttcatacaaaccattgacagacgatatatgccccttgcagccggagaaatgagttgcatccgcctgggtagtataatatcgccaatcatcctttccacggagacacaccgcaaaaccgtcaagattcacgctgtcacacagctgcgcaagcagccccatcccttccgcataatgcaccttgacatcttttagggtcgtggcacgactctcgcttaaaaatattcccgggttaggacgagcccatgagcgcaaagccactttcacaccgggaacaagcaatctgttttgccatttcggggcacggaacgatccatccttcaaagcaatcacgctatccaggggagcccacacatcactgctcctgtacaccatgtggcgagtatcaggttcaaacgcgattgcgcttctgggacttatctcccagtcataccctttcaccttaaactcacccttcttgtctactgaacaaatagcgccaccatctgccttgaaaacaataccgtcagaaccgttgctaaccactgtaacctggcaaatctgcgtatcagcaaaatctatgcttattccggataggcggcaatcctcactgttaacaacggcaatcggcaacatccttccatgaaacatgaattccgtgccattaccatctataacaaggttattccagccttccagatttattcctacctttttgtactcgctttggtcatggttggaaataaaatatctcttcttagcggcaccttccggataaaaattatacaccccaggggcaaatttcagcacaacatccctctttccggtctgtgcagctatcttgtcaagggcttttaccaacttcgcggtacagtctccacgtccgtttggcttaatcccgaaatcattcatatcaaaaaccgtctgtgccatgcagcacaaacccatcgccagcgcaaaagccgcaaaccatattctcctcatatcatcataaataaatgtttccacaaaattacaaaaaatcagctactattacgattataacactaaaaagggcgactcccgccgccctgatgttttcacaacggaataatccttattgtgaattgctcattttttgtcttgcaaagataatatgcaaaattgtataatccaaacagaatttatatttttgcttttaaaattaaaaaataaatatatctaacccatgaaacagattttaggtcttgacctaggtcatacaagtattggctggagtgtcgtaaaagagaatgagaatccagctgagacatcatatattcttggcgcaggcgtcagaagagtcccactgtctgtagatgaaaccaaaaatttcactgaaggcaaaagtataactacaaatgctgaacgacgccaaaaacattctgcgcgcttaaataatcacaggtataaattaaggaggcgtgctttaaaagatgttcttttggagttaggcttcatcaacgaaaatactgtatttgccgagacaggaccaaactctacgcattcagcaatcgctttacgcgccaaagcggcaaccgaagaaattacattggaagagctgggcaaggtgctgatgatgctcaataaaaagagaggctacaaaagcacgcgcaagttgaatgaagatgtcggcaatggatatatcgatgcccttggaattgcaacaatgctcaaaacccggaatattactccgggagaatattcccttgagctttatgagaatggtaaaaaatcaattcctgaattctataaatctgatttgctcgaagaattagaacggatatgctctgtgcagcacagtttcaacccgctgattcctgaaaacatcgcaagcatcatcaagggcaagaacgaatcccagacatgggcgatcttggcttctgctcttaaccttaaaggagtaaaacggtcaccttcaagaggattggataagaaaatagaagaatgccgatggagagttacggctttgacctcacctgtcgaattggagcaatttgccactattgtgtctaaattaaatgccgcggcatcctccacaagtggatttctcagtgatttaagtgagcgcagcaaggaattgctcctttactctgaaacaatcggacagtacaaaatgcggatactgtcaggcaatccgcactactcctttaaaaacatatcgttttatcggcaggattatgccgcagaatttaataccatctggaatacccaggctaaattccatccggaactgacagatgaaataaaagctaagatcaaagacaccattatattttaccagagaccgcttaaatcccagaaatccaaagtcgcatattgcgaattggaatccggaaccatgttagccaacggggacggaaaaatgcgattggttaaagcaggaccaaaagttgcgccaatatcctccccatttttccaacagttcaggatttggcagacccttaacaatctcaggatagacaatcagcctctgtcacttgaagaaaagcagaaacttgctgacaatcttgagttctgtgacaaattatccgcaaaagagatctgcaacattctgctgcttaaaggcaaaaataacaaactgaattttaaagaaatcgaaggcaatcacacctccgcggcaattttaagggcttgtgaaaaaattgcagaaatctcaggtcactcacttgatggaatttctacatatccatcattgagggcaaaagctatagctgaaattatagaagcgctgggcataaacaaagacatcctttacttcaacccgttactgccagatgatgaaatggaaacgcatcctgcataccgtatatggcaccttctttattcggcagaggcggatgattccagaagcggaaatgagaaactcaagaaaacactatgccgtttgtttaactttaataacgacactgtagttcccatttctgccattaccttttattcagattatgcatccgtaagcgttcgtgctataagaaagctattaccataccttatgcaaggcaagatgtatagcgaggcttgtgaagctgccgggctaaaccattcaaagcgttcacttgaccgcgaggctattgacagcaaggtatatgctgatcaccttgactgcgttaagaaaagctctttgagaagccctgttgtagaaaaaatcctcaaccagatgatcaatgttgtcaatgctcttattgaacaattcggcacattcgatgaaatacgtgtggagctggcaagagaattgaagaaatcggcaaaagagcgcgagaccatgactaaagacattaaaggtcgtgagaaagaaaatgccgcaatatgcaatatattgcaaagcgctccattcaatattgcccatcctacccgcaatgacatcatcagataccgcttgtataaggaattggagccaaatggctacaaaactttgtactctaactcatacatacctaaggaagaactctttacaaacaaattcaatgttgagcacattatacccaaatcacttctttttgatgactcattcgccaataaaaccatagaaacagctcaagcgaatttagacaaaggaaacatgaccgcctacgactatgttttaacaacctacggcgaggcagggattgaaagatataacgcaactattgacgaacttgtcaaaaaaggagtcctttcaaagaaaaaagaaaaaaatcttaaatgccccgctggtgagattccatcaaatttcctcaaccgcgatctggcgctaactcaatatatttccaggaaggctattgaactgcttgaggaaatttcacctaaagtaaccgctactaccggagcggtcactgacaagctgcgtcaggactgggggttagttgatgtaatgaaagagcttaactgggataaatacaataagctcgggcttacatcatcatatacggaccataatggcaacacaataaaacagataaatgactggactaaacgaaacgacaaccgtcaccatgccatggatgcaattactattgcattcacccgccctgaatacataaactacctcaataacctcaatgcgagaagtgataaatcaggactcatctacagcatacagcaaaaatatatgcatagggacaaaaatggcaatctgaaattcactcctcctatgcctgcagataagatgagagcggaggttaaggacaaactcagctctgtgcttgtctccaccaaagcaaaaaataaggttgttactgctaatactgcaacgacaaagtcatctacaggagaaaagaaaaataaatacctcaccccgagaacacaacttcataacgaaaccatatactcccgttctttctattataagacttctgaagccaaggtcgatggaagaatgaatgctgaaatggttgccaaagtagcgtccaggctttaccgtgatgcacttgaagcaaggttaaaacagttcaacggcgatgctaagaaagcatttacaggaaaaaacagcttgaaaaataatcctctgttcactgatggctcccacactcagcaagtgcctgaaaaagtcaaaatagtggagattgagcccaggtacaccgtgcgtgtagctgtttcagaagaccttaaccttgaaaaagtcattgataaacgtgtaaagcgcattcttgaggagagggttgcccaatatggagggaacaagaaagaggcatttgcaaatcttgacacgaatcccatatatctcaataaggaaaaaggaattgtcatcaagaaagttaaaatcgatgctggagttaaaaatgtagtggcactgcatgatgcccacaatcatttaggaaataagttaatcacgccggacggctcccctgttcctgctgattttgttgccacatccggaaaccaccatgttgcactgttccttactccggaaggcaaagtggaagaagttgttgtatcatactttgaagctgttgcaagggcaatttcaaaaccacagatcccggtgatagacagggatttcaacagcgaagaaggatggcagttccttatgacactgaaaaagaatgagtactttgttttcccaggatatgaaaactctgaatcaggtgctcaggtcatgacttttaaccctaaagaaatcgacctgcttgatccggcaaactttgcgcggattagcccatatttattcagagcacaaaaactttcatctcattattacgtattccgtcatcacctggagacaaatgtagaagataccaaagcacttgccggaatatcatggaagagactttgtacaccagcccttatgatggaagcagtaaaagtgcgcgtagaccatcttggaaaaatagtaaaagtgggagagtagcaatgattaaacgtgtcatttcattcagcaatccggcatatctttcgcttgataatgcgcgaataagcgtaaggaaacctgaggaagataagccatttgccatgctgccggttgaggacataggcgttgttgtcattgaccatccgcgcataacaataacagcagcactgctcaattcgcttttgatcaacaatgtagcggttataacctgcacccagaatcatctgcctattgggatgcagcttccgcttgacggcaacaccctgcaaagcgaaaggtataagtttcagattgatgcctccttgccgttaaagaaacaattatggcaacaaaccgtgcaaatcaaaatacacaaccaggcggcagtgcttcaatcccatagaggcattgaggtaggcaacatgattgcatggagcaaatctgtaaagagcggagaccctgaaaatttggaagcaagggcggctgtgtattactggaaatacctctatcccgagttcccgcatttttctcgtaaacctgacggggaatcgccgaaccatttgctcaattatggatatgccatagtgcgggcgcttgtggcaagggcacttgtggcaagcggattacttccgacattaggcatacatcatcgcaaccgatataacgcatactgtcttgcggatgatattatggaaccattccgaccgtatgtcgattcggctgtagttgatattgttaagaaatataacggaataaaaccattaaaacttgaagacaagggtatcaagcgagatttgctctccatccctgtcatggacaccattgttgatgggaaaaaccgaccactgatgaatgcggtggaagttgcggcagcatcactctcacaatgcttccaaggcactcgaaaaaaaattgtttatcccaccatacctttagcctgaaacacaatgcatggattctaaccgatttagccaatatagggttatgtgggtgatggttttcttcgacttgccaaccgataccaaattacagcgcaaggcagccgcgaaattcaggaagaatattcttgctgacggatttacaatgtttcaattctccatatatatacgtcattgtccaagcaaggagaatgcagaagtccatatcaagcgtgtaaaaatgatattgccaagggaagggaaagttggaattatgtgtgttactgataaacagtttggatgcatggaactattttatggcgcttccgcaaaaacgttacccatgggagtccaacaactggaattgttttgaattgggaaaaagccatgtaaacaaaaaaatccggtgtgtatcaccggattttattttctccaaatctcgtccacaataacctaacagtcagcaaaatatccacatcctgttgtgattagtggaacaaagttacaaaaaatgaaagcaattcacaacaatagcattgtgcaagtgcgagggcaattcgttgtgattagtggaacaaagttacaaaaaatgaaagcaattcacaacagtaaatatggctatctctctgtggaaatggttgtgattagtggaacaaannnnnnnnnnnnnnnnnnnnnnnnnnnnnnnnnnnnnnnnnnnnnnnnnnnnnnnnnnnnnnnnnnnnnnnnnnnnnnnnnnnnnnnnnnnnnnnnnnnnnnnnnnnnnnnnnnnnnnnnnnnnnnnnnnnnnnnnnnnnnnnnnnnnnnnnaatgaaagcaattcacaacaattcgtgccagctctgcattacaagccttgttgtgattagtggaacaaagttacaaaaaatgaaagcaattcacaactataattcaatgctattatgtaacccaatggttgtgattagtggaacaaagttacaaaaaatgaaagcaattcacaacattttgttctacatattttttacgataccagttgtgattagtggaacaaagttacaaaaaatgaaagcaattcacaactcctttttaattatattggtagccgtgagtgttgtgattagtggaacaaagttacaaaaaatgaaagcaattcacaacatcgcttagagtagccccagcttccgataagttgtgattagtggaacaa

SEQ ID NO: 4425 - DNA, 8743 bp, synthetic construct
  misc_feature 1..8743: note = Synthetic
  source 1..8743: mol_type = other DNA
ccgcggctccccgtgatgatccagaagaaagtcttgtccatggcacccgtatggagtcagtcgaggagattcaggaactggctcgcttgcgggccaagtctaccagcaaggacagcgaaaccctggccgacaccgagcgttaccggcccacacgcagaccgcctgtgctcatgctgtgcgttctcgatgacggctccgcggacgaaggggagtggcaccgcatccgcaccgggaagttcacgatcggccgaacccagggcgacctgatcatcccgcatgacgacatgatgtccagcaaacatgcggagctgagccgacagtcggagaagggcgttccccgctgggtgaggatcagggctgctaagagcttctttttcgcttcgctgtccggcccagcacagaggcggctcgacgcccgggattgatcgtgattggaaagcacatggcagggccaggcggtcggggcgaggaccaaataccaattgttcagcaccgaatagaggtcgccggcggtcagcttcgtatatatggtagaaaaatcaaaggctaagtgcaacagctcccggccatcgccgatataggtcgccgccaggtctggtgcatggactccctcatcggggtagacctctcccacaagcatggtatctccggtactacctgcataggaatccatgagatcccggatggcgcggataatgtcgtaggtttccctctggttccggtcatattgatggtgctgcaggtcatgccggcgagggtaggtcattctgaaccgataggggttattgcggaattgggcatccttaaccaggtaattgatgacatcgagcctgaagcccttcacacccaggtcgagccagaatcgcagttcttcgagcattgccttttgtactgcggggtttcgccagttcaggtccggctgttcctcggtaaagaggtgcaggtaatactggccagttttttcgtcccaggtccaggcgtggccaccgaaggcggccatccagttgttgggatagcgccgcccaaagagccccctgcggccatcctgccagatataccagtcccgtttggggcttccccggctgttccgggattcgacaaaccagggatggaggtgggatgtatggttcagtaccatatccataataatagtaatgccccgctgatccgcttctcgtaccagggtacgaaagccctccagagatccaaagaccgtgtctatatcatggtagttggtaatatcatagccaaaatcaaaaagcggcgagggataaatgggagagagccagattccccggacgcctaggtctttaaggtaatccagctttctgcgaatgccctccaggtcgcccacgccgtcaccattggtatctaaaaaactgcggggatagatctgataaataggtccgatcttccaccagggaagactctgcggaagactctgcaagattgatgtcatgacgagctcctcatgcagcactgaatgcaggtgtgctgccaaaattgtggatgcaaagggctgacttgtcaacgtgcaacgagacgagaagcccttgcaggtgacataaacgtaagactatagtacaactgctgtatggacaagaagcggcttaccacaattctcacccttttagttttcggatcccttgtagtttcatcaatctatgttattgtccggatgattatggtctctgtaggtattcccgttcctggggaccggccggaaagtgactatgtgttgatgttattacaatgtctgctggggattttcatgatgctattgccgggcatcctggccaggcatttgagcattcaggtgcctcactttatgcatatcgcctttatcgtgtttttgtactgtgccatctaccttggtgaagtccgggatttttataatctggtgccaaattgggatacggtgcttcatacgtttagcggcggtatgcttggtgccctggggttttcgtttgtggtgatactgaaccggtcggatcgggtgccggttaatttaagtcccctttttgttgccctttttgcgttttgttttgccctgaccctcggcgtcttttgggaattttatgaatttacctttgatggccttctgcacctgaatatgcaaaagaccatgctccctgacggcaccccccttctggggcatgcagcggtggcggataccatgaaggacctctttgtagacgccctgggtgcctttatcatttccgtcatcggctatatttcactgaaacaccaaaagggctgggttgaacgcatacaggtccgggtgaaacgggaggaataaaaaaggagggcgaaccctcccttttttgcactctcggagtgccattttgcggctcacccttgcgggggccttgttagcatgccgaccattttttctagtaaactgtaggacatatgctataatggttagtaccatttgtcaatattcggaggttaaaaaatgaagtggagattagctttggatttgggaaccaattcaatagggtgggctgcgctcaaacttaatcatgaggattcggaatccagggtttctgaaatcattgacatgggggtacgaatattttccgatagtagaagggcgaaggacgggacgcccctcaatgaagaacgacgcatgtgccgacagatgcgccgccagaaggaacgacggatccggcgcaaacgggccatgcgaaccttttgtgtcgcccacgggctccttccttcagatccggaggaacgaaaaaagattgcccagttaaatccctatcaacttcgcacagaagcccttgagcggccccttgctccccatgagctgggaaggatccttatgcagcttgcagggcggcgggggtttaaatcaagccgaaaggaatctgtaaataccgatagcgaggtaaccggcatgaaagccggggttgaacgtctttccaaaatccttggagaaaaaaccctcggccagtggctttatgaacaacaagctaagggcaagccggtacgttttagagctaaacatgaaggtgctaaaattatctacgatttgtatccttcaagggaaatgtatgaaaaggagttttctgccatacgggcaaaacaggctcccctattccccgaccttaactgggatcgggcccactggatcatcttctttcagcgtcccttaaaacggcctgaacggggtaaatgtcagttttatacaaatgaagaccgggcatacaaagcccagccatcggcccatcggttccggattgcccaggatgtgatgaacctctgttattatgatgagaacaatagacgtattgaaatctcacaagagggtaagcaacgattactccgtgaattggaccaggtgaaaaacctcagctttaaaaaaattcgccagttgcttgatttaagtgctactattcagtttaaccttgaaagcgagcgaagagataaattacgtgggaatgatatctccgttgattttagaaaggatacctattttggggaacagtgggaccggctttcctgggaagaacaggatgagattattgaacagcttattaccgaagaagatgaacataaattaaaggaattattgcacgaatataatttaagcgaaaccaatattgcaactattctcggttaccagtttccgacgggtactaccatgctttcggcccattttatgcgggattgtactcgaatcatgcacgaagggctgctgccctaccatgaggcggtaactgcgttgggcctacaccactcagaagaaacccaacccccactgcatcgacgactaccctattatggaaccatccttaccgccctcgtacaaaacgcccatggagcagtcccgccggatagacagttccctaataaacaggctgagatagaatatatttacggtaaaattgctaatcctacggttcatgtggctttaaatcaggtacggaaactggtaaatgccctcgtggatcgatatggccgtcctcacgaaatttgtatggaggtggctcgggaattaaaattaccgaaatacaagaaacaggaattcgaaaagaaacaaaccattaatcaaaaaaacaacgaccgggcccgaagggaactccaactgttaagacttctcgttcccagtaaggaagatattaaaaagtacctcctctgggaagaactgggatctgatagtgtagcccgcgcttgtccctactgtggaagacccatatctgcgagccagttaataagcaacgagatagaaattgagcacatccttccctactcaaagaccttactgaacactcgggacaaccttacggtagcccatcgggaatgtaaccaggtaaagggccaaaggacaccctacgaagccttttcgtccaatcctgaggggtacaattggcaggacattgtagccagggcccaaagactcccggccaacaagcgtatcaaatttgcccccgatgctttacagaattatttggatgaaaatcagtttctccaaaaacagctttcggataatgcgtatatttcccgctccacaaaacagtatctggccgctatttgtgataaaaaacgtatctgggtaagcacggggcggcttaccgctatgctccggggcttttggggtctcaatactctattgaacaaagaccatgatacttggtttaaaaatcggtttgaccatcggcaccatgcactggatgcacttaccatcggtctctgtgatcggggcctgattaataggattgcccgtttaaacagtcaggggaaatatgcccagatcgtcgttcctgaattcccctttgaaagaagcaaagtagcagaaaaattaaagaaactggtggtttcgccaaaaggtgaccatggcaaggaaggtaagatattcaaagagaccgccatgggttgtattaaaaaaataaggaaaattaatccggaagagttagaagaaaccatgattaatgacattatacctccagctattcggggaaaggtacaagaactggtcaaaagcaggacctttagagccataaaatcagaacttccccaaaaattcacccatttttatattgcagaaaaaatctgggttactacctgcgatgttacagccctgagtcaaagtgatatagaagaaggccgagtaatcgatccccacattagagcggctcttagggaattttatgaaaaaaataaagaggtctgtactacgaatactgaacttgccaaaaaactaaaagaattttctcaaatttataatatattagaaaggattgctaataatatttctaattatattaatgatctttactatgaaatttcttcaaaaacttcagaaatttttgaaatcaataaggcacttgtgcttttaaataaatgtaaagatgtcgaaagccttattgataaatctatgaaatttcttaaaacagatttaggattgaatacgattgatataggtgaatgtaatgagattttaaaaaactgtaatttttgtaaattgaaaaaaataactgtgagagttgatgataaagattatggtttttgcgtagatctttctgataataaagaagaatctaaaaaagagatggttgatatatttcaagagttatttgcgattaatatgtcacgtattataaatacacttaaaataagagagacaaaccttgagtatgtccatctttctgaaattttaatgagtttgttggctcaaaaaaacgtcaatgagatttttaacttaatacttgaaaaagctaaggatatttgtaaggcagatgcatcttatattggtgtatatgataaatcaactggaaatatagtcttgaagttttttatgaatataaatactgatgagtttaaaagtcttaaattcaataaaaatcagggattgggtgggctcgttataagagagagaagaggaatttttattcaaaattattttacagatcacagaattgattcaccatttaaagacattgttaaaaaagaaggaattatctcaactattgcggttcctattttttaccaagatgagatttatggaatactttatgttggttatagaactatgaaaaaagatattacatatgagttatctttcttgcaaaaaatgtcaactgcagcagctattgctatagaaagagaaaacaatattaatgaacttaaaaataaagaattggaattaagaaaagcctatgaagagcttgtagaaaggcgaaaagaaataaatgagcttttgaaaggctacaaagatgctaatttggagttagaaagaagcaatagagagttagtggaacagtatgagattgttaagaagtcttatgaagagttaaatagtttaaataaagccaaagatttatttttaggcattctttcacatgagctaaaaacacctattactattgtaaaaggatatatagaaacattattatctaaggatttctatttagataataaagtaaaatctgctcttacaactgcccttaaatctgtaaataacctctcagaaaaggtcgatgatttgcttgattatatgaggcttgagactaaaaaattaaagttatactttaaagagatatcttttagggagatttttcgagacattgctaatgagctttatcctttccttgaagagagaaaacaaaagataatcattaaagattcagattttaagtttaagggagatgtaaagtggttaaaaaaggcttttgcttcagtaattaataatagtataaaattttctcccgatggaaaaaacatttatatagattttgaagttgttgaaagggaaaaactcatagttccttattatgtcaaagaaaaaccagttctctctaataaatatttgatcatatctataagagacgagggagttggtattccagaaagtgaaattaataaaattttcgatagcttttatgagttaggagatattagaactcattctactggtaagtataagtttatggctaaaggcgttggtcttggtttatcttttactaagcagataatttcaatgcacaacggtattgtatatgctgaatcggatggttttgacgtagaaaagtgtcctggaactataattaaaatagttttaccaatggacgaagaaaaaattgtcgaagataaaaagaaagaatctattttaataatagacagtgactatgatttttcaagatttttagagttatttttatctcagaaatatagtgtctatctttttgatgatggaggtgtaggctatctcaaaattttagagattaaacctaaacttgttatgattaatgtatctttaaagaattatgatggatatgaagtatgcagtataatcaaggaagataaaaatattaaagatattccagtaattttatacggtaccggtcctgagagttttgatgagataagggctcaaaaagttaaagcaaatatgattttttatccaatttttgatacagaaaatcttttgagagttgttgaatattatatgaaaaggtaggcaataggcgatgggtaataggttaaaactcaatagagtagagagttaagagttaaagaattaagtaaatgtagaagttattgagaaatcgtaaatgaaaaagatgacagataacctaatagaaacgataaaaaaaagatttaacagaccattccattataaagaattagcaaaaattcttaaaattaaaggcaaagaaaaaataaatcttttaaattatttattaaagcttgcaaaccaagatgagcttgttaaattaaaagaaggttattttgcattaaaaggaaccataaaagagttattgtgcagagttgcctgccacagagatggctatggttttgctataccgcttgaagaaagagaagaagatatttttttacctcctcctcaacttatggatgtatatgatggagatattgtttgggttaggaaaggaaaaagtagagggaaaaaaagtgaaggggaaattataagaattcaggaaagaggagtaaaaaaaatagttggtaaggttgaaaagcataaaggttatttagttgttaaaccaaatgataaaagattcttctggccattaataataaaagatgaaaaagagaaaaattttgggattggtgattttgtagtatctaaaataatcaagtaccccgaaagaggattgggtgaaggtgtaatagaagaaattctttcaggtgatagctatgagcttgaacttaaaaatattttagttaaattaaacattagcgaaaaatatcctgaaattgcagaaaaaaatgcaataagaatagccaaaaaaggtatagaaaataatattattgatagaaaagatttaagaagcttgaattttgttacgatagatggagagaaagcaaaagattttgatgacgcggtatttcttaaaaaggagaaaaatgggtatagactttatgttgctattgcagatgtaagttgtttcgtaaaaaaaggaactgagttagataaagaggcactttatagaggaaatagttattattttccagatagagcaattccgatgttaccttcaatcctttctgacaacctttgtagtttaagacctaatgaagataaacttaccttagtagcagaaatcttttacgataaatatggtgtaagaaaatactatgaattttatcctgcaattattaaaagcaagcatagattaacctatgaaattgttgatgaagttttaaagggcaatgtttcaatagataaaaagactaacgatatgcttataaatatgagagagttaactggtatttt

SEQ ID NO: 4426 - DNA, 7894 bp, synthetic construct
  source 1..7894: mol_type = other DNA
  misc_feature 1..7894: note = Synthetic
gtgaccaggtccgcgccggtcaggtccgcgccggtcaggttcgcgttggtcaggttcgcgttggtcaggtccgatgccgtcaggtccgcgccgctcaggttcgcgccggacaggttcgcgccggacaggttcgcgtagatgtaatcagtggccagaatcgcgctgtccaggtccgcgccggacaggtccgcgccgcccaggttcgcgccgggagcgaacactccgggttctaggttcggccccgaatacgtgtggtcgccgctaagcggatattcgtacacaatcgggtcatgaaccgtcccgaaaatatccacatacgacgaagcctgcgccccgcccgccatcagaaccaatgccgctgccagaacgtacttccgcataacgatccccttcccgagggttgagtcagtaaagacccattctctcatgcacgggcgggccaggggaaggcgcgggatttattgaatcgcatcagaaaaagcccagaacggccctagggcctcctgaagccctgggctggggccgagcacgaaactgcgcccacaagatttcgggcccggcgccgggcgtaacctctgccttttcgttcgcgatcggcgagcccgttctcgataacccgaatcgccttgcggcgaggaaggagagtgatttacagcgattcgaaagagagcaagctcacgcgccagaagcgtcccactaaagagggatcggcagaaatgaaaaacgcgctgtacccgtcggtacagcgcgttttcatgagattttttctcaagaatccagggattaggttgcggcaagccgcattgccttcggttcctggaaaccttggtatgaaaagatcccaagctctgagccgttacactcaactcccgttttacaacatcttgcgccctctccgcaagcgctaatctcggacgtctggacttggacagccaaggaaggactcggaccgagcggacaacgagcggagggattggcgatgcgcgattacgtactcggactcgatctgggcacggcttccattggctgggcgatcatcgacctcgaactcgatgacgacggcgaaatcggcagtgagattggactccgggccgccggcgtccggatctttcccgagggcgtcaatcgcggtccgaagggcgccgagaagcccaagaacgtcgagcgccgaaccgcacgaggcgcccgccgcaatcgctaccgctttcatcagcgccgccgcaacctggcaagaatcctcgtcgcggctggcctgcttccagaatccgaggctgatcgccaaaaactctggcgcctcgatccctacgtcctccgggcgcgcggccttgatgaagacctctctgcgcacgagtttgggcgcgccctcttccatctcaatcaacgccggggattcaagagcaaccgcaagtcgggtgaagccaatgctaacaagggaatgctcaaggagatcagcgatcttgcggacgccatcaaggaaagtaaagcgcgaacgcttggcgagtatctgaatgagatcgccgggaccgacagaagttgtctggtccggggcgaaactcatttgcgcaaacggcacacgctccgggccatgtaccaggacgagttcgacctcctctgggggcgccaagtcaaggcgcaccccgaaacgttgaccgacgaactgcggcaacgagtcgctgacgagatcattttctttcagcgcccgctccgcctgcaaacacatctcattggacaatgcgaacacgaaccgcaggagaagcgaggacccaaatcccactgggtctcgcagcagtacagagtgctttgcgacgtcgccaacctcatgatccaacaggccaacggacacgaaagaaaactctctgagcacgagcgcgcgcaagcaactcagcttctctcggccaacgacaagcggacgttcaaacaactccacaaggccctcggcctcgatcctgatgcccgcttcaatcttgagcaaggcggacgcacgtcaatcggcggaaactcggccgaggccgccctgttgaacggcattggcgagaagcaatggctttccttaacagccgaagcgcaagcccatctgcgcgaactcctgaccgaatgcgaagacgaagacgaaatgcgctcgaacttggccgaattcgaattgaagccggacgccgaaatcaagctcatcgcctatgcggggcccgatggctacggccacctctccctcaaggccatgcggaacctgatcccccatctggaggcgggactcaatctgcacgaagccaagaaagcctgcgactacgtgcaaatcccggtggttcctgtcgagactcgactccccgccccgccaaatatccggaacccagtcgtccagtcggcgctcgtcgaggtccgaaaggtcgtcaacgaattaatccgcatccacggactcccgtatcgcatcgtggtcgaactcgcgcgagaaatgaagggctccgtagccgagcgcgaagagaaatctattgagatgcacaagcgccaggtggagcgagaggaagtcgcgaggaaacttgaagaagaagtcggtatccccgtgccccgccgcgcggatatcgagaagtatcgcctctgggaagatcaggagggcatctgcccttacagcggtcgggccatctcccaaggacaactcttcagcagcgacatcgaggtcgaccacattctcccccgctggcgaagcctcgacgactcgtacctgaacaaggtcgtcgcctttacccaatcgaatcgggaaaaggcagaccgcacgccccgggaatggcgcgaaggcttgggcgactacgacggcatgatcgaacgcatttcaaaaatgaaaggaatgcctttctccaagcgtagaaaatttacccagaaggaaatcgacctcgatagctttgtcgcccggcaactcaacgacacgcgctacctcagcgttgctgctcgcgactacctcggatgcctcttcgaacccgaagaccaggcttcccgagtccgggtcgggcgggggcaattgacggccgaactgaggcgccgctggggactcaactcactgctcacgcccttctccgtccaggagggcgaggaacccccgaagtaccggggagaccatcgccatcacgccatcgatgcgatcgtcgtcgccctctcgaggcctgggcatctcaagcggcttgcggcctaccacaagcagaaaaacaggatgggcacgagagccccggcattcgaggaaccctgggaagagtttcggtcgagcgtcgcctcggtcatccaactcatcctcgtctctcatcggcctcggagaaggctcagaggcccgctgcatgagggctttttctatggcccgagcgaaacacaaggcgagtacttctaccgcaagtctgtctcggaacttacggcagccatgatccccaagattcgtgacaaggccgtgcgcgaagcggttgaggcgcgcctctccgagtttggctggcaagaaggcaaggccatcccaaagggcagcctagacgacccggaaaaccccgtacgcatgctcaagggcaatgtcccgatccttcgcgtgcggatcagaaagcagataggagatccggtcgagtttacacgcgagggagaccaaacccccttccgagccgcgatcagcgggaacaaccatcatgccgagtttcttgcccacactggagcggggagtaatgggatagctcgggtcgaagtagtcagcatgatagaaggcgcacgcagagctcgcagaggtcatgagccgatcattgggcggaagcatccagatgggcttcagaccgcctacgctctttctattggcgattcggtactcattcaacatccagcagcctcgcagtcgctgctgtgcgtcatcaagaacatgagtccaactcccagatttatcgacatctgcctccgagatgcccgtgatgcgcggcccgcaggcaagtcgaaggatctgtacaggatcgtctcgctcaagcgctggaatgagctaaacgtgcaaaaagttcaagtaagcccatgtggcctagtccatcgatccgggatttgacccctcccaacggatggaaaggacgcttctgaatcgcatcctacggactttccccatcagcgaacgggcgacacaatccggataaacgtgagtcaatgctgaaaagaactatcgaagtttccggctggggctatcaactgactagtcgaggacgccatcttcgccttgcaaaaggaggcacggaggtcggcgcggttcccttcgaagacctcggcattctcgtcctcgatacggttggagctacggtctcaacagcagctctggtcagcgcggccgaggaaggttgtgtgaccctactgtgcggagccgaccacctccccctagcgatcgtccaaccgctctcaggcaacgctctatctacccagagactcgccgctcaagtttcacttggccagccgttcaaatcggcgatgtgggcacagattgttcgatccaagatacgcgggcagagtcgagcgttgcctgcgaattcgccctcgcgaaagagactcgccgtactgtccaactcggttcgcgcggccgatcgaagtaacgctgaagcccaggccgcccgcctctactggaaagaggtcttttcaggctcgctcgaaagcttccgcagagaccccaggttttcgggcgtcaatgcactgctgaattatgggtacgccatcatgcgcgcttcaatggcacgagctctgtgtgcagctggccttcagcccgggctgggcttgcagcactccaatcggtcgaatccattctgcctcgcggatgatttcatggagcccttcaggccgctcgtcgatcttgcagtcttggaatcgctcaaggaaggacatacggaaatcaatggagacacgaagagaagcctccttcagaccctcgagaaggaagtcaaggtcggggcggaaagcggcccgtgttccgtagcaatgcagaagatcgctcatgcctacgcgaacctcgtgatccaggaaaacggagacgtcggcccgcggacgatcagcggccgccctcgacggccggcggcggcccaacgagccggaaagctggaccttccctggatggactagaaagtgcgactttcggagtaccgggcgatgtgggtcatggtcatgttcgatctcccagtcgggaccaaaaggcagcgaaaggtcgcggcccgattccggaaggacctcctcgaggacggcttctggatgctccaattctctgtctacgcgagaccctgcccaagccaggaaaacgcgcggacgcacttcctgagggtcaagcgctggcttccccccgctgggcaggtacgaatgatccagatcacagacaagcaattcgcacgaatggaactcttcaacgagagaaaacgggacccactcgaagccccgccagcccagcttcagatgttttcttgaccccgagaacagaagaaccctttgaattcagggccttccgcctcgattagggtaacggttcagagcttgggatcaatccacaactaccgaagagctggtcttggttgcgtacctagggtaacggttcagagcttgggatcaatccacaactaacgctggagtgtgacagcgggcactcatagggtaacggttcagagcttgggatcaatccacaacgcatggctgcatccgaatacgagaagatcaagggtaacggttcagagcttgggatcaatccacaacgcgtactgaacgaggaacgtcttcgtgcctagggtaacggttcagagcttgggatcaatccacaacacacggggggagccagtggcagcagcaactagggtaacggttcagagcttgggatcaatccacaaccaagcactcgtcgcccaagagctcgggcggagggtaacggttcagagcttgggatcaatccacaaccaccacgagtttgagccgaagaagcacatcagggtaacggttcagagcttgggatcaatccacaacactcagaccaattaacaacaagggataattagggtaacggttcagagcttgggatcaatccacaacttgtggggatagagcaatgagcaaaaccgaagggtaacggttcagagcttgggatcaatcgactttaccggccattccaaggcagtcaaaaactctgcttcattgtcagcccggccatcggggtcgctttaaaaatcagggctgcgctaggatggacgccgggacgggctcgtattggactccgatacccgccccggcgccggccggcctcccccaacctgcattttttttgcagcgcggagagactgggtttattcagggccgaactgcgctcaacgcgagcagcgcagttcggcccatgaaaactggcgcttcaacacgcccagctgcatcgcgctcaagaatccagccccccccgaagtgcagcgcgccaatcggttgcggccccggcatcggggcgcagttcggtccgcgctcggcgcctggccgacccggcggaccttggatcgatgcgcgatgacggggccaagcggagctgcgcgcccagcgccctgacgatctgcccgcagtccttggcgatccgcatgtcggcacttccggccttctttttgtctcgccggatttcgagcgaagcgcgccaagcggcgtggcaatactgggccagcagtcgcctgtcctgaggaccaaaaaagtcgctcggaagcgcttcgacgatttcgcgccagattgccgccgccccggcgggcaagtcggacggcgcctcgattcggccttcggccgcaattgttgttcgcgccatatatcccccccatgttgaacttatgttttcgaattggctgccgcccggtcccgggaagcgccccttgttcgctcccgcccccccccacggcctcggcagtcaggtcgcgggaagagcttgtgagcatggctttacgtttcgcgattcgtcgttccggaaaacgccgtgccctgccccttcggtcgggcgcgtatatatatttgcttacaggcatttcatgggtcacaagctcccatcctccactcgggggatgagcttgtgagcttgtgagtatgattttgcgcccaatgacaatttattcggggaagcgcgccgtccggaccccttcgatcggtcgtggatcgattttcgcattccggcgttcggtgggtcatacggcctcatcgtcttcttcgggcaagtagcgcgcccaggttccgacgaaatcgcttcgccgataagtcctcgggttgcccgccgaccggatgccaaagcccttgaggatctgcgctagaccgcgggcgctgagcccccggcctcggttccaatcggaccaaaggccctcctccagcttcagcaggctctcaagcagttcgcccgctggccaagcctcccggccaggctcgccgtccatgattcggcgggcatcgcccagcagctcggtcttgtggctcgcgtcgtcgttcttggagggcgaggactcggccgcggtcgcggtcgcgcgcatcagttcggccacctcgggaccgatgacttcgccaatgctcaacagcgggcgccatcggtcgagggcgcggttatagagcccctcgcatttcgcctcggctcgttcgaactcgcctgcgtggtccgatgcgaagcggataatctgccgcttccacgccagcagccccctcttctccgcggaaccgaaattctcgaggcggcgagcctcctcccgggttgccatcttcatctcgatccggagagagcggtcggccacggtcgctggcaggttcccgatcccgatgaggaccttggggcaaccggttcgaaagaccttctgcttgtggtcgtcgccttcgaccaggccaaccttcccgtccctgtggaagcccgaggtgaggacgccacgcaggcgctcgttgccct

SEQ ID NO: 4427 - DNA, 23636 bp, synthetic construct
  source 1..23636: mol_type = other DNA
  misc_feature 1..23636: note = Synthetic
caatatatttattgtcgcagctaaaataagcattaccataattcattattctttaatggtcgttcatttcctgccaaatatacatcttgtcagctactacttgtacataaagtttagatcccgagtttgatgcttttaagaaatatgctgatgataaatcagttatttctttcacattatactcttttggtacatctgagccaggatacatttgatcaatgatatttccttttttgagttttgttggtgtatctgtgttgagttcatacacacaataacgtgtttggacttttttgttgtgatagaaaagaaaacgatagtcttggatttcttcaatggaatagagttgtttattgacttgaggaagtttgattgagaagtctttttcaaatgtactaacagggatgttattcttgactgttgtgactggtgttgttccttgttgaattccaccaacaactgtggcaatgcacaatacgattactgctattacagcaacaatgacaatagtctttactttcttattcatttttcgttctccattcttatatagaattactgtatcaaaataacataataaacactataaggatgaactaagcaaacccaaaatcacaaaaacaaatactacccaagcatatattttctgctttcttgttccttcaaagagttttggttttccaaaaataaatgttatgtgctttccatatttacattcaaataatacaactactgcaataatggctgccacaacaacatgtgctttatcaaatgtaaaataagataatatatttgacacgaacatttagctcctttctcatattgattatagagataactcttctattttttcattccattgtctgaattgtcttttcaatgtttaaatttacaatactacccctattaggcgatacgaattgtggatgatttaatttttgaacaatgcttcctaaagtctcttgatagatttgaaatacttctaaatgtgttatgagttggatctttctatcttcactatacacacaaataatgtcattgaaatagaagcgatgaagcccttgatttgttttttaaggttaccccattattcatttccaagtatgttaggcaatctgccataatttgtgctagctcttcatttatcctctctttaacaataaacgcaaatacattcatcctaaaagcatctcgcatagattctcatattatcagttgcatcaagctcatgatagtatgctgttccatctatcaatgtactgcatagttttgatggtgtgttcatcttttcgctatcctaaaattgaaatgtaccttcgaattttgtcaaactcctactcaaaatcttcattaaaattgtcttaccagcaccattctttcctatcagaccatatatatttctccagcacaaatatgaagattgatattctctagtacttgttcggtattaaaagttttggacaaatgttcaacctttagcataatgtcattcatttgattcaccaatccttttgtttataaattgctgtggtttacttgtttattcagagaatctttattatccaaacaacaagtaacataagtatgaatataaaagtaatgactgactcaactttctcgctcatagtgagttttccgatatacgctgatacttcatctcttttcttatatgtcggcacggataatttcaatatccaatagaaaagcattgggcataagacgatgctcattgagactaatactgcttttatatcatttagaataattgccatcaaatttgcacatactacaaaggttaaaaaaatagctcttttccattttgctgacatgtaatgctcctccttgtacttacatgaatttattttaccaatacattgacatagacgtcaatacacgtcaacacactatatagtacgattacaatgactaatgtgggtgtctttatcacgctaatgaagttctctttaattgtataaaacgatcccttcttctccttgctttctattgcgtaatctacgcgctatatctatttcattttcatcggacatatcaacatctagaaaaacaatgtcataattttctttggaaaggctgttgattggttgaatgatgaaagatgatattcaatatgtctttcaaataggatgtttgatagcttttgatcaagtatttttaaaatacattttcatcatctactaacgcaaatttatacattgtttgaagctccaattatcaataaaaaaagtatattcagtaatatgatcgttcatattatgaatatacttttcaatatgcactatttttctgttggtttcatagctgggaagagaatgacttcacggattgtatcctggccagtcaacaacatgacaagtctatcaatacccatgcccataccacctgttggtggaagaccgtattcaagtgcttctacatagtctgtatccatttcgttagcttcatcgttaccaagttctttttctttgagctggttttcgaatctctcacgctgatcaatagggtcatttaattctgagaaggcattcgcatactcgttaccacaaatgaataattcaaatcttaatgtgaatcttggatcttcagggttcttctttgcgagtggtgagatttcaattggatgaccataaacaaatgttggttctacaaatgtttcttcacaatacttttcaaagaaggcattcacaatatgaccataggcgaagtgtggttctacttcgatttcatgttcttcagctaactttttagcatcttcaaagctcatatcagctgcaaagtcaatgccagtctgttccttgatagcttctaccatagaaattctcttatagcctggtgctaacgagaacttatgtcccttatattcgatatcatatgtgccattaacatccattgctgcctgggcaacgataccttctgttaagtccatcatgccttctaagtcagagaatgctttgtagacttcaatagaagtgaattcagggttatgtgtcttatccataccttcatttctaaactgtctaccgatttcataaacggcatccatgccaccaacaattaatctcttaagatttaattctgttgcgattcttaaatagaaatctttatctaaggcattgaagtgtgtgatgaatggttttgcggaagcaccacctagaatagagttcatcattggtgtttcaacttctgtatagcctaagttatctaagtaatgctggatggaacgaatgacttttggtcttgtgaaagcgactttacgtgcttcttcgttcatgattaagtctaggtatcttcttctgaatctttcttctgtatctgttaagccatggaatttttctggaagtggtcttaaagcttttgtgaggtgtgtgtactgttctacacggattgtaagctcacctgtgtctgtttccataagtacgccttctacaccgatgatgtcacctaagtcaccacgttttacgatttcataaacgtcttcaccgacaacatcttttcttacatataactggatctttccaaatttatcgttgatatccatgaaggcaaccttacctttacgacgtctcaacataatacgtccagctaattgtacatgaatatttttttcttctaattcttctttagtacagttaccatactgttctctaatatcttttgtattgtctttgacatcaaatgcctgtccgaatgggtcaatacccatgtctcttaattcttgcatcttctgtcttctaacttgctcttgctgagtgagtttttcttttgccataatattctccttttctccaatataaaaactctcatccaagggacgagagttaatcgtggtaccaccctaattcatcatatgactatgatctcattaaaccttaacgcggtcacacgttattttatcacttacgatccaaaatacagctcctagtctttattcatcttatgcagcattacttccttgcaccatccggaagctctctaaaatgtgacaataagactactcttctattcattgcctttgcgagtgttattatattcattttctcttgatattgtcaaggtttttgactatttatgatggcataatagacaagatcatgatatccatcttccaacatgatcccatcaattgctgttccttcatatttcatgccaattttctccattactcttcctgatgccacattctcttttgtataggatgcatagattctatgaacccccacttccttaaacatataatcaacaacagactttgccccttcgctgacaatgcctttgttccaccagcgtgaaccaatcgaatagcctatttcgcaacatgataaaaatggattgacattaaaacagccaattgaaccaatcacttcaccttcatattcaatcacccagccaaagaaataaggatcatcatatttctttaagtgttcatgaacaaaatcctcagtatcatccaaagtcttacaatcaaaccaggcaatatattcctgaacagcttgatcacagccatagttatcataatatggcttaatatcactttcaacaaaacgtcttaacaacaagcgttcagttttaattgcatgtgttccaacttctttcatcatatcttattcttctttcgtaaatagcgataaaagccaatacatattgctagctgtaagacaccacctgctggtgctgctaagcccattgggaataatgtcttaggataatagatggacgctagataagctcctggtacacgtaatgtaattattgaagcaacattatggataaaggatacaatcgaatatcctgaggcaacaaagaaaccactaaagcagaaatgcatactggcaatagcacaatcaaagacataggaatgcatataacctgttgcaagctgtacaacttgtgcatcatgagtaaataaagcaatcactggttcagagataaactggaaactgatagcaaagatcaaaccaatcgatgttgatatagccattgaggtaaagagtgtttttcttgccaatgccttcttgcctgcgccaatggcttgtgatgagattgtcgagactgtctgcatcattgttgatggtacgaggaagaggaatgaaataatcttttcaacaatacctactgctgcacttatttccacccctcgactattcgcaataatcgtaataatgagaaaagcaacctggataaaaccatcctgtaagcttacaggaatacctatcttaagaatagaggtgataatctctttttcaaacttcagtgaagagaatgagagttgaatgagtttctttgtcacaatcgcaagaatggctaccaatacactaaatgcctgagcaatgattgttgctagggctgcacctgatgcatgcatagaaagtgtgccaataaaataataatccaaggcaatattgacaacacatgccaccgcaataaaatacattgggctcttagaatcacccatgcctctaaagattgaagaaatgacattataggctataataaaaggtatccctataaaacatatctttaaataatttgatgtttcaacaatagcttcttttggtgtagacataatggttactattggtgatacaagaagtaataataatgctgtcaggatagctgcaataatcacaaagagtgtgatggtattgccaattgttttggaaacattttctttgtcatgggcaccaacataacggccaatcatcaccgcaccaccagtcgccacacctacgagcatcacagtgatcatatgcatgacttgtgatcctatagctacacccgaaataacacttgccccatcgaactgaccaacaataaataaatcagccatgccatagagtgtttgtagaaaataagaaagcaggaatggtaatgaaaaaacaacaatattcttcaacaaactgccttttgtaagatctctttgcataattattcccccatatagggattattatatggaaaaatgtgaaaatgaaaagcctgttttccaacagactttcataaaaatttctaaatatttcctagatgaacataatgcagatactttaaagaaatggactgcatttgttttagaagaggaatgcttgttggttcttgatttaaaagatgatatcttggaaagaaacgggtgatatgaagggggatattgttatcaatatccgctagccagcttgcttctttttccatatcttcaagagcatcattgaaagtaggaacaatgagactagttatttcaacatgtgctttttgatgggcatggatgatattggttttgacaagttctagattgccatttaagcgatcatagatatcctgactaaagccttttaaatcaatattgaaagcatcagtataatcaagaagatcatcaagatactttgttgtaatagtgccattcgtcacaagaacagttttaagtccagcctcttttgccttcatgaaagtatctttgatatattcataggcaatgagtggttcattgtatgtgaaggctataccgatattaccttgtctgactagcttaactgcatatccaacaagttcctctggactcatctgtccccttacactgctgccattatcgtaagaaatctcataattctgacagaaaggacatttgagattacagccataacttcctactgaaagaatatagctgcctggatagaagtgatagaggggtttcttttcgataggatctaaggcaagtgaagtgatttggccatagtttttacttacaatctgtcctgctttattttctcgtgcaaggcataatcctgtttgtccttcctgtaagtcacaatgatgaaaacatagatcacatttcacgatatcaccttcttaataatgtcttacaacctcaaacttaaacaattcaatatcttcatcatcataaatacctgcttttctcgcagctatttcaatctgttctgatacagtatcaacaccatctagtctaggcagcaacaagcctcttttctcatgatgtttgacaatgactccatatttttgtggatcaagttcttcataagtagctggtgtaacttcacctagaatatcaacgctgtaaataagttttggtagttcgatattgatgatgggtgagaagcggggatctcttgtacttgccgagatggcattattgcgtatttccagggcaatattatctgttgttggctggaatgtgccaatacagccccttagctgaccatccttcttaatagaaacaaagacgcctgctcgatttttaagcatagattctggtaactttgatggaagtgctggtacagtcttgttcatcacatagctttctacaacatttcttgcccatcttacatagggatcttctgcttttcttatcgttaatatcttctcctcttcatattttttcacctgttcaccaaaattacgtgttggatctttttctccaatctcaaatccaacaacaccatagccaacaccaaaaggtccttcataagaatagaatgttggtttaacagaaaggcaatctaaggcacctgccatgataataaatgaacgcaaaccacattctgctgctctttcacaaaaaccataatccatggtcattaaatctaggaaatttccatgacttaatgcctctatcactttatgatcaaattctggtccctcttgtacatagccatatggaccactctctttaagtttgtgcgataaatctcctgatgcaataataacaactttacgatttagctcatctgctgtttttcgaataagctgacctagatgataatgatcttgatagtttaatcctgataatcccatacgtacaactttatagtcagtcatatattgattaagaaaatagagtggaatcatagttccatgatcaagacgtttcgttctttgacctaatgttccagcagggacaccactattttctgtatgatgacataatgcatcaacaaactcttcatcataatcacatgtgatcttaacttgttttgccctaaactgaccaaaatcaccttcggcatgagcaccttctgagatattgaagtaatccatataagaaatattatgcgggcttatgataatgatggtttcgggatgaaagcttgcaactttcttcatgacttcatgataactatgaatggtatcttggattttcttttcctccccttttcctacttctggaataatgagtgggggatggggtacacaacatgtatagagtattgacatctctatcgcctccttatatctattatagttgtttttattaattcttgaatgtttcctaaaaatctcttaaaaaatcatatataatgatgatatcggagggaatgtctttatgaagaataaatataaaatgataattgttggcttattagctgtccttgttttaggcattgggattgctttgacagcttctaagcaaacaaagtcacaacagcctaaagtttctacaacaacaatcaccaataacactgcaaaaggggaagcgagtgaagcagaaaaagaagctttaaagtcatcagaacaagctctctctgaagctacaaagaaagttgttgatagtgccaacaaaaaagaagagccacaaacaaatgaaccacaacaaaaacaagaagcacaaaagccacagcaggctcagcaaacacaacaaacagctacacctgcaccagttaaacaagctgtcccaacaaacaataaggtcgtatgtattgatgcaggacatcaacgctacggcaatagcgcaaaggaacctatcggtcccggtgctagtcagacaaaagcaaaggtaacaacaggagcaactggtattcgctcacatcgtacagaatcacaaattaacttagaaatagcacttaaactacaacgtatccttcaatcacgtggatatactgttgttatgtgtcgtacaagtcaggatgttaatatttctaataaagaacgtgctgatattgcgaacaaagctcatgctggagcattcattcgtttacattgtgattcctcaaataatcaatctgtcaatggtgttactggtttagcacctgcatcaggtaatccttatctatcacctagtattgtctcatcatcacaatctcttacaagagctgttgtcaatggcttatgttcagcaactggtgctaaaaaccgtggcttaagccttgtcaacaacatgtcaggcattaactggacacaagtaccagtcgcactcgtggaaatgggctttatctcaaacccaaatgaagatgccaacctgacaaatgatgcctatcaagaaaaagtcgctaacggcattgcgaacggtattgcctcattcttacactaagccttaaacctaatcaaatagaaaaccagataaacattaggaatcattgacatcatcgaagaaatagtttacattatgtatgcacacaccagggcaaattgaaaggacaagagaggtgactcttgtcctttctagttttcgtttactagaaccagaagtccgctatagcttttggttctttttctttttatgatgaacaataatatctttaattaccaattaatgattcttacattagaaatagtagaatgactttgttcaacttattcaattgaaaattgaaataaagcaattttactactctccatatgattaataaggtctcccatttattattctcttcttgagatgtgatatatttgttgtatttattcaatttatattctatacgcattgaaactgctttctctagatcttttgttgatgttataatgtcattgtatcttatcaatgacataaaaaaaacgagctaacgctcgtgcgcgaaattggggatgcgcgaccccacagcttatagctttatcttagccgtctgatattcactggtaaagttatatcataaagtgtaatttttggttttgtctgttatttattggtaagatctcacttcgctaagcaatattatgatagcgtctataaattattttgtcaattaggaggagttattaaatggaaaattatcgtcagaaacatagatttgttcttgcaaccgatttaggaatcggttcaaacggatgggcaataattgacttagatgctcatcgagttgaagatctaggtgtacagatatttgaaagtggtgaagaaggcgccaaaaaagcttctgctagagctagtcagcaacgacgacttaaaagatcagcacatagactgaatcgaagaaaaaaacagagaaaagaagctttaatcaaatttctccaggaaattgaatttcctgatttagtagaaatattaaattcttttaaaaagcaaaagaatcctaatgatattctttcattacgcgttaaaggattggataataaactatctccattagaactcttttctattttaatctatatgtcaaataatcgtggttataaagacttctatgataatgatattaatgacaacaatactgataaagacgaaaaagaaatggaaaaagcaaagtctacaatagaaaagctttttgcttctaattcatatcgaactgttggtgaaatgattgcaacagatccaacattcattgtagataaaagtggttcgaaaaaggttattaaatatcataataagaaaggttatcagtatttaattccaagaaaattgctagaaaatgaaatgtcactaattcttcataaacaagaagaattttatgattgtctatcaattgataatattactattattttagacaaaatcttcttccaacgcaattttgaagatgggccaggacctaagaataaaagagatgattacaaaaataatagtaaaggaaaccaattctatactggttttaatgaaatgataggtctttgtcctttttatccaaatgaaaagaaaggcactaaaaattctttaatttacgatgaatattatttaataaataccctatcacagtttttctttactgacagtaatggagtaataatgtctttttcaaagtctttgcttcatgatttaatgctatatttctttgatcataaaggtgagctaaccaataaagaacttagttcatttctcttaaaacatggattggaacttaactctaaagaaaagagtaataaaaaatacagactcaattatatgaaacaattgactgattcaaccatctttgaaactgaaatgatagcaagttttagagaagaaatagaaacatcttcttaccgttcagtcaattcattatccaataaaatagggaattgcataggtcaatttattacaccattaaagcgaaaagaagaactaactaacatacttatagatacaaattatccaaaagaattagcttctaaactagccgatagtataaaagttattaaatcccaatctgttgccaatatttctaacaagtatatgcttgaggctattcatgcttttgaaagtggaaaaaaatatggtgatttccaagcagaattcaatgaaactagagaacttgaagatcaccattttatgaaaaataacaagttgattgcctttcaagatagtgatttaatacgcaatcctgttgtttatcgtacaattaaccaatcacgtaagattattaatgctgcaatcaataaatataatatcgtaagaataaatatagaagttgcttcagatgttaataagtcatttgaacaaagagataatgataaaaaatatcaaaatgataattatgaaaagaatttgcaattagaaagcgaattaactgactatatcaataaagaaaacttacatgttaacgtaaattctaaaatgatggaaagatataaactctatctttcacaaaataagcactgtatctatacaaacactccattaactatgatggatgttatatatagtacaaacgttcaagttgatcacatcatcccgcagtctaagattttagatgatacactaaacaataaagtattagtcctaagagatgccaatagcattaaaaacaatagattacctttagaagcgtttgatgaaatgcaaataaatgttgatacaaattatacaaagaaagattatctcacagaatgccttcatttattaaagaataaaacaaacccaatctctaaaaagaagtatcaatacctaacattaaaaaagttggatgatgaaacaatagaaggattcatttcaagaaatattaatgataccagatatattacccgttacattgcaaactacttaaagactgcctttaaagaaagtgataaaactaaaaatattgatgtcgtaacaattaaaggtgcagtgactagtagatttagaaaacgttggttaacaacctatgatgagtatggatatcatccaacaatatattccttagaagataaaggaagaaatttgtattactatcatcatgcaattgatgcaatcattttagctaatattgataaaagatatattacccttgcaaatgcatacgatactatacgtcttataaaaatcgatagaaatcttagcaaagagcaaaaacaaagagatattgatacagttataaaaaacactgtaaaatcaatgagtaaatatcatggatttagtgaagactatattagaagcttgatgtcaaagaatcatattcctgcaatttgtaaaaacctttctgatgaggttcagatccgcattcctcttaaattcaatactgattatgataatttaggttatcgttttactgatgaccaatatcattataaaaagctttatatcgcatttaaggaagctcaaaatgctttaaaagaaaaagaaactttagaaaaagaactcattgaacgttttaataatgaagcacagattctaaatgcaaatattattttaacttataccggatttgaaagtaacaatgaacttatcgacattaagaaagctaaaaaagtaacagatactctcaaaccaaatttaaaaaactatatcaaggcaattgatatacttactcaagaagaatatacaaaaagatgtttagaatactacaacgacagcgaatttgctacacaattgaaaattccatatgttaacttcaaaataaataagagatttagaggtaaaatacaaggaagcgaaaatgcagtttccttgcgtgaagtattaaaaaagactaaattaaattctttcgaagaattcgaaagctatcttaaatctgaggatggcattaaatctccatactatatcaaatatacaaagaacaccttaggaaaagaaagttatactatttatgaagccaatagttattattgcgctgagatttatactgattcccaaaacaaacctcagttaagaggaatacgatatgtagatgtacgaaaagaagatggtaaacttgttttattgaagccattaccatctacttgtaaacatattacttacctattccacaatgaatacattgccatttacaaagattcgaactataaaagacttaaaaataatggttttggtgcgtatagaagcattaataatgtcaatgtaaataagattataataagactttttgcaaaccaaaatcttaatgataatgatgtagtaattacatcctcaatatttatcaaaaaatattctcttgatgtgtttggtcatataaatggtgagataaaatgtggcgatcaatcattatttacaataaagaaaagataaaaataaaagacggaatccttaacattgaatctgaaaatagtgttgctcatttcccattggaagatataaattgtattgtaattgataatttacaaaccattataacaacatatgcacttaaagaattaagtgcatataacattctcgttattctttgtaatgaatcacatttacctagttctattacattacctctctctaataattatcacttatataaagtgtttaaaatgcaatctagtctaacgaataaaagcaaaaacaccttatgggatatcattacaacagctaaaatcattaaccaatccgttgtgttagcactgtgcgattgcaatgaaagtacagtaaacagaatgattgaattatcaaaagaggtatatgatggggatgcgggtaatagagaaggtatcgctgcaaaaatgtttttcagatctctttatggagccaactttataagaactaatgatactgcaataaattctgctctagattatggctatgcaataatgagatcaatagtagcaagaaacttagctgcatcgggatttcagctcatgttaggattacatcatatatctgaaacaaatgcctataatttagcagatgatttaatggaacctttacgtcccgttgtagatttgtatgtcaataataacattgattatattgtcaacccaataacacgtgatgtaagaagtgatcttgtaaacctaattaataaagatgttatttatgatggaaagatagtaaaaattagatatgcagttgaaatgatggtaaaaagcttatatacagccttagacagtcaacaatatgataaattcaaggtcccaatgatatgcaaaacagaacaatgagattaattgtactttttgatttgcccgtggaaaccaaaaaacaaagaaaagactatactgatttcagaaaatttcttattgaaaatggatttctcatgatgcagtattctgtctatgtacgaataacaagaaattgggatgatttaaataaatttattaagagagtagaaaataaccttcctccagagggtgaagtgaggtgcctacccataacagataagcagtttgccagcatgaaattacttaaagggaagaaaagagaaatagataattcagctgacgacctaatagaactatagatattgcgattaaaccttaagtacgataaaatgtatttaaggttttagtcgtctgttatttattggtaaggttatacatacttttatccctccttactatctaaagggttttagtcgtctgttatttattggtaaggttatacctctttcatattgtcacatccgcacacattgttttagtcgtctgttatttattggtaaggttataccaactgcctcatcatcctgtatgtagtcctgttttagtcgtctgttatttattggtaaggttatactgacgagtttgaccattcatcatcttctctgttttagtcgtctgttatttattggtaaggttatacgtaatttctttcattctttgtctctcctccgttttagtcgtctgttatttattggtaaggttataccaccaacatcagacatggtatgcacagtgagttttagtcgtctgttatttattggtaaggttatacttaacgacaggaagttcctcaagctgataagttttagtcgtctgttatttattggtaaggttatacgaaaggttttggagatagcgaagaaagtaggttttagtcgtctgttatttattggtaaggttatacaattattgagtcttcattattaactacgtagttttagtcgtctgttatttattggtaaggttatacttataatttgcgttacactaggcaacacaagttttagtcgtctgtcgtttattagtatgcaacttttcaggtaactatcaacactgatctttttttataatattctctatctaaatacctttttctggaggtggtttctattttaattaaatacatcgagatatttggtgtttgctgttttgattctgtttatagagttgaatttaaaaaacacaattgtttatacgggaagataaactcaggaaagtcttcctttttaaaatgcctttgctttttctttgacgagttagatgaatattctacactcaccaatgatgatattatttctgatagttcttatattgaaataggaattgaatttagggatgtaaaagcaattcgcaaaagtttcaacaaaattcattctatcaagtataagactgattataacaatctaaccgcaaatgaattactagaatttcaacaaataaacatcaaatactttacaaacgaaagaacatttacagataaagaaatagaattacaaaatcttaaattacatctaataaactatattaaagatcttaatttagatcaaattaatgagtttgaagaaaaatccaatcactacctcggtgatatggctttagatatgaatatatacttaaacgcaaagtacaaatgggataaacttatagatataagctacgaatttaaaaatcaacgaaagcattattcatctagtgaaagaaaacaattattgtttgatttattaaaaaacgatgttaatccgtattctatcttagcagctgatgattttgatttatattggaactcagcaactttaaattcaaatctaaaagacattaatgaaatgttctttcaatcatttatttgtacaagaaaaccatcacacaacaatacaggtatagttgatatgtcgcttcaacatttaacaatagaagaatatatagatatgtacaatatttaaatatctttcagtaatacattttttgcatacatcacactacaataggtagataggtaattaattaatcaataacaatgagctcactgttattttatgagatttgattttatcagaataattaatggctaatcagtatatatattaaaatgctttgaaatatatttatcctaattcacaagattagcttcaaaagctttccctatttcattgacatcatcaaagaaatagtttacattatgtatgcacacaccaaggcaaattgaaaggacaagagtggcgactcttgtcctttctagtttttaacgagacttatctcgggcttgttctatagcctttttgacttgctttacgcaaaccaatagcgccttttccactgccactttgatgacaacttcaagaacactttttagtatccatagaaggttcacaccaaggcaccccctttcacgtcgccgattggaggcgaaggaaagtacctctatatatgtatagtcatgaaaatggcatttttctcacaaaaaatagaaatttgtgtggaaattggcattgtatcgtttgtaagtaggtttaatgccttgaattgtatatgtagtaaaaagggacaagagttgcagctcttgtccctttttacatgttatctattattgttgtaggcttctatctctttttggaatgatttaagaatagcttctagttcctcataagtattgattttagtgagttggttcttgactttggcagcaccatgttcacctttaatataccaaggagcctgtccacgcatcatgcgtattccattcacttccccttcaagcttacagagttctttggcatgtgttaagcacatgtcaatcttttggttgaaggttggttcttcatcaagaacacctttttctagatagtccactgtacgcttgataatccaagggttacccattgctgctcgacctatcatgatggcatcacatcctgtttcctcaagcatacgttttgcgtctaatggtgaagtaatatcaccattaccaatgacaggaatagaaacagcgtccttgacctgtttaatataactccagtcagcatgtccttcatagaactggcttcttgtacgaccatgaacggcaatcgcactgacacctgctttttccatcagctttgcatattcaacaacattaatatgctttgaatcaaagccaatacgcattttaattgtcaccggtaaatgcactgcttcaacaatcgcatgaactatttcataagcacgttcaggatctctgagccagtcacttcctgcttttgccttaatcactttattaacaggacatcctgaattgaggtcaatgatatccgcatttgtatgttcttctaagtacttggctgcttctaccattgatgcgacttcaccaccaaagagctgtaaactcatgggatgttcatcttcgtctatcgcaagcatatccaaagtcttctcatttctataacaaattgccttgtcactaatcatctctgataccaccaacccagctccaaaagacttaataagttttctaaaagctatgtttgtaataccagccatgggtgccatgacaacttgattctttatttctacatttcctattttccacatattgatcaccaaaagttaatttaacagttctctcaatgtgatgcaagtagtatgtttcatgatataatcatggaaaaaaggagttaccatgaaatactattatatcgatcatcctatctcattccccgattccttttctatcacagatgaacatgccaatattctatttcaagtcgatacaaagttgaattggggacgtatcataaaaatctctaaagaacatcaaacgcttagaatacttgatgataaaatatcaacatactttccatccttcacgattaaagatgagaatgatcataaacttggttgtattaaacgcattttctcattaaaagcaccacaattagattttcaatttaaaggttattatgtccgggaaattatatggcaaagagctatgagattgcccagcaagccacaacaatggcaaccattaagcatatctcacaaggtatggataaagtagaaatagatatcttaaaagatgaatatgcgattgatattctaacctttgtcatagcactagaagcccataaagctcttttctaatatcacataatctttgttttttcaaaggtaattctttgataattactttgtatgatgtaaacaagaaaggagatgacataacaattcaatagactgattctacataaaagatataaacaattccttcccttccctcataatacaatatctgtagaaattcccatcagtcccttaaatgaatctatgtataataataaaatgaagttatgtcatatccacatagcttcctcaatgatgacaatcatgaatgattgtcatttttgtttatatgaaaaaagaggcatgtgcctcttattgatgtttattttcttggatttgttttaagtcatcctcactgaagtgataggacttatgacagaactggcattttaaatcagcaccatgatcttcattaataatggcttctaattcagagtctggtaatgctgctaaagcttcagccatcttttctctcgaacaatcgcattcatagaagacatcctgatgtgctagaatttctacttcatcaccaaaaatcatttctaagatttcttctggtgttttaccttgatgaatcaggtctgaaacaggagggaagcccttcattttattttcaataaatgtgatatcttcgtctgttgcttctggtaatagctgaatgataaagccgcctgcagataacacactattatccgtatcgactagaacgccaactgagacaactgaaggtacttgttctgaaacatagaaatagtacgcaaagtcatcaccaatttcacctgtctgaagctgtacttctgatgtcattggctgctttaagcccatatctctaataacctgtaaagtgccattattgcctacacacataccaacagctaatttcttcgtactgttatattcatagtggacttcaggattagcaacaaaacctttaattttgccatcacaatgtgtagtagcaagaacagtacccatttcaccaccaccattgatatttactgtgagtttttcctgatctttattcatggcacccatcattaatgtgactgccattgttctaccaagggctgctgatgcacatggccatagccctaattcttctcttgccttgtttgtgagatttgtcgtattaacggcaaagacacgggcatttcttttattgacaaggcctctaactaaataatctttcatacttttctcctaaatcgcaaaatagctaacgagaggtataatcatacttaagacaattatgcctacaaatattctgatcataacacgtctactcattttcattctccttaaaaatgaagtaaggcaatgccctacttcatttcatctaataaatcatcttcaggatttacagtatccttagtttctggtgctgatggagtattgtcatcattatccggtgttacaacttcatcattgccattgaatgtttcaggcatttttcctgtttcatataatgactgaatttgttctgcattcagtgtttcatattctaataatgcattcgcaattgtttcaagcttgtctttattggcattgatgatatcagttgcttcctgatgggcatcatcaataatctttctaacctgctgatcaatttcaaatgcaatctgacctgaatgtgtattagaaagctgtgaatagtcacggcctaagaatacagcattttcaccactgtcatacttgattgggccaagttctgacataccgagttcagtaaccatcattcgggcaattcttgtagcctgctggatatcgttggcagcacctgatgagatatcgccaaagaagatttcttccgctacacgaccacccatgaaaccagcaatttcagctaatagctgctgttttgtttcaaaatatgtttcgtccttaggtgtcattaagttataaccaccggcatcaccacgaggaacgattgtgactttctgtacctggttagcatcttcaagtgttaaaccaacaatcgcatgtccagattcatgataagcaacaagctttctttctttttctgtatactttctactcttcttagctggaccaccaatgactctgtcgattgcttcatcaacatcttcaagagtaatcacactatgtcctaaacgtacggctaataaagcagcttcatttaaaacgttggctaactgcgcacctgagaagccaggtgtacggcgtgcaatgttgtcaaagtcaacatccggtgctaatttcttatttcttgcatgaaccgcaagaatctgtgctcttgcacgacgatctgggttagatacatgaatttgtctatcgaaacgaccaggtcttaataaggctgggtcaaggacatcagcacggtttgtagcagccagtacgatgacaccttcattaccttcgaaaccatccatttcaacaagtaactggttcaatgtctgttcacgttcatcatgtccgccaccaacaccagtaccacgctgtctaccaacagcatcaatttcatcgataaagatgatacatggcgcattctgtttagctgtcttgaacatgtcacgtacacgtccagcaccaacaccgacgaacatttctacgaattcagaaccagaaatagaatagaaaggtacattagcttcaccagcaacggcacgggcaagtaatgttttacctgtacctggaggacctactagaaggacacctctaggaatttttgctcccatatccgcaaaacgcttaggattctttaagaagtcaaccaattccttaacttcttctttctcttcatctgcaccggcaacatcactaaagcgtgtcttttcgttcttttcaagcttagctcttgaattaccaaattcaaatgctttcgcatttccaccaccagcagcattcatgtatttgaagaggaataccattccaccaattaagatgatgtatggaataagattcatgataatattgatgaccatattatcatcagatgcatctgcaactttcgctttcacaccctgatctttaataacctgcattaatgaatctacttcttcatcagtagctggtactaaagtagagaatgagactgttttgtttttgccatccaccttcttagtatacttacctgtaacatcaacgacatagctttgtggcttaacagtcacttctttaatcttttcatcttctaatgcctttgtaaattcagagtaagttaaggtttcactgccagcatttcggtttgtcagaaccggaataatactaccaatgatcaccaatactaaggcccaaggaagaatagcttttaataaacttttattcttcttgttcatactgtctccttacatatagacttcttcttttaatattcctacatagggaaggttacgatacttctcattgtaatccataccatatccaatgacaaatgcattaggaatttcgaatcctacatactttgcttgaatagggaattcgcggcgttcctgcttattcaaaagggttgcgatttcaacactagcagcacctttttcaagaagcatctgtctgactgtatataatgtcttacccgtatcaagaatatcttcaactaagagaatatctttgcccttaaagtcaacatcaatatcctttttcacaataacattgccagtagactctgtgccttcatagctagaaacacgcataaaatcaaattcaacatctaacgtcacatgctttgcaagttcagcaaagaaaggaacacttccctttaataagccaaccatcagtacatctttaccttcatagtcagcagaaatctgctttcctaattcagcacttctatctctaatttgttcttcagtatataaaatttcacacgtatccttatgcatacgtaaacctcctataatgcgcttattttatcacaaaaaggttgggatttgtagacaaatactcatatcttttggcaattcctggaatcaaaataatttgtccatcatttcttacaacaatcggataatgggctctttcatgagaaggtattttattgttgataaaaagtcttgccaccttcttttgcccaccacttgtcttaatcacatcaccaggtagtatcgaacggatagtgagtgggaaatcagcctcagtgacataaataccatcattcatttcacctttctggcgaatagaaaaatcgtcataatcctgctctttaagcgatgttattgtatatgcatatccctcacttgaaggtagtgttgtaacggtaatattatcatatgcctttatgaactgctgatgaagtggtaattggagggtgatattgggctttgttgaagtcatctgatgaatgatttcatgaataagatgcccgctcaatttctctaccggtattttctctgccaacaaagcaaagagaaagtcactataaagtgcttctggtacttcatgatagttaattttattttgtgcatgatacttttcaagtaatggcttaagctggtcttgaatatgttgcttgttcagattataagcttttgcttttaacaacaatgcttctttttgtttgtctgtataggtattgagcacaagatttctgacctgatcacgtttgaagtgagtttgaaagtttgtgtagtcatcatgaaaagcaatatgattttgtaagcaataatcacgtagcgcttgtttttttgtatcgagtaatgggcgaataatggtcatctgctggatggttgtaataggctcaatacccagataattggtttgactgccacgctcgagatacatatagattgtttctagttcatcatcaagatgatgggctagtaatacagcatcatagccttgatctaagacttcatgatagaaattataacgcatttgacgggctacggcctggaagttaccttgttgataatcttctttggtgaagactttgtagtagaatggaatgttatgctgtaaagcataatcatggacaactttatagtcctcatccgtatcttctcgaagattgtaattgacatgagcaatagcgacgatgtaattcttcttgaccatcatgtccagtaaggccatcgagtcacaccccccagatacgc

SEQ ID NO: 4428 - DNA, 23195 bp, synthetic construct
  misc_feature 1..23195: note = Synthetic
  source 1..23195: mol_type = other DNA
tccctttccaaccgctcgcggtatttttttgcggcgttgacttttttgcggcgttgacttttttgcggcgttgacttcccgcaattttttgccgcacgcgtttaaaaaaatgacaaaacgcgcggcgcaaactttgcgttgcgcgttccccccccctgccggcgcaaaaaaaacaaaaatttgcgagcaaaaactgtccccttaggcaggcggataaaaatcgaatagaaatcgcccttaacacggcctaaaagcggcacgaaaaacgaaacaaattttacgaacgcggcaaaatttacgtttccaaacgcggcgcaacagccccttcgcacagcctttccaagccgcgctccgatgcgaaatgaaattcgcgcgcgcaaatgcgcgtcgccgtcggattcagccggcgaaatccgcaagccgaacgcatcggcaacgaaaaaaataaaaagatttccgcttcccgattcggtcaaaacccaaaatgccaaaaggcgcgattgaaagaacgagaagcgatgaaaaaaatttccgccgaacgctcgcgcgcactgcggtatgcaacgcaacggtcagcgccggagattctcgcggtcgattttggaatccatctccgaatttatttctgaaaaacccaccattttttcgtcgggattctttttggccgttatgaccttgtacacgcaccacgcaagaaacgccgaaaaggaaataaccgacgtcaaaaacgttatccagccgcccaaagtcatttgcgcctccttgaggatttaaaaacgtcgtactttttcgccctcgaaagcaggagcgaataaaatgcgaatatgccggccattgcggcaaccgacatccacgacaccgtgtttaccgggtggttcggcccgcctatcaaatccaaaatatacgcgctcaacttgccgttcccgatgaggccaaagacgtcctttgccagccacaggacgaatatcgccagcaggaatgtaggcgtcaaatattttatgacgaatccaagtccgggaggagtccttatcagggagccttcattcgccattttgattcccctgtctattccgaatttccaggcaaatactatggtggaaaccatcgcgaacacgtatatggcaacctgccccatccagaagtcaaaggtgtccatgaccttcaaatcctccgaaaagtacacgacgaatcccgtcagaaaggccgctatcgcgccgagtattattgttgccaggctgcgccgcatttttgtggcctcctccaaaaaggcgacgctgggctggagcattgaaagagagctcgtgacggctcccaaatacagcagaaagaaaaagagaaagccgaacagccagcccatcggaagcgatacgaagaacatcggcaacaccttaaatcccaaatcgaacaggctcaaccccgcgcccactacgcccgacaccccgaacaacgccacggccggcggaaccgttatcattcccccaagacagacttcgcaaaattcgttcgcgctgcaagaggtcatagagctcaaaactatgtcgtcgcgccggcgaaggtagctcgcgtaggtcattatcaggccgaagcctatcgtaaggctgaagaatacctgccccgcggccgctatccatatcgacggatccgccaactgcgcccaaatcgagatacgctttatgcgcaaaggatcgcttccgtcgcaaagggaagctctcagggcaatctctttttccgcgcgttcaatttccccatttccgaccagcctcttctcaaacacccactccccgcttcccggagaaagttcgcgctcaagcacgactttttcgggattccacatgaatcccagcccctgctccacagacctttcgggatactccgcggacatgtttcccaacgtgagcacccggcccaccataatcagggcgattatcaccaaagccggcatcgcatatttgcagaaaaactctattccgcgcgaaacgcccctgtatatcatccagaagttgagcaaaaacgatagaaacaggaaaatcagcacgccctttattccgaaattcatcgccgaaccgttttcggcaacgcctataaattcggcaaaaaactttccggactcctcgacgttcgcaaaactcaaatttcccaggagaaaatttacggcatatcccagacaccacgcctcgatatacacatagtagcagtaaattatcagcgtgagcgtgacccccaacaccccgaaatacgccatttttttgctcgaacagacgtatccgagaatccccggcgccgaattgtatccgtttgccccgccgtatctgcccatcgtccattcgagcaccgatatgggaaggccgactatgaaaaacgatatgacatacgcaatcataaacgccgcgccgccatatagcgcaacttgtcccggaaacttcaaaaaatttcccaatccaaccgcgctgcccgcgaccgccagaatcacgccgacgcgcgaactccaattttccgacttcataaataaaatgaattgtcaatatcccaaccgcaagcttccatcaacaaaaaagcgaatgcgcgcgaaattaacccgcaacgcgcgccgtctgcggcggcgcaactcgcaggcgcgcgatctaaaaacacgggctgttcggagagattagcccccccttaaagcgacaaatcggacgccttgccacagcggcgatttggagatttaacagcccaacttttttcaatgcggcaacacgacattttgaataaccgaaagtttgcaagtgtagcggtcaaactttttgaaggcgaaaggcgggaaagagagtggcacgaacatagtggtagtacggcaaacttacagcttggcactttgcactcccggccgcgcacatttgctcctccgatgcgccaatcgtttacgcaatgaaaacgcacacagtgataagacacattgaatttctcaacgcgacaatgcggcgtttgggttaaccgaaagtttgcaagtgtagcagtcaaactctttgaaggcgaaaggcgggaaagagaatggcgcgaacattttggcggtgcggcggcgaaaaaatctatttacatcgcgcctcgcgcacatttttacgcgtatccattttatgccgcgcttccgccgcgcggcagtcgtttcccttatattttccctgtccccaaacgcgccgcttcggttttttcaaatgcgaaatatccgccgctcccctaaaatccccggcgcaaagcgcgcgcagagtgcggcaaaatgaaaacttcgattgccgcaaaatccgaaaagacaaacgcgcaaccgtccggacctttcaaaaaccgcccgattttttcaaaaaaatatttccgcaaaattcaaaaaatttaaggccgcgcaatccgaaaaatcgaaccgacaaaaaaagccggaggaaatcctccggctttatcgcaaacgcctttttcgattacgcccttgaagccagatacttgtatttggcccaacgcgcgtttacaaactcctgcgcctcggcctcgagcatcgcggccctgtcgggattggacatcttcagcatcttgaagcggttttcggcggccatatattccgaaaccggaattttcgggtcggccgaatcgagcttgaacggattttcacccttcgcaattttgcgcggatcgtagcggtacagcggccaatagccggactcgacggccgctttctgctgcgcgggcccgttgacgagattgtatccgtgggatatgcaatgcgcataggcgataatcagcgaagctccgtcatagctctccgcctcggtaaaggcctgcaccgtctgcatgtccctcgcgccgattgccacttgggccacataaacgtttccgtagctcatcgcaagcattccgaggtccttcttgaagttggacttgccctcggaagcgaactttgccacggctcctaccggcgtagacttgctcatctgcccgcccgtattggagtaaacctccgtatccaatacaaggacattcacattcttgccgctggcaagcacgtggtcgagaccgccgtagccgatgtcgtacgcccaaccgtcgccgccgataatccacacagatctcttgacgagatcgtcggcgagtctagagagcgaaagcgcctcgtaggaggagtcgcccgcaagcttttggcggagtgcggcaacgcgctcgcgctgggctgcgatgccggcctccgtggactggtccgcatcgacaatcgcggaaacgaggtcgtcgcccaatttcggggccagcttcttgaccagctccttggccatgtgctccttcatgtccagcgaaatcctgaatccgtatccgaattccgcattgtcctcaaacagcgaattcgcccacgccggcccccttccgtccggattgacgcagtagggcgtggtcgggagattgccgccgtaaatggacgaacagcccgtcgcgttcgcaaccagcatgcggtcgccgaaaagctgcgtgagcatcttgatgtacggagtctctccgcagccggcgcacgagccggagaactcgaacagcggctggcggaactgcacgtccttgacggtctgcgtcagcttcagcctgtccggattcggaagcttcatgaagaacttgaagttttcgcgctcggcttcgcgtatcggctcctgcgcaaccatgcccagggccttgacaccctcctccgtcctgctcttgccggggcacaccgacacgcataaaccgcaacccgtgcagtcctcaaccgcaacctgaacggtgtacgagcagttcggatcgctcttggagcggtacggcacgctcttgaaggtcgccggggcgtctttaagcaggtctgtcggataaaacttcacgcgaattgccgcatgagggcatatcgtggcgcactttgcgcactgtatgcaaagttcgggcttccatgcgggaacttctatggcgatgttgcgcttttcccactgcgtcgtcgccgagggccacgtgccgtccgcgggcatcgcggaaacggggagagcgtcgccctcgtcgcgcatcatcacggcggagaccttcttgacgaaatcgggagcctcgtcggaaacggtcttgggatagccctccttcgccgtcacctgcgcgggaactttgacctcgtggagattcgcaaccgacgcgtcaaccgccgcaaagttcttttcgacaatctgcctgcccttcttgccgtaggtcttttctattgcggccttgatttttgcaattgcctcgtccttcggcagaacgccggaaatcgcaaaataacacgtctgcattatcgtgtttatgcgcccgcccattcctatggactttgcgacgtggtaggcgtctatcacatagaatttaagcttcttgtctattatggtctgctggacctccctgttgagatggtcccaaaccgcatcggcgccgtatatcgagttcagaaggaacaccgcgccttccgcggcgcagtcgagaacgcggtatttctccatgaaggagaactggtggcaccccacgaattgcgcgttcttgaccagatacggagcgcgtatcggattcggcccgaaacgcaggtgggaaacggtaatgccgccgctcttcttggagtcgtaaacaaagtacgcctgcgcgtaattcggggtttcgtgcccgataattttgatggtgttcttgttcgcgccgacggtcccgtccgagcccaagccgtagaacaccgcgctaaatacgccggaatcgtcgagcttaaaggattcgtcgtaagaaatggaggcgccggaaacgtcgtcgtcgattcccacgctgaagtggtttttcggggcgtccgccgacatgttgtcaaacacgcccttcgccattgcgggagtgaagtccttggagcccaagccgtaccttccgccgagaatcacggggtcgaacgagcgcggcagaagccccgcgttgcgcgcctccattatggaggccgaaacttcctgatagagcggctcgcccatcgcgccaagctcttttgtcctgtccaaaaccgtaatggacttcgcgctctgcggaagggcctttgcaaacatctccacgctgaacggacggaacattctcaccgccagcacgccgtacttgcaccccttcgagttcagagccttgacggtctcggctacggtctcgacgccgctgcccatcatgacgacaatcttgtccgcgtccggagcgccgaaatactggtagggcttgtactccctgccggtcaattcggcaaacttggacatcgcgcgctccacgaccttcgcgcactccgcatagtacggattgcggcgctcccaagactggaaatagacgtcgggattctgcgcggttccgcgaatgaagggcttttcgggagtcagcgccctgtcgcgcatttccagaatcttggcttcgggaagcatctgcctcatgacttcgtcgctgacgggctcatacgtgttgacttcatgcgaagtcctgaacccgtcgaaaaagtgcaggaacggcacgcgcgattcaagagtcgccgcatgggcgatcagggccatgtcgcacgcctcctgaacgctgttggagcaaagcatcgcaaaccccgtctggcggcaggccatgacgtcggtctggtcgccaaaaatcgagagtccgtggtgcgcgagcgcgcgcgcgctgacgtgcattacaaaactcgtgagctcgccggcgattttgtacatgttcggaatcatcagcaacaacccctgcgacgccgtaaaagtcgtcatcaatgtccccgtctggagggcgccgtgaaccgaccccgcgacgccgccctcgctctgaagctggcttatcgacggagttatgccccacaaattcttcttgcccttcaccgcccactcctcgcaaaattccgccatgggagaggagggagttatcggatatatggctattgtttcgcttgccctgaaggcaactgacgccacagcctcgttgccgtccgttattacactgttttcatttttcatatatttttccaaaaaaaaatcgactcgctaaaaaagcccaatcttccggctttctaccgccggaaaattccggccggcaggattccaaaagaccgtcttaaaagcgaaaatatatcgtgcgcaatttacttcccggcattgcctttcgtcaaccatttttacaaaaaagccgtcattttgtccgttttcgaacgtttttctcattcgtctgagcacaaaatgcgcaaatgcggactcgcaatgcgcagccgcactgtcgattcgcctgaaaaatcgccgaattgaaaaagtcaaatcgaagcgcgccgaatcgctccgccccatggggcgttccttctcaagtgatgaaagcgcccccccgtctacgccatatcaagatgcggggattatcgcggacaaaaatccgcttcgcgcgccattggacttgcaacccgcgacgaaaaagcaaatcggcgcccgcccgattttagaatgcgcgcaatttgctcggaagcttgcgcgcatgcgccaaccatattccccgccttaacctcgcgggccgggcttgccccaaagattcgctcgcacacatatgcaatccgcattcatattaggccgcgcgccgcacgcgagcttgctccgccggctgccggcgcgtaagctgccggcgcgcgtcaaaaaaatcgcacaatgcgccccaaatttttcgcaatccgatcgagaagtatcgcgcccccaacttcgcgaaaggctgtcggcggacaatcctacccgcggggcgcgcccgacgcgcgcaaaaactattcggccagcgcgtctatttccgacatcttgaagcgcacgctgacaatggaacagcccttatcccccttcaacgtggcataggtcgtggccactatcgttccgtcgtcgagcaggtgtattccgggataaaatccgtcctttgcggaatcgcaaagaaatatgtcgtactggcccggcctcccgcttttgatgtcgtcgtaggttccgacccacgcgacaaaacgtagcggaacggccggggaagtctccattctcgaacgaaacactattacgagcctcccgtcgggaagataaattccctggtggcggtctccgctcaattcgacgggaaggctgacggggcgcgtccatgtttcgccctcgtcgcggctgaacatcacgaggctgtttttgcgcagtttgttttcccgcattatgcagcaaagctcgttcccgtcgggagagcggaacacgaacggctcgcacgggaaaagtccgccgatgtccgcgccgtcgcaaattacgcggggctccgaccacgtgaagccgccgtctttggtgacgctctgcatcacctgcaaatccctatcctttcgcttggcgccgcggtggaacagtccgagcgtgccgccgtccttcaggcgcaccatgctcgaaaaagtcatgacgtttctgaacggattttcgcccctattatcaaacgggccgagcgggagaagttcgcgccaggtctttccgccgtcctcgctgacgacgcgcggcatgtagccctcaaagcggttcggaatttcgaccggcttgaggcggtgatgcttggggattgtgcgggcggcgaatatccaaaggcgctcaacaccctgcggatcgactatcctgtatatgctcggacaatttaaaaagtttgcgtaattcggcggcattgcggaatccatgcgggtccacgtcaggccgccgtcagcgctcttggcgacgggcgtcgccctgcccccgtggccgagattccaaacgcagaatatcgtcttgccgtcaggcataaggacggtcgtggggtgggcgtgatattccttttcgttccccctggccacaatcacctttcgggaatcgtcgccggagatatcgacgcgctttgcgccgctcgaccgcgaaggctcctttttagtctcgaccgctcccgcgccgcaccccgcgaaccccgaagccttttcccccgcaaaaacgcccggcgcaaacaggcaggccaaaatagtcgcaaataaaaaactctttttcatctccatcatacaagttaagttccataacggaaaaaatgaattgcgattccgatgtaaagtaaaaactcgctactgtgccgccgctctccgacgccgcgaatgcaaatttaaactcgcgcgcaaatccgcaaaaaaaagacgaaacttaagaaaatttttcaattaaaccttgacaacatacccccaatatgcgactgactaaaaactcttgagccgattattatcttcggccgtcaaggatacagggcccccatcgtctagtggtccaggactcctgaacctcattcaggagacagcggttcgaatccgcttgggggtaatttgcgcaatttcagaaattgcggcgacgataaaatatgctgaattgtgcatgcggaaggcaaattccgtatcaatgcgaagaatcaatccccatgggacgaagcttgtgtttttacgccttttgcaacgtggctgcacatcatgcaaactcccgcaatctttagttttcgttagcgcttggccgaccctccccccgcctttccggatattttatccgcgccaaaatccatttcgcgcaccggcttaattcagaaattgcggcagccgcaaactaacgcccggcccgttttatattttcgcgggattcgcccgcaagactttcggcgcgtctcttaatatccggactatcggcgcaaaccgtttgtccaatgcgcgcgcccagcattccgcaatcccattggccgccccgctatgaatacgcaggagatatttcggattcatatgaaaggccgccgaaggcgcgacaaacaattgcggcggataatacggcggataataatttttgggaattataattataaaaataaatgttaaactttaatgtttacaaagttaaccgtcgacaataaatattatttattactacagtcgcgccgacaatttgaaattgccaataccggtaaagatgccggtaaaaatatgtaattatatatggaaaataaaaaaattttcgggtttgatatgggggccaattccatcggctggtgcgcccaaataatagataaaaacggcataacgaaagaaattttgggcatgggggcccggattttcgacaactcgcgggacccaaaaacgcgcgttccgctctcggtggaaagacgcctcgcgcattcggcttccacgcgcagggacaggcagataatgcgcacaaaacacctgtgcagcctgctgcgaaaatacggcctgcttcccgcgcaaagcggattcagcatagccgacagaaatccctacaagcttcgcgcgaatgccgtacacaagaaaatagacctcttcggaataggccgcgcaatactgcacataaacaagcgcaggggattcaaatcaaaccgaaagacggacaagaaaagcgacgcctccgaagccgcaggcatgaaggccggcatttcaaagcttcgccaggcgatgggaaacaaaacgctcggcgaatttctctacgagcgcaagaagtcggcgttgcctgtgcgcatgcgcgccgaagtgataaaaagtaaaaaccaatatgaaatctatgccgagcgcgccatgtatgaggacgaatttcgccgcatatgggaaacgcagcagaaattccacaacagcctgaccgccgaaatgcgcgacaaaattttcgacgcgctctttttccagcgtccgctgcgcgtgccggagcggggattttgccaatttgaggcgaacgagaggcgggcgtacaaggcttatccgatttcccaaaagtttagaatcctccaagaggtgaacgcgctcgaaattgccgacataggcaatcaaaacaatcgccttgcgcgcgaacaaaaggagagacttgcaaaagcgctgctcgaaaacgactccaagcttgcggacaagaagtcgtttgcctcgttttcaaaaataaagaagtttttgaacctgccgaaagccgcgacattcaactttgaaaacgagagcagcaagggctttgagggcgattcgacggcgcgaatcctggcttgcgacgactgcttctcggattcatggaacgaacttccggacgacgtgcgcgaaaaaataatagatttgattatagcggacaaggaagaggaatttctggccttcacggccgaaaagttcggctttgatccgcaaaaggcgaaatttattttagatgcgggagccgccctcaaggagggaacggtctcgctctcctccaaggcgatgcgaaagattcttccgttccttgaggagggcgaactttaccacagcgcgtgcgctcgcgcggaatataacttcaacgccaactacgcgggagaaattctggattcgctgccgtattacggaaagattctgcggacctcggttttgggcggaaacgcgaaattcgatccggaaaaagagcccgaaaaatactacggaaaaataaacaacccgacggtccacgtcgccctcaaccagcttcgcaaggtttacaacaagctcgtcgaggtttacggcaagccggattgcgtcgcaattgaaaccgcaagagatctcccgctcggagagaaaggcctgaaagaattaatttcgaaacagggaaaaaataggacaaaaaacgaggaaatagcaaaggaactcgaaaagctcggagtggcaaacaatgcgaaaaaccgcatgaaatacaaactctgggaagacttgagcgaaaacgtcgaaaggcgcgcatgcccgttttgcgggcgtcaagtggagctgtcgaaattgtatactccggaatttgaagtggagcatttgctcccattttcggaaaccttcgacgatacgagggccaacaaagtcgtctcctgcgcctcgtgcaacagaatattcaaggggaagcgctctccgtacgacgcgttcgcaaaccgcgcgggctttaactgggaggagattctttcgcgcgcgcttgagctgccgaaaaacaagcaatggcgcttcaagcaaaacgcgtgggagatttttgaggaaaaatacggggattttatccagcgaatgttaaacgacacccgctatatgtcaaaagtcgcgcgggaatacttgacgtgcgttttaagcccgcaaaatattctcacaatttccggaggcatgacggccatgctgcgcggacgctgggggcttaatgcgatactcgacgccaattccgagtccggagaagccgtaaaaaaccgggaagaccaccgccaccacgcagtagacgcgttcgtgatatcctgcgcaaacggcaagttggtcaaaaagatttccgaatccgccaaacttgccgaagaagcgcatatcgaaaacgtcttaaaaacgattccgacgccctatagcggcatatcgtttgaaaaattaaagggtattgtggagaaaataagggtatcgcacaaattggataggggcgacgtaaaaggcgcgttgaaaaaaggcgcgacaatcgcaaaacttcacagcgatacgtcttacggacgcataaaagcaaccgaatcggagtccgggaaaatcactttggcaaagcgcgtcccgctctcctcgatagaatgcgattgggacaatatatcgcaaattgcaaaccccaatataagaaaagacctattggattattgcgacgaagtctttgcaaacgccctgacggaaaaatccaaaaaagacatgtggacaaaatttttgtcggaatatcaggcggataaaaaaattcgccgcgtgagaatacacttgccgaacagggaattgaaaaagctcatacccgtatccgacaagaacggacgcgtttataaatacatggaaaataccgaatcctactgcatcgacatttataagccttacggttcggacaagtggcagtttgaggtcatcaacatgtacgcggcacataaaaacgaaattccggactggcgcaaaaacgattcgcgagcaaaactcataatgcggatttttaagcgcgatacgattgcatacgaagaagacggcgaatataagctcgcaattataaaaggcattgaaggcaacgggcaaatagttttagcgcctttaaatcaatcgaaagtaaaagaaaattcggacgtaaaaagaccaatagcctcctcacttcaaaaattgaaggcgcataaagtttatatcgacgaaattggaaggctgtacgatcctcaaaaaaagatgaatgaaggagtgtagaatcgtagaaatagcggaagacggacgcgctatttcgacagagcgcggctttatgcttgtgaaagctgcgggaaaggaaatcgggcgcatagagctcgattcgattgctgcggtaatttgtagcgcaaattggactatgctcggcacgcccgcaatttcaaagctttccgagaacggaataccgctcgtcatatgcgacaaaaaaacaaaagttcccgttagcgcaatcataccgctggattcgcattggcgacaggccgacatcatggaggcgcaagcgcggtgcgcattgccgaaaaataaaagcgcgtggcaggcaatcgtgaaggcaaaactcgcgcaacaggcacaaaccttaaaatatcttggaaaaactccggcctgcgaaattttggacaacttgtccgacggcgtaaagtccgacgactccggaaatgccgaggcccagggcgccgcgatttattggcgcgaactaatgggaaaaaatttccggcgcgatcgccatgcggaagacgaaaatatactgttcaattacggatacacgatattgagagcctgcgcaatacgctcaatatgcgccgccggattgaatccgagcataggaatacaccattgttcgccggcaaatacccacaggttgtcggacgatattatggaaccgtttcgctgctttgcggatttatgcgtaatggagatatccgcatgttcggatataagccttagcaatgaaaacaagagaaagctaagcggcgttctaacccaaagatacttccgcggcgggcaagcaataagcgttacgcagatgctgatcgataccgcacgcaaacttgcaaaatattatttgggggaaataaaaactttccaaatagaaaccgtgaaaagcaaatacttgaatggggcaagaaatgaatcttagcggatacaagctcatgtggatgatggtaatgtttgatttgcctacaagcaccaaaaaggaaagaaaaaggtattcggactttaggaacgtattgcttgataacggatttaaaatgtcgcaattttccgtgtactttcgattctgcggccagcgcgaatgctgcgggaaatacgtaaacacaataaaaagagccgcgcctcccgacggaaatatatcgatattattttttaccgacaaacagttcgggcaaataataaatataatcaaacgcgaatttgtaaagccgcccgatattcccgaacaattgactttgttttaaaaaacaacaattttttctaaaaatccataaaaaaacgtcattttttaaaaggctaaaaaggggctaacccggtaatacacacgaagttatataaccccgattgtagaaatcaaagaacggtagtcaatccgcaacacggattctccggtgttaaaaatgattcttattgtagaaatcaaagaacggtagtcaatccgcaacattcttaagctttggccccgacgcggaaacattgtagaaatcaaagaacggtagtcaatccgcaacaatactggccgccattcgatgggaacgctgattgtagaaatcaaagaacggtagtcaatccgcaaccggcgcatcaccgcgaaactgggcatgcgcattgtagaaatcaaagaacagtggtcaataattataagacaaaaatgggtcgaactaatgttcgacccttatttggtggactattgtccttgttaacggatatgcgattttcatcgcaacagagcttacgcccctgactccattctttgatttctacaaactttcttttagaaagtatttttcactctcacacatttttttattttgtcaaggcctaaataaaaaatacccgattaagcaaaaaactattaaaggataggttaaaaaaaaccgcaaagaaatattatccctcattgaaaggaagaggcaattaggattgccttcatttatttgtcgaacttaccgccaagcgccgtcgcattggacaaaaagaacttcgcgcagatattataacgaacgcccgccccaacaaaggcggacgctcgcgtaaagaagaaaactcgcgcgcccaaagcggatttcgcctgaaacgcgagaagtcttttcggaactgccttacaactgcgcgttgcgcatatcttttgtcgccaagaaagcctcgtggaaggccatggctttggaaagcgtctggggcgtatggccggtcggattctccctgacaaatttcctgagcaaatcgcggtattccggatgcgcgcacttttcgatcatgagttcggcgcgctcaagtggagtcttgcagcgcaaatccgccacgccgtactcggtaattatgacgttgacgctgtgctcgctgtggtcgcaatgcgaaacgttgggaacaatcgcgcttatcgccccgccctttgcgaccgaaggcgttgtgtatatggaacaatacgccgcacgcgtgaaatctccgctcccgcctatgccgttcatgagattcttgcccatgatgtgcgagctattgacgttcccggaaagatccacctctatcgccgtattgatcgaaatgacgcctatgcggcgcaccacttccggattgttggatatttcctgcgggcgcaaaacgatgtggtctttaaagaattttgcgttgtggtatatctcctgaattttttccggggttacggtgagcgaagttgcgctggcgacatttatgtgcccctcctcgatgagggttataacggaatcctgcaacacttccgaatacatggagaacgccggaatatcggcgttttcgcccatcgctccaagaacggcgttcgcgatgttgcccacgccgctctgtatgggcaggaactgttccgggattctgccggccttcatttccgcggcgaggaagttggccacattctcgccgattttctccgtaatgggatccgacggcttgaaaggcttgacctcgtccgccatattcgtgcgcactatggccgcgatttttttcggatcgaccttgaccacttgcgaacctatcctgtcgcccgccgaataaatcggtatttcgcggcgggttggaggattggaaatttcatagatgtcgtgaaatccgcgaagttcgggcgaatgatattcgttgagctctattatgattttgtcggcgagcgccagacccgtcggggcaattcccacggaggtcgtaaggagtatctcgccgttttcggaaacctcgcgcgcctcgacaatcgcccaatctatcttgccgagaaacccgtaattcatgtactgcgccatgagcgacaaatgaaggtcgcaaaactgaatggtattcgcgttcgcgccggcgcgaagatccgcattggactggtacggatagcggcgtcccatcgcctgggcgcgcgagagaactccgtcgcaggaatcccccgtcgacgcgccggaaatgatgtcaaccttgaagggccggccggccgcgtgttcggcctcggcctttctggcgattgcagaaggcaacacctttattgcgcccgcgggagtaaatccgctaatcgctattttttgtccgttttgaatgaggcctgcggcctcgtccgccgtcatatatgtgtagctcattttagtgtgtgcaattgaattgaatgataaatttcttcgcccccaagaaataaaaaaggggctttaacttccgcccccaatatggatagattccgtcaatgtcccgacaaagtcgcaatgaagaatcccgcgaccatcgcagtgcctattacgcccgcgacattcggccccatggcgtgcatgagcagaaagttcgacggatcgtacttgacgccctcgacctgcgatacgcgcgcggccatcggaacggcggacacgcccgcagacccgatgagcggattgattttttccttgagaaatatgttcatcaccttcgccattaccaggcccgccgcggtggagatgctgaacgcgacaacgcccaagatgagaatgcatatggtgtccattctaatgaacctgtctccggtcatagttatgccgacggacgttccgagaaatatcgtcacgacgttgatgagctcgttttgggccgccttgctgaggcggtcgcaaacgccggactcccttatgaaattgccgagcatcagcattccgatgagcgccgagacgtccggaacgagcaatatgcacaaaatcgtcacgacaagcgcaaacacgagcttctccaaacgccccactttgcggaggctgcgcatcttgattttgcgctcatgcgccgtcgtcaaaagccgcataatcggaggctgaatgaacgggacgagcgccatgtagctgtatgccgccacggcaatcggcgccagaaggtgcgctgccagtttgtttgtgatgaaaatcgacgtcggcccgtccgctcctccaattatgccgattgatgccgcctcctgcgaagtgaatccgagcgccaaagccccgatgaaagttgcaaaaactccgaactgcgccgccccgcccaaaaacagcgttttcggattcgcaatcaacgggccgaaatcggtcagcgccccgactcccaaaaatatcagcgggggaaatatctcaagcagcacccccatctgtatatagtagtatagcccccccgtgcgcgcgctgtaaacgctcgcgaccttgtcgccggcctgcaattttgcgccgactttcgcgggctcttcattcacggttccggaagcgttcgcccatacgaacatgtctccgcccttgagattcagcagctgccccttgtagcgaaccgcaaaagcagtctccgcctccgcaacgcccttttcggtcactaccgcggggcggtccggacgaagcatgcccaccaagtccggaatgccgagcgccctcttgagggcctcgccgcgcgacttctccgaagtgacgtcggcaactttgtcgaaatacgcctgcacgtccgccgccgcagtttggggacttgaaacgatgtccgaaaccctcgacggaagatactttattacgcggggcgccgtaatcctgtcgcccgacttgacaaacaccgcctcgacaattccggcctccggggcaatcaaggctcccgcgggcttattgaccacgccttcggtcggaagattggccaacagcgcgccaaacgctatggggaccagcaacagaggctcgaattggcggaaaaccgccaaatacataagaacagcgacaaccgcccacattacaaccatgcgccaatcaacataggaaaatcccgtatcggccgccagatctattaaactttgcaacataatattatcgctgctaataaaataaatacttacggattgcggcaccgtcaaaaccggcgccgcaatccgctaaaaaaccttccaaattaagagagactaatgagaacctgcccttcctcgacgctctgcccggccgagacgcaaattttgcccaccgtacccgaacaagtcgcattgaccggagtgttcatcttcattgcctccaacatgacgacgagatcgccctcgttgacctgctgtccctccttgacattcacggacacaaccacggccgcaagcgggctggctatgtctttggcgccggccggagccgcgggagcctttggcgcgggagcggcgggagccgccggaggcactatcggcgcgggagccggagcagccgcaggagcagcctgaaccgcgggagccgccgcgggaacgatcgaggataccttgccgccgagaacttcaacttcgacgtcgtatgtttttccgtcaactgtaatgcgtagttttttcataaaatttccttgttttaagtttgtggggttgattggcaaaaaagttctacatgcgcttgggcacgtaatttttggacgcaaacagggcgaaccttccctgcatggcgtaggacatatccaccggtttgaatgagaccacgcggacgtccgcatcgagcgcttcagaagccgccgccgcgattacggcaatcagctccccctcctccggagcgaggtcgggaagcacggcggccaccgcggccgatatggcaaacgcgtgcccctcgtctatggcgggagcccccgaacgcgcaggagccgacgaaaccgcagaaggaacggccgccgcagaacttccggagcgggccgacttcccgtctccgccgtcgagcgcggaaaacgccttccctatcagggaagtggcaagcgaaagccccgccaagaccgccatcaccaaacagaatcccgtaagggaaaatacgagaatctggtttatgtccggcctgtcgggaatcaacgttgcaatcatcagggcgtgcatgtgcgtcctccaaaattacaggggaatattgccgtgcctcttgggaaggcgcgtctcgcgcttgcccaaagtggcgcgcagagccatggctatgacgccgcgcgtctgggcgggttcgattacgtcggtaatcatgcccttgctcgcggcctgataggggttggaaaatttatcggcatactcctgctgatactttgccgcaagctcgcccggattttcggcggcctttatctccttgccgtaaagaacgttcacggcgcccttcgcgcccataacggctatctccgccgtgggccaggcaaacacggcgtcggcgcccatatcgacacagcacattgccaaatacgccccgccgtaggccttgcgcatgatcagggtgattttcggaaccgtcgccgaagcgtacgcaaaaagcattttcgccccgtggcgtattatgccgccgcgctcctgggccagtccgggcataaagccgggaacgtcgaccatattgacaatcggcacgttaaaggcattgcaagtgcgaatgaagcgcgcggccttgtcggaggcgtcgatgtccagacagcccgccttatacgccggctgattggctattatgccgaccactatgccctgaatcctcgcaaaaccgacgacgatgttgcgcgcaaagttgcgctgtatctcgaagaacgaccccgcgtcggcgacgcgctctataactttgtaaacgtcgagcgcctcctgcgcggaagccggaactatgttgttaagctcctcgtcgtaggttttttcgacctgcacgctgaagtcgtgcgggggctcctgcatgttgttggagggcagataggagagaagcttttcggcaatggcgatcgcctccctgtcgtcctcggcgaccaagtggatattgcccgacaccgtggcgtgcgcgtcggccgtcgcaaacatttcaaccgacgcctcctcgcccgtggcggccttgatcacttgcggtccgcagatgaagagattggcgtttttgcgcgtcatgatgatgaagtccatcagcgcgggactgtacgccgccccgcccgcgcacgggccggctattatcgaaatctgcggcacaaccccggaaatggagacgttctgatagaagatctgaccgtatccggccagcgattccacgccctcctgaatgcgcgcgccgccgctgtcgttgatgccgataaccggcatgccgttcttgccggcaaacttcatcaaatccacaatcttcttggcgtgattcgaccccagcgaaccgccggccacagtaaagtcctggctgaacgccgcaacgggacggccctgcacatatcctattccggcgacgattccgtccgtcgggagtgtcttgcgctccattccgaagttgtggcagttgtgctggacgtgcattccgaactccatgaaggtgccttcgtcaaagagggcctcaatcctgtcgcgggcggtgagaagcccctttgcgcggcgcgcctgaagcttgtcgtttccgcccgccgcaaaagcctcctcgcggcggcgtttgagttcgtccatcaatttttgagatatagccatattcttagattaacgtttaaatgtgaatcgccgggaaacgtcccgaagcatgcgccgcaaaaaaaacggcggattatgcgggcttggaaaattgcgcgctacttggcgcaggaacagtctccgtcctgacaaaattccgtcagcacgcccatggtaaatttggggtgcagaaacgcgattttcttcgcgtgcgcgccgactttcggagtctcgtttatcaggccgattcccgcctccttcgcatgtgccaaagacgcggaaatgtccgagacgttgaacgccaaatggtgcactccgccgcggggattcttttccaaaaatttggcgatgggactgtcgggagaggtcggctccaagagttcaatatgcacgccgccgacgtcgaaaaacgccgtcctcaccttttgatcggcgacctcctcaataccttcgcacttcagtccgagggctttttcataatacgcaaccgcgtcgtcaattgaagccaccgctatgccgatatggtcgattttattaatcatggagaatcctttttttagtaaaaatccccttgattacctcacaaatgggggcggattgtcaaacttttttgaaaaaaatgcgcattgaaaacggaggaaagcgcatattgaaacgtttgaacgccgcaaaaaaaaacggcggcgttcggcggggatatttggaaatttgcgcgggcgtttacaaaaggcgcaagtcggcgaattttttttaggaatcttcccaggcaaacttctgacccagccattttcaaacgccgtaaaagcttcttttcggcacgccgcaaaatgggcggaatctttttaatatctatcgtttcagtgcgacaaaatctcccttcgatacgctcccgaaggcgatcgaagacaaagcgtaagaaatcctgcaaaagtcctttgaacgcgcagaaaggctccgcgcatgaaagactgcgcatgaagagcgcatacgaaagatgcgccatgtagcgtgcacgcgaaagcgagaactttttcccctcgcgaacattcgcactttcgccgtcgcattcttttttcgtcggcatgcccttcacggcttccctttgcgaaaattcaattttccgcatgcccaagtgcgagcttcggatttgcaaaacgggcaggcttccccgcttcggacgcgccccgacaggcgtaaatttcgtccgataacgcttgacgccggcgcaaaaaagattgaattgaaaatagcgggcctttacccgaaggcaaatactgcgcattgcgattttctccgcggcacgcgtttgccgcgataaatatgtgcgcagtcgaaatcggccattgcgcgcgcaagcgcgcggcaaagcgggcggattttaaccataagcgcatttaatcatacatacatatccgatgaaaaacgaaaacgacaaactattcccggaattcaaagaagccgcttaccaagagtggcacgccgaggccgtgaaactgctcaaaggcgcgccgttcgacaagaagatgcttacaaacacgcctgaaaaaatcacgctcaggccgatatacaacagggaggacgtcgattttgaaatctccctgcccggaaccggagactacgtgcgcggcacaagaatagacggcgacaaaatcgagccgtggaaaatctcccaagagctctccgcgggacttccggaggaatttaacgcaaagattttggacgcgctcaacaagggccagaccgccgtcgaaatagtcctcgacaaaccctccggctgcggcgcggacgccgacgaggcggacaaatccgcggtcgcccgcggcggactctccgtttgcacggcaaaggacttttccagggcgctcgacggcgtggagaccggctgcgtcgagataaacgtccacaccggctgcaaggccgccgcaatcgcggcaatgctctacgcgtcgcagaagggcaaaaagctctcaggcggaatatacttcgacccaatcggccagctggccaaaaacggaaaaatttgccgcactcttgactgcgccttcgacgaaatgttcgagcttgcctcatacaacgccgccaacatgccggagttcggggcgataggcatagacacgatgccctactcttccgcgggcgccagcgcggcggaggagcttggcgcggcgatggcaacgt

SEQ ID NO: 4429 - DNA, 23186 bp, synthetic construct
  source 1..23186: mol_type = other DNA
  misc_feature 1..23186: note = Synthetic
ctccgcgcagaagccgaagtctgccatcatcttcagcgtcattgccacaaacggcctggaaaccgtgccccccttgagccttacgagggtgtcggagtaggccaggggggccgccatgaggacggccgagagtatctggctggattcggccgcgtctatttccatttcgccgccctttagcccgcaggtcttcactgtgaacgggaagcagtctttcgcgcctttgaatgcaaacgacgcgccctgggagcgcattgcctcgatgaggccgcgcatcgggcgcctgcgcatcgcctcgtccgagtcgaatgagtattcgccgcccgtctgcgagcatacgaacgcggtgaggaacctcgctgcggtcccggcgtttccgacgaagagcgaggcctttttcgagcattctccggaaactgtcaccgagccttccgattcggagacgtcgtagcccagggcgcggaggcagtccatcattatggagctgtcgcgcgatgcgagcgggccgaagagttttacgggatagtcggacatggccgcgagaagcagggccctgtttgttatgctttttgagccgggcacggataccgccgcgcaggcccttcctttgaatggggtgattttaagcgtgctcatttgttgtctgcgccgggtgcggcgtttttttatatatggggttttccggtttggttttccgcgccttttgccgcctgcaagcggccttccgggcgggtttccggggtgtcgaggcgaaggcgcatcccgcgcgccgcatccaggaaggcggcctggcttgcggcgtcgcgccgggcgattgcgtctgaaagctccataattttgcgggcgtattcgcgcagccctgcggatatgttttccgcgttttctgaaaatatcccgagccacatgccggtgtcgcttttggctatcctcgtcgtgtcgcggaagccgtttccggcaaacttctcaaaccattccgggttttccaaggccaggacggcgagcgcgcttgcggcgcactgggggatgtggcttatcgcagccgctatcctgtcgtgggtttcggggtcggtgaattccacgcgcatcccgaccccttcccacatctgagcgattttctgggcatgcggcgaatccccgggggcgcacacgaagcacgcagccctctcaaagaggtcggggtcggcgttttccgggccggacttctcggagcccgccatcgggtgggaggggacgaaatgcgccgggctttcggcaaacgcttcggcgcatccgcgcgcaatcgaagcctttgtgctgccgacgtcggttgcgagggcgcctggcttcataaagggcgcggtttcgcgcgcgaggccgggaatggcgggggcgggggccgcgaacaccgcgaggtccgccccgcagaccgctgcggcgggggtttcgcacacctcgtcgcaccacggggccgcagcgcatttttcccgcgtggacgcgctgcgcgaccatgccgaaaccgacgcgcacatcctcctcttgcggagggcccacgccagcgaggagccaagcaggccggctccgattacggcgactttttcaaataaaatcatggctcaatctttgcaccggatgtgcccgagttcaaccaaatttaggcgcgtccgcgccggaggcgcaatttgcggcgtttcaaggcttgcggtttcccggaaaacgccttttattcccccgcttactgatatgaaaattgtgatgacgattctggggcgctttgtggcgttcatcccccgccggtgggcgcaggcgttatgcgcgggcatagggtggctcatcgcgacatttccgtcgccgaggcgccgggcgctctttgcgaacctaaggcactgctttcccggcctttccgacgcccggataagggaaatcgccctcgaatcatgcaggcgcacggtcgagatggccctgtttgtgctggcgagcccgtacatgccgctggaggagctgaaggggcgcataagactctcggatttcgtggcttcggaacttaaaaagcgcgcggaaaacccgaggccgctcgtgctcatgataccccatttttgcatgatggagtccatcaccctcatgcccgccttgagcgacgttcccctgcctccgaccggcgtcttctaccgccccttcgacagccccggcatggaggcgtggataaaaaagacgcgccagaagtacggcatagacctgctctcgcgcaaggacgggctcatgtcggccgttgactacctcaaaaaaaacggctgcgtcggcattttgttcgaccagaacacgaaccgcaacggggccctgtcgctcttttttgacagggtgtgcgcgtgctccgaaattgcgggtctgctcgtcgagcgcatcgactgcgacgccggcatattctgggcgcgccgcacgggcttttggcgcgcggaaatatgcgcggaatacgtcgcgcgggattcggctgagaacataatattcaagtgcaacgaatggcttgaaaacgccctgaaaaccgacggcgggctttgccgcgactggctttggctgcacaagcgctggaaaacccagtactaccccggcgaacgcttccgcctgcgccagcgcaaggacatcctgaaggagtgccttgcgcgccgaggactggacgccctgccgcgcaagactgcgttttttgtgcggatgccggacgggccgtcggggcttgtcgcctgccttccggccttgagggcgctccgctctgcgcggcctgacgcggcgttcacccttctggcgactccggaaagcgccgggtttttggaggcgaccggcctcggcgaacgcgtggtttccctcccggagtcccgctccggccgcgcggaggttctggacggcctgcgcctggaataccccgacgtccaaatacagtttgaagactccgccctggcggacgccgacgcgcgggcgataggcgccgaacagcgtttcgggatgcgttccgggcgcgcgcggcgcgggataggctgcctttaccgggagtgccccggagacgcttcaaagccctttgcgcgcaggcttgagctttttctcaaaaatttcgggctggacaagcccctcgatttctccccccttgcacttggtggcgggggaggggacgctgttctcttcttcggggcgggttcggcgactgtggggagcccgaactttggaccggaggggccggccggagatttgccctgcgcggttttttcagaccgggagtccctcgatgcggcacgcgggttcgccgcttcgcagcggggaggcgcttcggatgttgagactgttgcggacatgcggggcttggagcgtctttcgggcttttcccgcctcgtttttgcggaattttagacgtttaacccgttcttatgaacgctccgccgggccttctcgcgttggcgggaatttttaagtgttgcgcggcaaattttcgggtgctctaatgggcgcatatggaaatagtcgaatttaacggggccaaactttacaaatggaaggtcggggcgtcgaatttcgtggccgatcctgcgcgcggcgcgcggcttatgaactggtttctggagctggccgacggctccgtgcgcgacatcgtgtactggcccgatgatgccgacatgggcgcgggatttgcgcacgtcaggggcggcaacccgatacttttcccgttttgcgcgcgcagccacgcagacggcgtcgagggaaaatggaaggctcccgacggaagggttcttcccatgcctcagcacggatttgcaaggcagggcgccttcgagcttctggacgtgacagactacgccttcgttgcgcgcttcctcccctccgacgaatgccgcgcgtcatatccctacgagtacgacttcgtagtgacctaccgcttcaacgaattttctatagcctgcgacctgcgcctggacaaccggggcccgtcgcccgtcccgtggaaccccggccaccacttttatttcaagatgccctggcacgacggggcgtcgcgcagggattaccgcataatttgcgacgcaaaaaaggccttccgcctcgacgaacgcggggctctcgtgccggtcgaggcgtccttcccgtgcgatttttccgacggggcgctctggaaccggataaactgccgcctgaaaacgaacatcgtgaagttcggcccaaagagcggcgaggaggatattacgatgacggtcggggagtccccgaggccggaggccgggacgagcgtcgtcacgtggagcgagtcggaatccagcccgttttactgcgtggagccgtggatggggcctccaaactgccaggagtataaaagcggcctgcatattgtggagccgggggcttcgcagaccttttctgtgcaggtttcaatattttagccgctgcaatcccgcctggcgcccggcgggcttcgcgcgcttttgctgccagccggaacgagtggggtatgggggctagccgtctcccaatctctcggcgcacgcggagcgcatttcaggcggggcgctttgattttttgcatcttgggccggaacaatccgtgccgcgccgcgttagccggcaagcgtggaatcaatgcgcagaacttttgcggccgcctcgccgtggcttactcccttaaaccgtggaatatccagctcttgcgggagtttccgcagatatgcgccctttgcatgtggccagtttatactcgcggccttgtccgctttttttacgcggggcaaagctcttttttaaaatgcgaagtccgcacacggctttttattccattccagggaaatccggaaaggccattgctccgcgaaaatccgggcaaatttcaaaaacgcgctgcgccatatctgaagcgggattcttccgcgccgcttccgcagccggacgctcccaaaacttccggactctccgcatgtaaaacagggcaagcatttgcaggctatgcacgcggcgggggcgaagaccgctccggtaaacgctcctgccgatataggggcttttccccaaaggtttgattctctttttaaaatcttgcctgcggcaaaggccgccgcaagggtgcgcaaaaaaagcgcccggaaatatccgggcgccccttgcgtttttttgaaagtgccgcggttttacgccgcacaatcggctgggaatattacatcattccgcccatgccgcccatcatggaaggatccatggcgggtttcttttcctcgggcttgtcggaaatcatgcattccgtggtgaggagaagaccggctacggagcctgcattctggagcgcggtgcgcgtgaccttcgtggggtcgacgacgccggccttgaagaggtcttcaaacttgccggtggcgacattgtagcccattccgcccttgctcttgaggacttccttgactacgagcgcgccttcttcgccggcgttggcgcagagctggcggagcggagcctcaatggcgcggcgaactatcgcggcgccgacggcttcgtcgccttcgagggaggtctggagggcctcaatggccttggcggtgcgcagcagggcgacggaaccgccggcgctgatgccttcttcaacggccgcgcgggtcgcatggagggcgtcgtcaacgcgcatcttcttttccttcatctcgggctcggtggcggcgccaacattgatgacggccacgccgccggccatctttgcgaggcgttcctggagcttttcgcggtcgtagtcggaggtggtctcctctatcgagcggcggatctgctttacgcgggcctggatgtcgctggatttgcccgcgccttcgacgatggtggtgttttccttggagaccgtcacgcgcttggccttgccgaggtcggcgacctggacgttttcaagcttgatgccgaggtcttcggttatgcagcggccgcccgtgaggatggcgatgtcttcgagcattgccttgcggcggtcgccgaatccgggagccttgaccgcgcagacgttgagagtgccgcggaggcggttgacgacgagggccgcgagggcttcgccttccacgtcttctgcaattatcatgaggggcttgccggtcttggcgacagcctggagaatcgggaggaggtcctggaggctggagattttcttctcatggatgaggatgtaggcgtcttcgaggacggcttccatcgtgtcggcgttggtgacgaagtagggggagaggtatcccttgtcgaactgcatgccttcgacgacttcgagggtcgtttcgatggacttggcttcttccacggttatcgtgccgtccttgccgaccttgtccatggcgtcggcgatgatgtcgccgatttcggaatcccagttggcggaaacggttgcgacctggcggatttcttcgcggtccttgacggtcttggagttctttgcaagctcgcttacggccgtctcgatggccttgtcgatgccgcgctttacaaatatcgggttggagccggccgcgacgttgcggaggccttccttgtagatggcttcggccagcaccgtggcggtcgtcgtgccgtcgcctgcgttgtcgttcgtgcgggaggcgacttcgcggaccatctgcgcgcccatgttttcgtaggcgtcttcaagctcgatttccttggcgacagtcacgccgtccttggttaccatcggagccccgaatttcttgtcgatgagtacgttgcgacccttggggccgagcgtggtctttacggctttcgccaggagttcgacgcccttcagtatccttttgcgcgccgcttcgtcaaatatgagttgttttgccatatgtgtttccttcttgttcttaaattacttgatgacagcgaggatgtcctcttcgcgcaccagcacgaatttttcgtcgccggacttgacttcggtgccgccgtacttggcgatgagcaccttgtcgccgaccttaacttcaaaggcgcagcgctttccgttttcgtcgagcctgcccgagccgagggccacaacttcggcttcctgcgacttttccttggccgcatcggggatgatgatgccgcccttgatttgttctttctcttcgatctgctttaccagcacgcgatcgcccagaggatgtatcgttatttttgccatatgattattcagtttgagaattggttggatgttaaatttgaaaacccaatataaaagggcaaaagcggcgggcctgcaaagcttttttgaagcattgctcggcccgcgcggcccggcttacttgtcggagtcctttttctcgtcgtcaaccacctcgaaatcggcgtcaaccacgtcgtcctttttctcctgcgcgccggcatccgatgcgcccgcttccggggcggaacccgccgtgccggagccggatgcggcctggaacgccgaggcgttctcctggaggagctttacgagcttttcaacttcggcctttgcgtcgtcctttgtaaggtcgctcttttcgagcacctttttggcgtccgctacggcggcgtcgaacttggacttgacgtcggccgaaagcttgtcgccggcgtccttcacctgcttttcagtctggtaaatcatgttgtccagctcgtttctggcttcgacggactccttctggcgcttgtcctcggcggcgtgcatttcagcctccttggtcatgcgctcgacgtcctccttggagaggccgctggagccggttatcgaaatctgctgctccttgccggtgcccttgtcctttgccgacacgtgcaggataccgcttgcgtcgatgtcgaaggtgacttcaatctgcggcaggccgcggggcgcgggggggatgccgtcgagcctgaagttgccgaggagcttgttgtccttggccatcgggcgctcgccctggagtatcttgatgtccacggcggtctggttgtcggagtaggtcgagaatatctgcgtggccttcttaggaatggtggtgttgcgctctatcatcggggtcgaaactccgccggccgtctctatggagagggtgagcggggtcacgtccagaagcagcacgtcgcgcacgtcgccctggagcacgccgccctgaatggccgcgccgcgagcgacgacctcgtcggggttgacgccctggtggggcttcttgccggcgagcttttcggcgagttccacaactgcgggcatccttgtcatgccgcccacgaggacgagctcgtttatgtccttggaggcgatgtcggcgtccttgaggcaggcctcaaagggctttaccgtcctctggaggaggccgtctgtgagctgctcgagcttggccctggtgagcaccacgttcaggtgcttcggcccggttgcgtcggcagtgatgaagggcaggttgatgtcggtctgctgtgaggtggaaagggctatcttcgccttttcggcctcttcgcgcaggcgctggagcgccatcgggtcgttcttgaggtcgatgccgttttcctttttaaagccttccacgagccagtcgattatggccgcgtcccagttgtcgccgccgagctgggtgtcgccgttggtggccttcacctcgaacacgccgtcgccgatttcgaggacggaaatatcgaacgtgccgccgccgaggtcgtaaactgcgatggtttcgtcgctcttcttgtcgaggccgtaggccagcgacgccgcagtcggctcgtttatgattcgcatcacttcgaggcccgcaatcgtgccggcgtccttggtcgcctggcgctgggcgtcgttaaagtacgcgggaacggtgatgacagccttcgtcaccttttcgccgaggtatgtttctgcgtcggatttgagctgctggaggaccatagccgaaatctgctccggcgtgaaccgctcggtcttgccgtttacgtcgcattcgatggcgacgccgtcgttgtcgccctttacgattttgtaggggaaattcttaatttcgtcctggacttcgctgaatttgcggccgatgaagcgctttacggaataaaccgtgttcttcgggtttgtaactgcctggcgctttgccgcctggccgacgagcctttcgcccgtctttgtaaaggcgaccaccgagggggtcgtcctcgcgccttccctgttgggtattacgacagattcgccgccttccattacggccatgcatgaatttgtcgtgcctaagtcaatgcctaatattttgctcatatgccactttctttagcacaaggtgtgccagattttttatttgttgtagttttagttgatttttaattagttgcggaatctgttccattgggttccgcgcaggttcgccgattttttgcgtgtgcgggcggttttgggtgggacattttggctcatttttgcccggcctgtcccacttgcgcccgcgcgcgccgcatcttggaacgcccttttataaaaagggttatcggcaggaggaggatttgctgcacatttttttggggggaggctttttgcggctgcggtttttggggccgtttgcgcccaggccgccctttggcatgggctttcggcctgggtatcataaatggaaaatgggccgaaaggcggattggcaaatggaatttcatccatggtgggaaagtccgcctgcctttcgcgggacgccgcccggctccccgtttctttcggggggcgttacaatctatggaatcccctctgcgtttctaaatctggcgcttgtcccgcactggacgcccggcaaattccggcggacggaacgcatggcaaaaatggggtgcggcatgaaaatggaaatacggccgcagcggcttcatccggatgcatgaaaaaaataaaggccggacaatgtccggcttttatttggtggaattatattccttgttaacggatacgcacctgagtgcgccaatttttcaattgtgaaccattctttgatttctacaaaaccccatttttcagaggttgattccaatgatggaaatgatttttttaaagtcaacaaatattattgatgatttttgcattttgttgtaattttagattattatgaattatagattgggctttgacttgggcgccggttcgataggctggtgcatacttgaactggatgcggactcggcgccttgctcgctcgtcgacatgggggttaggattgcatctgacgggcgcgaccctcagacaaagtctccgcttgccgtctcgcgcaggatggcgcgcggaatgtcccgcaaccgcgacaggcgggtcatgcgcagggaggcgctcttgaaggcccttgtgcgcttcggcctgatgccggctgacaaggccgccgcagccggggtggctgcgggcaatccgtacaaattcaggcatgacggcgtgcatgaaaaaatcgagcttttcgatttggggcgggccatattccacatatcaaaacggcgcggattcaagtcgaaccgcaagacggactcgcgggattccgaatcgtcttcgatgaaggccggcatagagcgtctccgcggaatcctcgccggcaggacgctcggggaatacctctacgagaggctgcgcagcaatgagggaacacgcatgcgcgcaaggctcataaaggccaaaaacgaatatgaaatatatgccgacaggaaaatgtacgaggaggagttcgaccgcctctggagcgtgcaggccggattccatcccgaactcaccgacgccgcgcgggacgcaatcaggcggatcgtgtttttccagcggccgctgaaggttcccgaacgtggcaagtgccggtttgagccttcgctcgagcgcgcctatgcagcctatcccatctcgcaggctttcaggatatggcaggaagtcgccaaccttgaaatcgtctcgctcggcggggactcgccggcgctttcccgggaggacagggagaaactggcggatgaactcctgttcaaccgttccaaaaaggccaacaaggccgggcttttgacgttttcaaacatcagaaaaatactggggctcaaatccgtcgagttcaaccttgaagacggagtgcgcaagggcctttacatcgaccgcgtggatgccgcaatgtcggctccggaagtattcggcccgcgttggcgcgaaatgccagacgcagacagggaggcgtttgtcgactttctttcatcgcacggcgacggggagtcggcttcgtggctgcatgaaaaattcgggatttcggaggaggcggcggagaatgtgctggacgccttccagtcgctcccggccgggaccgtgtcgcttagcgcggccgcgatgcggaaaattctcccgtttatgaaagacggcgcgctctatcacaacgcctgcgcgcttgcgggctacgccttcaactctttcggctctgaaacccgcctcgaacgcctgccttattacggcgaaatcctgaaggccgccgcgataggggccgacccgtccgccgatcccgtgaaggagcctgagctgcatttcggcaggattgcaaatccgaccgttcacctgatgctaaaccagcttcgcaggctcgtgaacggtattatcgaaacttacggcgcgcctgcggaaataatagtggaaagcgcgcgcgacctgcccctcggagaaaaggggctggccgaactgaaggcaaacattgcaaagaacaggaggcgcaacgaggaaatcgccgccgagcttgaaaaatgcggggttgaaaacaactatgaaaaccgcatgaaataccgcgtctgggagaatatgaatccggacagccttgagaggcggtgcccgttttgcgggcgcccggtgtcgctccacgagctgtttaccccggcatttgaaatcgaacacctgctgccttattcgcggacgtttgacgacggcatttcaaacaaggtgatatcctgcgcgcgctgcaatcgccacaagcgcaaccgcacgccgtttgaggcgttcggccacaatcccgaagggtggagctgggatgatatctgcgctcgcgcgtcgcttcttccgaaatcgtcgcaatggagattcgaatctgatgccattgaaaaattcagcgagaacggcggggatatgatagcgcgtatgctaaacgacacgcgctacatatcaaaaatagcccgcgaatacctttcggccgtcgccgacccgatgaaaatctgggccgtaaacgggcgcatcacgtcgcttttgcggggcaaatggcatctcaacgaaatcctaaaccctgccaaccttctctccggcgaagagcgcggggttaaaaaccgcaacgattcccgccaccacgccatagacgcctttgtgattgcatgcgccggacattccacgatacgccgcatttccgaatgcgcaaaacttgcggaagaggccgggttgcagaaacttgtatccgcccttggcgacccgttcccggggttctcgtacggggacttcgaccgcatggtttccaaaatcctcgtatctcacaagcccgaccgcggcaacgcccgcggcgcggtgtcgaaaaataaaaccctcggcaagcttcacaacgaaaccgcaatgggcatggtcggcgcccccgacgcttcgggaaacgccatgttcgcaaagcgcgtaatgctcgattccattgagcccagggaaaaaaatgtgaatgaaattgcaaacctcaaagtccgggaagatctgctgaaaattctggaggaggcaaagaaatccgtttcgggcgaacctgcgctgaagaggctttggcttgaaaagctcgggcagtattccagcgcaaatggggtccgccgcgtccgcatacatgttccgcgcgccatttcaaaagttatcgggataaaggacaagtccgggaaagcgtacaaatatatggacaatgccgagaactactgcattgacatctacatcccttctggaagcgaaaaatggaattttcacatagtcagcatgtttgccgcgcactctgcggcggaaactcctccctggaggaaaaatgacccgcatgcaaagctcgtcatgcgcctctttaaaaacgacattgtggcctatgaaaaagacggggagagaaaaatagatagggtggccggaattgcttcccaaggacagatttcatttattccggtcaatatggccaagtgggatggaacgaatcctccaagaataaagcctgtatctcttcaaaacctgaacgcccgcaaggtttacatagacgagctgggcaggctttttgacccgggaaaatccagatattcggagtgatcaggccatatgcaggcgcaaagggtggttgaaatcagcgaggacggccggactctcggagtcgagcgcggctttctgaccgtccgccttgcagggactgaaatcgggcgagttccgctcgacgacatagcggccgtcatgtgcatgtcgaactggacgctcgtttcttctgctgcgtgttgcgagctcgcccggcgcggggttcctttggttgtttgcgacaaaaggggaaagtatcccgtatcctgctcaatcccgcttgaaggctcataccgccaggcggaggttatgcaggcgcaggcggatgcgccgcttccgctcaaaaagcgcatatggaaggaaatcgtagtggcaaaactccgacagcaggcggaagttctcaagcggttttccgccagggatgctgcggccaaactcgtggccatatccggcatggtgaaatcgggcgattccggaaactgcgaggccaggggggcgctgatatattggaggggcctcatgggtgaaaacttcaggcgagaccgggaatgtgcggatgaaaacgcccttttcaactatggctatgcggtattgcgaagctgtgcaatcagggaaattgtggcttccggactgcatcccagcctcgccgtgcatcataagtcggcccccaacaacatgcgccttgcagacgacatcatggagattttcaggccgattgttgacgcggaggtcaagatgatttgtctggatgcggacacgggcctgtcattggataacaaaaaacggcttgtggattccgtgaaccgccgaatcgcattcggcgatattacgtcgaacgtccagcatatgctaaggctattttcgaggtctcttgccaggctttacatgggggaatctgatgccctggatataaggctggcgaaatcctcatctttatgatgggcaggcgcggaggtgtcagcggatacaggcttatgtggatggttgttatgttcgaccttcccgtcgcttctgcggcggacaggaaatgctatgcagagttcagaaacatgcttttggacaatggtttttctatgtcccagttctcggtttactgtcgtttttgcggcgcccgcgagtatgcgcagaagtacgtcaggctcataaaggttaacgcgcctccggacggaaacataataatattgtttttcacggacaagcagttcgcccaaagcatacagataataaaacgcgaacgcgtccgcatatctgagccgcccgaacagttatctttattttaaaaaaatctgcccgggttctgcaaagttagagaaaaagaccgttttttttgtgcgataatccatttaacaggttaatacacgctagtttatgaattatcagttgtagaaatcaaagaacggtagtcaatccgcaacggcagtcaagaccgcatccgccctcggcaggttgtagaaatcaaagaacggtagtcaatccgcaaccgtcgtcgaggatgagcgtccagaggccgtgttgtagaaatcaaagaacggtagtcaatccgcaacttcagcattcgcttctgcttccattaaaattgttgtagaaatcaaagaacggtagtcaatccgcaacggcggcgcagcaatgcttcccactttatacgttgtagaaatcaaagaacggtagtcaatccgcaaccaatcacaccagacgcttatcagctaattgagttgtagaaatcaaagaacggtagtcaatccgcaacaactatataagtttcaaccccatttttgaagttgtagaaatcaaagaacggtagtcaatccgcaacggatgattatctggaagttgcgttattggagttgtagaaatcaaagaacggtagtcaatccgcaacaaggaacacaagaaatgatgtgagtgtcaagttgtagaaatcaaagaacggtagtcaatccgcaactcataggccgcgagtccgatttcgttcagggttgtagaaatcaaagaacggtagtcaatccgcaactgtttgggtgaaatacaattaaaatatagtgttgtagaaatcaaagaacggtagtcaatccgcaacgcgaacgttgcgcggggccttcgggtttgtgttgtagaaatcaaagaacggtagtcaatccgcaacaaccgcctcgcaatttcccacggcgtcggcgttgtagaaatcaaagaacggtagtcaatccgcaacccgattccttatagtcctcgatttctttgagttgtagaaatcaaagaacggtagtcaatccgcaaccatcaaagcctacatgctgcttcaagagaggttgtagaaatcaaagaacggtagtcaatccgcaacgcttgttatacaggaggttgaacttgtagcgttgtagaaatcaaagaacggattatctatggtcgtcaagtgtaaaacccttgaaaagctctttaacaggtcaaaaaaaccccgccgtgggtatcggcggggcagacctcacagaaaggaggtattaagatgaaaaaaacggttctgcaaatcgttcttatcgtaataagggcaatcatcgacatcattgtcatagtgtcaagttgaaaatcttgacagcaggcccttcgacctgcgcctcctttctgttttaaagagcatcactcaacaaataaaaatcagaaaagcaatacaatgagtgttatttttcaatagggagaatttcaatccaatagccgtcggggtcttcgatgaaatacaggcccatcttttcgttttcaaagcatacgcaccccatctccttgtggaacttgcgcgcatcggcgtagtcgcctgcgacgcgcaggcagaggtggctttcattctccccgagctcgtaaggtgcgccggcgtggtccctcagccatgtgagctccaaaagaaacgggctttgtccgtccgaaaggtaggacagtatgaaagagccgtcgtccgcgtttttgcgccttgcctcctttagcccgagcgccttttcatagaaggccaggctcttttcgaggtcgcgcacgttgatgttgaagtggtcgaattttccccttatctgcattgcttatccttttctcttgccggatggtttccggatgggccccgcgcgtcaactcaaaattctgcgctctcgcattcgcgcgtccaggaaatgaagcgcgcgcccgcagattcggcgaattcccgcagcgcggcggctttggcgtaccctttctccccgtcccatgaaaagtgcattggggcgaagttttttgcgcgcactgccgagagaaactgttcggcgccaagcatatactccccgcccagcctcggatccacgggaaacatcgcaaggtccagctccggggccgcccgcgctatttcgccaagttctgccagatagcggccctgcgcctccgcagcctcggcttccgtggactcctcccgccaatgccagttgttgaggtcgcctgcgtggaagattttccgcccatcaagctcaatcagaaacgagcatccggcgtcggtggagccgaatgcctccaccctgattcgtccgtctgagaaaactccgccttttttgagcagggcaatcccttccgcaggcgcgtccggcgggatttttacgtcgtctgaaagcacgtatttgatatccccgcgcgcggccttccatccgaagattccgggccagaagtggtctgcgtgggcgtgcgtcgcaagcgcgtagaatccgcctcggtctttcatcgccgcatgcacgggcttcagcgattcggccggatgtgtggggttcggaaagaagtctatgacaaccgacgccccgccgctttcaacgacaaatccgctgtggaatatgtaggtcagtttcattttaaaagtgcgtagagcgccgccgcgagtgcggctgcggccagtatggcaaataccgcgcaggagcgcccgcccgggcccccggatgcgacagccctgacggtctggcgccccggtatttcgatttctaccgaggagccgggcccgaatgtgatgcgcctgggcgccgcgccgaggtcggagacggctttgactgcgagggcggcttcggaaattccgcacccggcaatttccttcatctccttgactgccgatattttgctgccggattcaattttggcgtagagggaggaaatgtcggcctccctgccgtttattctgcatatgattttctgcatgggtttagtctttgcgcgttttttacgcattttgatggtttttgaatcggaatttgcaggccctcgtttaattgcgccgcccgatttgggatttttatggggaggcggttttgcaaatcaagccttttctgccggaggcgcagggcaggtggcggaatcggcgcggatggtaggggggcggcctttgcgcggcgggggatggcgcgcggcgttttgcaatcggcgtaagggccgggcttttttgggggagcgcaggccggattatgccactttgccgccgcagggaatggggatggaggggcagaataaatttgttgcagtcgccgaaaaaagtgcaataatacccgctttttcaaagtaagagatatggaaaaattgaaggtaggagtcacgggagcctccggatacgccggcatagaactcatgcgcatactcggccgccaccccaacgtggaactcagggcggtcacgtcgcgctcgctggaaggcaagcccgtagtggacgacatgccgtcgctaaggcacatgttttcgccggaatttaagtacgtcggctcggacccgtcggcgcaggccgcgatgggggacgtggacgtatggtttctcgcgctcccgcacggcgttgccgcagagtacgcgcgggcgcttctgggggccggaaagacggtgatagacctctcggcagacttccgccttggctcgcttgaaaggtacctcgaattttacaagacgccccatccggcgccggatctcctcaagctcggcaagtatgtcattcccgagctcttcgaggtgtcgaagtccgaccgcctgatagcctgcccggggtgctacccgaccagcatactcacccccctgataccgcttgtgcgcgagcgcgccgtaagcctttcgggcatagtggccgactgttatagcggcgtctccggcggcggcaggaaggccgacctcaactattcctactgcgtaagaaacgagagcatgcagggctacggcatgcccaagcaccgccacctgtccgaaatagaggagcagctctctgcggcgggcggggcggaagtggtaatccagttcaacccccacctttccccggcgacgcgcgggatttcgaccacgattaccgtcccttccaagttcgccggtaccgacgaggtttacaggatatggaacaagtgctattccggcaggcgctttgtgaaggttctgccttccggggtgttccccgacacgctctgcgtgagcggcacgaaccgcgtggacatatccgccgtgtacgacccgcgcacgaaaaacctcgtgataaccagcgccgtcgacaaccttgtgaagggcgccagcggacaggccgtccagataatgaacctgatgttcggcttcgacgaggcagccggcctcctgtaagggcgcgcctgccgcgccttttgaaagttcttttaacaaaaacaaagacggaccgcgccacagctccggcgcgggaagtccacagctcccgggctcgtccggggcgaaaggagtcatatgagcaaaccctattccattgaaatttccgacaaatgcgcgggccttgcggaagtcccgggcttttccctcgcgggcgtggcctgcgacatccgaaacaaaggcgactccgagcgcctcgacctcgccctcataaagcttgaggggccgcgcccggcagccggggtgttcaccacaaacgacgtgaaggccgcgccggttatgaccgacatggcgcacctcgcgcgctcgcaggccgtcggggcgattgtggcaaacagcggcaacgccaacgcctgcaccggcgaggaggggctgcgcgacgcctccgaaatgtgcgcaaaggtcgccgcagggctcggaatcgacaagacccaggttctcgtctgctccaccggccgcatcggcgagcgcctgccgatggagaaggtttcaaagggcattgccgaagccctggcttccgccgccccgacaaaggaaaacggcctcagggccgcaaacgcgatactcacgagcgacacccgcataaaggtggcatgcgcccgggtcctctgcgagggcaggatgttcaccgtggccggaatggccaagggcgccggcatgatagagccgaacatggccaccatgctttgctttgtcggaagcgacatcgacgccggccaggccacgataaagcaggcgctcaccttcgcggtcaacaagtctttcaaccgcatcacaatcgacggcgacatgtccacaaacgacaccgtgattgctgtctgctccggcaaaagcggggtttccgccgagcccggcacggtcgttttcgaggcttaccaggaggccctcacaaaggtctgccaggagcttgcccgcaagatagtttcagacggcgaaaagataacgaaggtcgtcgaaatgcgcgtcaagggcgcggcgagcggggggcaggccgaaaagatatgccgcgcgatatgcaattcgctccttgtaaagtcgtcgtggtacggcggcgaccccaactggggcaggctggccgacgccgcaggatacgcgcgcacggggatagactttgcaaaaatcgacctccactacgacgacatccccgtcatcctcaagggcgagccccaggcgcagaacagggccctctggaagaaggccgtggccaagaaggagtttgtcataaccatgaacctcaacatgggcgactgcgaggagtccctgcttacgacggacctcaccgaagcctacgtggatttcaacaagggcgaatagggcgatgaagtaccagcatctcgagtccgtcacaaaaaaggcgggaatcctcatcgaggccctgccgtacatacagaagttcagaggcgcaacgttcgttgtaaagtacggcggcgcgttcatggacgaccccgacccgctcgtcagggggcgcgtggcgcaggacatcgccttcctggccgcagtcggcatcaacgtcgtcgtcgtgcacggcggcggaaaggcgataaaccgcgcgatggcgaagtcgggcttgcaggcggagtttaaaaacggcatgagggtcacggacgccgcgaccgtcaagatagttgaggacgttttaaataacggcgtaaaccgcgagatttgcgagatgctcgcctccagcaagtgccagccggccccgctcgtcggcaactcggtgctctcctgcgaaaagcatatttcaaaggggcccgacggcgaggatgtggatttgggctacgtcggcaaaatcacccttgtcaaggcaaagctcataaagaaggcgatagccgaggggcgcacgcccgtcatatcgcctatcgccctcggcccggacctccacccgtacaacaccaacgccgacgtggcggccgccgcggtcgcctccgccctgaaggcccgccgcctcgtttttttgtgcgacatccccggcctcatgcgcgaccccaaggatccggacacgctcatttccaccctcaaggtttccgacgtggacgacctcaagaaaatcgggataatcggcggcgggatgctccccaaggtcgaaagcgccgtggaggccataaaaaacggcgtcaggcgcgtccacttcatagacggctacatgccccacagcctgcttcttgaaatattcaccgacaagggcatcggtaccgaaattgtcaccgaatgatgaacacaaagcaaaagtcagacaaattcacagtcggctgcttcggggaccgcgatacggttctggtccggggcgacggcgtgcgcgtatgggatgaaaacggcaaaaagtacctcgacttcggcggggggattgccgtgctcagcctcggccactgcaacgcaaagattgcggatgcggtgtgctcgcagatgcgcacgctcgggcattgcagcaacctctatataaacgtcccgcaggccgacctcgccgaaaagcttgtcggagccctgggccccggaaaggtgtttttctgcaacagcggcgcggaggccaacgaggccctgctgaaggcggccaggctccacggcgtccgcgtctcgggagccgaggggcgcaagttccgcgtggtggtggccgtcaacagcttccacggcaggacgctcggcacgctttccgccaccgtgcagaaaaagatacagaagggcttctcgcccctgatgcccgaattttcctacgccgagttcaacaatcttgaaagcttcgcgggagtcatgggcgacgacgtggcggcggtgctggtcgagccgattcagggcgaaagcggcgtgctgccggcctcgcgcgacttcctcaagggcctgcgctccctgtgcgacaggcacggggccatgctccttttcgacgaggtgcagtgcggggtggggcgcaccggaaagttcgccgcgttccagaagttcggcgtaaagcccgacgcaatctcgatggcaaagggactcggcggcggcttccccatcggggcggtatggctttccaagccctatcaggacattttcaccccggggtcgcacggcacgactttcggcggcaacccccccgcgtgcgcggcgggcaacgccgtcatggacgaaatcaaatccaaaaagctctgcgaaaacgccgataaaatcggcaggctcctgctctccggcctgaaaaaggcggccaaggcgcatcccgacaaaatcgcggaggcgcgcggcatggggctgatgataggcgtgctcttccgcgagcccgtcaaaaatctggaagccgccgcggccctgaggaaaaacgggctaatcctcatcccggccggggccaacgcgctgcgcttcctgccgcctctgaacgtcaaaaagtccgaggctgaagccgccctcagaatatttgaaaagacaattgcaaaactatgacaagatcgtttttacgtgaaaccgacttcaccccggccgaagccgccgaggtgttcgcaatcgcaaaccgctacaagaaaatcaggggggcgggcaggcttgacgtcctaagggacgagtcctgggggcttatatttttcaaaaagagcacccgcacgaggctctctttccagacgggcgtgttcgagctcggcgcaaacccgatggtgctggaggcagacgacctgcaaatagcgcgcggcgaaaccatcgaggacaccgcaagggtgatgggccgctacctccacgggctcgtcatccgcgcctacggccacgaggttgttgaggaatttaaaaagcattccgggctccctgtcgtaaacgccctcaccgacgccctccacccctgccagagctacacggacatcttcacgatgatggagcatttcggaaagggcgagccttcgcttggggcgataaagggccgcaaattcgtattctacggagatacagcatgcaacatggcctactcgctcgcgattgccggcagcatgttcggcatggaggtcgtccttagcggcccggaagaattccgcccgtcgccggaactcgacaggttcttcgcagagggcggcgtgaagccttcatggacttttgagccggatccggaaaaggccgccgaaaaagccgacgtgctttacaccgacgtctgggtcagcatgggcaaggaggccgaaaaggccgaacgcctgaggaccatggccccgtaccaggtaaacgccaggcttttctcccgcgcaaagccggacgccatattcatgcactgccttcccgcgcacgcaggcgaggaagtgagcgccgaggttctcaaaagcccgcgcagcgtcatatttgacgaggctgaaaaccgtctgcatgtccagaaggcgataattaccggcctgcgcgaattttagcgcccgcttttaagcttgaaaccttcccgcccggaaaaggcctcgccttccgggcg

SEQ ID NO: 4430 - DNA, 15128 bp, synthetic construct
  misc_feature 1..15128: note = Synthetic
  source 1..15128: mol_type = other DNA
tgcaatctcctatcacagctttttttattgtccgaattttggggtacagttcattccgcgctttttttatccgacaaaaaccttacttttgcataagcttgaatatcagctcctcgtcgccgacataacccgatttttccgcaagctcttctatggtcaaattcggattttgctcaatcaatgccgatatagcctttttgatttccaaaattctgcctgccgctttcttacccgcctcaacacctggctgatggtaggcgtttatgccgataaacgaagcgtaaaagcccgtcgccctgtcaaacagcgcaatgattgcgccgattgatttttcggaaacatcgggcaatgtcaaagtaatagattccctgccctttgccgacaacgcctcgcgcgtgccaagcaagaacgcccgcaaatagtctccgcttgtaatgccgccctcttcaacttcaacagaaccgccctcgcgggatttcaatacttcgataaatgtaacaaagaaattgtttacgccgtcccttaactgctgaacatatgcgtgctggtcggtagaacctttgttgccgtaaacgcttatgccctgctctaccctgttgccctgcaagtcaaactccttgccgagagactccattatgagctgctgcaaatagcgcgaaagaagcaaaagcctgtccttgtaaggcagtatcaccatatcctttttgcccgcgccacccgtgcaaaaataccacatcaaggcaagaagcatcgcgggatttttcataaagtctttgtttgaagttgcctcgtccatcaggcgcgcgcccaaaagaagagcgtcaatgtctatcccctgcaaggcggcaggcaaaagcccgacagcggcaaactcgctcgtcctgccgccaacccagtcccacatcgggaaaaattccaaaaaattgcgctctttagcgtaattaaaaagcttgctgccgttgcctgtcgtcacaaccgagtgacgggcaaagtcaagccctgcgtcctcccactttttttgggcttcaagcatggcgtttcgaggctcaggagttccgcccgactttgaagcaatgaccgccaaagttttcccgagcttgcccgaaagacgctcaaaaaccaaatcaaaaccgtcggggtcagtgttatccaaaaagaaaaccgacatcttgtcagacgacgggcgcgacagggcgtcggcgacaaattcgggtcccaaagcagaaccgcctatgcctatgcataaaaggttttcaaattttccgtccgcacccctaatttcgcccgaatgaactttctttgcaaattcctttatgcgcaaaatgttttcgtctatctgcgacttcaattcatcagacggcgcaagagaagagtttctcagccagtaatgccccaccatgcggttttcatcgggatttgcgaccgccccgccgacaagcgtatccatatccgaaaaagccttttgaattttatcggacatcgaaccaaagaaagcgtctgtgaaattgacgcggctaatgtcaatggaaaaaccgagagacggaacttcgcaaaaatattttttaaaacgctgccaagacataatatacctcacaattaaaaattaatccccataaactaccccctctccccgactttttcaagccttcttttttaaggaacattacaatacaaaaagaggcgatgcaaaagcatcgcccttatttggtggaaataaattccttgttaacggacaactttaaatttaattaaagtccgaaaatgatttgccattttcgagcccgttctttgatttctacattgtttcttaatgaaacgttaaatatattcaattttttgagaaaatatgtcaacaaaattttttgccttgaataaaaataattttctattataaaaactcttcatgaaatatagattaggtttggatataggctcttcgtcaattggatggtgtatttttgaaacggtaaacaatattcccgtacgaattgtggatatgggagtcagaatttttacagacggaagagatccccaaaaaaagaccccccttgcggtggaaagaagaatggcgcgaggtgcaaggcgccaaagagacagacgcctgcaaagaataaacgcccttgtgaagcaattaaaatcctgcgggttaatgcctgaaagcaaagatgcaaaaaagctcgaacttaaaaacccgtacaaaataagagcaaaagccgttcatgaagaagtttctctttacgaattaggaagagcattgttccatataaacaggcgcagaggctttaaatcaaaccgcaaggctgacaaaggcgcggatgaaaacgaatcatccgcaatgaaaaaagcaataaaggatttgaacgaaaaattaggcggacaaactcttggggaattcctttatgaaaggcaaaataaaggggaaaatgtaagggttcgcgcagaaaccatcaaaaataaaaacatctacgacatgtacgccgacaggagcatgtacgaaaaagaatttgaccgcatttggaacacccaatcaaagttccacaaagaattgactcccgaattgaggcaaaaaattcactatatcatttttaatcaacgcccattaaaagttccggaaagaggtttttgccaatttgaaaaagatgagagaagagaatatcttgcaatgccgatttctcaaatttacagaatttacgccgaagtcgcccagcttgaaataattgcttttgaaggcgacgacaaacgccttacgccaagcgaaagaaacgcaatcgcgaacgaactcttgctcaacacaaaaaaattagcaaaaaaagacggtgaaataacttttgaaaaaatctctcaaaaaattttaaatcttccaaagtccacgaaattcaacctgcaaagcgaaaaccgcaagggactgttttgcgataaaactgctttcattatgtcccaagaagaatgcttcggggcagattggcataaattttcatttgaaaaacaaagcgaaatcataaacacaattttaaacgtttcggcaaaaccattatccgatgaagaattagaagaattattgtctataaaatattccatctccaaagaaaaggcagtaagcattttaaataaagcaatgaagcttcccgatggaacaggctcgctttcagctcttgccatgtcaaagatattgccacatcttaaagaatggaatatatataacagagcttgcgcactggcaggatataacttcaatcaaaattattccggagaaatattggataaactcccctactacggtcaagttttaaaaactgccgctctcggagcaaatccaaccgaagaaaacttaaaattccccgaaaaatactacggcaaaatcacaaatccgactgtccatattgccttaaaccaagtccgaaaagttgtaaataaactgattgatatttatggcaagcctgatgaaatcgtggttgaaaccgcgcgggatttgcctctcggcgaaaaaggtatttcggaactgaaaaaaaatcaggaaaaaaataaaaaagataacgacagaattgccaaagaactcgaaaaagttggggcaaagaataactaccaaaaccgaatgaagttcaaaatctgggaagatttaaacaaagacgagaagcaacgttgctgtccattctgcggaaaacaaattccgctaaatgctattgacggactattttcaagacactttgaaatagaacaccttttgccgttctcggaaacatttgacgattcaagaaacaataaagttattgcctgcaaagactgtaaccatatgtacaaaggcaaaaaatctccatttgaagcctttgggcatatcaaggataaagacaatccccgtaattatgacgccattttggcaagagcaaaagattttgtaaatgccgaaaaacgcctttggagatttcaagaagatgcaatgcggcgctttaaagacgaagaaagcgatttgatagcgcgcacaatgaacgatacccgctacatgacaagagcaacgcgggaatatctcacaagcattgtcgaagcaaaaaatgtctataccgttaaaggcgtaattacagggcttttgcgcaacaaatggggaataaataaactcttaaatgaccctgcccttccgccagaagaggcagatgaaaaaaatcgaaacgacaatcgccaccacgcaatagacgcttttattctatgcacgataagcagagccatgatacaaagaattgcccaatccgccaaactctgcgaagaagcgggatatgaaaaaatcgtctcagacatcggaaaaccttttgatgacttcgactacgaagaaatgaaaaagcatttggacaagatgcttatttcatttaagcctgacagaggcaatgccgtaaacgcagttaaaaacaataaaaccctcggcagtttgcataacgaaactgcgcttggagccattaattttaaagatggaagtaaaactctgacccttgcaaaaagaataaaaattgaaacattagatttcaaagaaaagaacatagaagaagtcgcagacgaaaaaatcaaaaaagatttaaaagcgatttatgaagaagttattcttgcaggtgcagataaaaaagtatgggttgaaaaacttagcaaatatgcaaaaaacaattccataaggcgcataagaatacatctaaggaataatgaattatcaacgcttattccaataaaagataaaaacggcaagatttataaatactatgcaaatgcggaaaattattgcatggacatttatttgccaagcggagaaaagaaatggcatttcaagcccgtttcaatgtttgaagctcatcaaaaaaattatattccaaaatggcgaaaaactgatccgcatgcaaaacttgtaatgcgactatttaaacaagatattttggcatttgaagaaaatggaaacattgtttataaaagaattacaagtatatggggaagtggagtcatccaacttatgccactgaataaaaactttatagataaagatgataaaagaacgagcaaaactccctcttctcttcaaaaactaaacgccagaaaggtctatatcgatgaagccggtcgcttatttgatcccggcaaggcaaaatattccgaataatggcaagacggcaaatagttgaaattacggaagacggcagagttttaggtgtcgaacgaggtttcttgattgtttcttgcaaaaaagaaattttaggtaaaattccattagacgacattgaagccgtaatctgcaattcaaactattgcctgtttacatcatcgcttgcaaatactcttgccgaatattccatccccttgttaatttgcgataaaataaaaaaatatccaaaatccgcaatgcttgcgcttgaatcgaactatcgtcaaggggatgtaattcaagcgcaagcggacgcctcggaacccatgaaaaaatcggcatgggcgcaaattgtaaaagtaaaacttcgcagacaggcaaatgtcttaaaatttctaaaaaaagaagatggcttcgtctttctaaacggaatagccgaacttgtgaaaagcggagacagcgaaaactgcgaagctcgcggagctgcgagatattggaaggaattgatgggcgaatattttaaaagagacagaaattccaacgatgaaaatattttttttaattacggctacactattttaagagctgcaacaataagggctattttatcggcaggattacacccaagtctttccattcaccataaatcaacaacaaattcgctaagacttgccgacgacttaatagaaccgtttcgaccttttgtagatataacggtaaaacaaattttagaagagcatacatctttaaatgtagaagccaaaaagaaacttgtttccgttttaaaccgacgtttccacataaaagaaaaggaaactacattgcaaagccaaataaatattctcgcaaaaaatttagcgcaatttttcttaaaggaaagcgatttcaaaaaaattcaagatattaaaatcgaagaatttctaacaaatgcctgaattgaaaagcggatacagacttatgtggatgatggttatgttcgacctgcctgtcgttcgagaaatagacagaaaacgtgcaaccgcattcagaaatgttttattagaaaacggatttgaaatgagccaattttccgtatatctgagattttgcggggaaaaggaacgcacaaaaaaatacatacgcataattcaagcaaacgcccctgaagaagggaatatttcaatcctattcttcaccgataaacaatttgcccaaacaatcaacatatgcaaaaaagaacgaattaaacaaagagatgtccccgaacaactcaatctgttttgaaaaaaagaacttttttataaaaattctcgtaaaaacttccattttttgaaagagaaaaagcttctaacttcgttcataaacacaaagttataaaagctataatgtagaaatcaaagaacagaagtcaatccgcaactcgtgtttcaatgtcgaatattgtttttttaatgtagaaatcaaagaacagaagtcaatccgcaacccctttccgtgtttagtttttggttttaaaaatgtagaaatcaaagaacagaagtcaatccgcaacaaaataaagccgttcgcaaacgcaacgcgcaatgtagaaatcaaagaacagaagtcaatccgcaacttgaggctttcatcatcagacagcccccgcaatgtagaaatcaaagaacagaagtcaatccgcaactttaatgttttcttgcaacttatttctttaaatgtagaaatcaaagaacagaagtcaatccgcaaccgattttagtcttctcacgaagaatattctaatgtagaaatcaaagaacagaagtcaatccgcaacccgccttttcgattttcaaaaacattttgcaatgtagaaatcaaagaacagaagtcaatccgcaacctttcgttttttagtttttttagtttttttaatgtagaaatcaaagaacagaagtcaatccgcaacttagagggcgcacactgtacgcactacaataatgtagaaatcaaagaacagaagtcaatccgcaacccctttccgtactttattgttttaaagtttaatgtagaaatcaaagaacagaagtcaatccgcaaccatattactttacttctcttttcctcacaaaatgtagaaatcaaagaacagaagtcaatccgcaaccaacgcgcttggaagcttggtttgaaaattaatgtagaaatcaaagaacagaagtcaatccgcaactaatattggcaacttgtaattccgtaatttaatgtagaaatcaaagaacagaagtcaatccgcaacgcctttcgttgagattaaaaagcaaattataatgtagaaatcaaagaacagaagtcaatccgcaacatccaactcgcgtttgccaaccgcggcaataatgtagaaatcaaagaacagaagtcaatccgcaacttgcattttttgcatttttcattatgtatcaatgtagaaatcaaagaacagaagtcaatccgcaacttgtacattcttgcaaaggcttttcctgtcaatgtagaaatcaaagaacagaagtcaatccgcaacccccataagtaaagcctcgacactggacgcaatgtagaaatcaaagaacagaagtcaatccgcaactaaaacatttaaaatctctcagctaaaagaaatgtagaaatcaaagaacagaagtcaatccgcaacacaacgacgcattttgcgaaaacttgcgttaatgtagaaatcaaagaacgaatgtcaagttttgaaacaatataaaaacattttaatgtataaatttgatagcggcgaagccggccaataatagaataaaaaataatgtcgctatcaggttaaagtatttgtctatccattcttttgcttttggtccgataaggtatattataaatcctacaaggaaaaatcttccgcctctgccgacaagcgacgccaaaaccaaagttattaaattcaggtcgaaaactcccgccgctatcgtgaaaatcttatacggaatcggcgtaaatgccgcccccaagactgccataaatccgtattctttgtataaattttgcacatactcaaaatgttcgtgcgaaaatcccggtatataggcgtaaaagaaatcctttaagttgtcccatgcgaagtaccctatccaccagcccaaaattccgccaagaaccgaaaacaacgtgcaaattcccgcaatcttccaccatcttttaggctcgcaaaaaacaagaggtatcaagagcacgtcgggaggtatcgggaagaatgacgactctgcaaacgagagtatcgcaagcgcccacagaccgtaaggcgtttccgcccatgcgatggtccaatcgtatattcttcgtaaaaaattggggttcggagattgcgcaacttcttctttcataaaaaaattcaaagattaaaagatttataatgcgcaatgcattaaactctgtaaagtttgtttttatcaaaataaaatcttgaaggctttttaattttatagcataaatttttaattctttagcactgataactttgcaaaagaacgcaatttattatgaaaaaaagcactattctactattgtcaatttttgcgtattctgcgatatttgcggaatttgccgtaagcaattctgcgaaagaaaacatcgcaaaaattggcgaaaccatagaattttctgcggcggacactcccgaagacgcgcgttttgaattgaagcaaaacggcaagcgcgtaagttcgggacaatacagcgaacctgtaaaattcactgcggaagtccctgcttggcttgaatttaaagtgtttgcgccgaaaatcaaagaaggcgaaaaaaagcgcgaagaaaaagcatgcggcgtggttgtcgctccagaaaagctaaagcccgcgaccgccgccccgaaagatctcgacaaattttggaatgcgtacaaaaaagaagtcgaaaagcagtcgccaaagaaagcaaagcttaccaaagtccgcgatttcaatgcagacaaaagcccgtacggcgcggagctttaccgctttgaagtcaaagtcgataacgctgaatacggctcaatcggcggcgtggttgcagacggatacatcgcaattcccatcggcaaagaagaaaagatgccaatcgttgctactttttacggagcgggctcttactccgccgatttgcgagacgctgtaaatttcgccaaagaaggcgcaatcggcatttcaatgaatccgcacgcaatttcgccagacttaaaggacgaggcgcgcaaagagtatatcgataataaagtccatcttgacggcggtaaaattccataccgcaaccgaggcataaccgaaactccgcaggacgtctattttacgggaatgttcaagcgcgtttaccaaaccctgcgccttgcgatgtcacgccccgaatgggataagcgcaacattgctgtccgcggattcagccaaggcggcgcacaaacgatagttgcggcatacctatgcccgaaagtaaacgtcataacgccgctctgccccgcgatgtgcgataacggcggcgaaagcatcaaacgccgctcaggctggcccgactgggttcacaacgaaacaatgacaacccagctcgaaaacggcagatatttcgaccctgcgctcatggcatcaaaaataaaggcaaaaatgtatgttggaatcggcctcatcgacaacacctgctcgcccactgccgtaacttcaatgttcaacaactacgcaggcaagaagcaaaaactctatatgcagggcgtcggacacggctggaacgacgagtggtcaaaaaccgaaaaagattttattttaaccaacatcgggcttaaaaaataaaaaccaaaacaaaaactttccaagaggaggcattgccctcctcttttttttagatgatttgtattggacgattggtttatttgaattttttacatccgtaaagcagaattattcttcgtttaatctcaaacgcattttacagattatacaacattattcgacatcataaaaatatggcggctctttaacgattaaaagaccttcaaacaagcacaaaaaaaagacggcttttaccgtcttttttggagaaatttgcaaaggaaaaaattttagtgttttacaagtcctatgatttcttttaaatcgacgcgcttttcgtagattgccttgcctacgattgcgccttccaaaccgcctattgcgtcgagttttattatgtcttccctgcttgcgactccgcctgaggcaatcaagcccattccgtagggagcaatcagctctttcatcgctttttgggcgggaatatttgcccccgtaagcattccgtcggttgaaatatcggtgtatatcaaatttttgacgcccattttagccatttcaaccgccagttccgacgcttttttttgcgagacttcaacccagcctttgattgccacattgccgtcttttgcgtctattccgactgcgattttttcgccgaaaatcgaaagaagctcctctataaattcgggatttgtacatgctttcgtgccgataatcgccctttggactccgcaatcgactgcgttttgaactgcacctacttcccgcattccgccgcccatttcgacaaaaattcccaaacccgcgattttttcgacagctttcagatttgcaagcccccccgcgaacgcgccgtccaagtccacaacgtgaattctgtcagctcccgcgtcggcaaacgacagcgcggcgtcgaacggattttcaaaatagacggttttatcgttagcctcgccctgtctaaggcgcacgcatttgccgtctttaatgtctattgcaggataaattctcattgtttcaaattcaattaaaagaaagcttttaggcaataaaaaagcggcgcaatttttacgccgcctgaaagattttactttattggttttatttttatgttgcggtagaacgtattgcccgtcccgtgcaagccctgaaagcctatgttgccgaccgtcgggacttccgccctcgcctttgccctaagccacgcaaacggctgcgaaccgtcgggatttttatccttgtcggtaaatttcgacatgtcgaaatcgtttgcaagttcgccgtttatataaacttttacggactgccccttgcagacaagttttagcgtattccattcgttgagcggctttgtgtagtttttatcgaccccctgaaagccaaataccgcgccgcaagttcccttcggcccgaattttccaagccaatagtcgtagtcggcaatttggatttcgattgattcgggaatccagttgtcgttatttttcgagtatatgataattccgccgttgcccgcctttgttactttaaagtcgagtgtaagctcgaagttttcatactcgtcgttcgtccacaaaatttggtctttcgttgacgaaagttcgcctttttcgttaaaagaccaaacaggctccttgcaatgggcattgcttaaatcttttttgaacaaatccttagcccctgcgcccaaggaaagcccgagcgcgacaaccgtaatcagaatgcgtttcatcataataaatttaagtttgaagcctttttgatttcagttcaagcgaaaattcaatcagcgccgatatttgcggtgagcccgccaaccgaatgcgcaagatgcgccacgcttgtagccacataagattcggcgttcaccttctgctggcgcgcctgcgacaaaagcgactgagagttcaaaaggtcggtaagggtgcttacgccgttatcgtaggcggcttttgtcgcctcgtatgcttcgaggctcgccttgaccgccgctttcgtgctttcaagctgttttagcgcgctcttataagcgtaatagctcgaccacacatttgcgacgacttctatttgagcctgcttcaattcctgtgccgccgcgcgttcctttgcctgtgcgcttataagttcgtatttgcgcgtaaagccgtcaaacaaatcccaagtgagcactgcggcaacggaataattgttgcttggcgtatggtagtagcggtcgtttgcaaaatcgccccactcgaaagagccttttgcgccgattttgggaagatagtcaagcttgtctgcctgcgttgttttttgggcggcggcgtaatttgcgtatgaagccaaaacgtcttggcgggatttcaaggcagacgccatcaggtcttcaacccgcttttgcgcctctgaactttcgggaattgatattttgtttgaaatttttaaatcatgcgtgatttcaatgcccaaaacgcgcgcgagattcgcccttgcctcttcgacagacgcccttgccgattccagcgaatattcggcattttttgaatttgccaaagccctgagcgcgtcctgcttgttgcctacggaatttttaaacctggcgtcggcggcctcgtacgcgcttttcgcgtcgtcaagattggcttttgcggttcttacggacgccatcgcattatagaaattaaaataagcgacgtaaacgttcaaaaccatatcctgcaagctttggttgtagctgaaatttgccgccctcaaggcgtcgcgcgccgcggaagactggctttcgcgttttccgaagtcaaacaaaagccaatttatgtccaaagatgcgccgtagcccgtatcccaaaacgtgccgactgcgtaatttacgaccgaaatctggcgcgtcttctgcctgtaaacatttgccccgacgctgacggacggataatactgcgcgtcaacttttcccttctgcgcggcgtaaactttcgcggaaaaccaatatccgcgggttgcagtgttgttttcaagcgcgatgtcaatcaagtcttcaaggctcagcaccttgcccgcaatcagcttttcagccgcacacaaggcctcttcctgattttccacaattccgtcggtttgaatttgggacgggcggtaataggtttcgggcattgcgtcggagggagctttccaaaacttggtaggatttttcgccacctgagtgtcaaccgagcaggctgcaagagccgcagttgaaagcgcaagagatattttaagaaaaaagtctttcatataaattccttaatcattcagattgcctctcgcaaagaaggggattttgtcgaaaacattgcgctgaagcttgtcaatccacaagtacacgacaggggttatgtaaagagttatgatttgcgagaaaatcaaaccgcctacaacaacgacgccaagcggtattctgctttccgcgtctgccttgccccagccgagagcaatcggaagcatgcccatgagagccgcaaaagtcgtcattataatcgggcggaaacgctccatgcacgcggtgtgcacggcgtcttcggggctcatacccctctcttctcccgctatcgcgaagtcaacaaccaaaataccgtttttcttaacgatgcccataagcatgaatatgccgataatcgaatataccgatagctggtagccgaagaagtagaggcacgcaaagccgcccacaaccgcaatcggcaaggcaatcaaaacggtaatcgggtgcaaatagctttcgtacaatatgcccaaaatgacatacatgacgaaaatcgcgactatcgccaatatcacaaggcttttgattgtctcggagaaagttacggcttcgccgacaaacttgccgtcaacaccttcgggcaagacttcgtccgcgatgggatttagccaattcatgacatctccaatggcaacgccttccgccaagtcgaatgaaatggttacagacgggaagttgtcgatatggtttaccgacacgggcgcgagagtcgtgctggtcgttgcaatggagctaaacggcaccaagtttgagatattgtacgcagaagacgcgatttcatcggagccaatcggagttatcggcattcccgaagtgacgtaagtgtcgggagcgaagaacaaagattcggcatttgcgataaacgacctttcgtcggcattggcttccaatatagtccaatactggttaaacgtggattttattaaatagaagtaaaacttcgcgtaagaatccctgaaagcggacgaaaaattgtccgcgcttactccgagcattgacgcatgctccctgtcgagatgcaaattaagctgcggattatccaagtacatgtcggaagatattgatgaaaaatacgttccgtacttttgatacatcctcgccatcagcttgcccgcggcggcgtaaagctcgtttgaatccattgaagttatagcgaactggtacttgccctgctgggtcgagaccgcgccagtcgaaattttcaaagtcggctcagcgtgcaaaagcattacaacgccgggtatcaaagacgcccttgcgtttattccgcttacgacttcgtttatgggcttgcggtcttttttgtccttcaagacagtgaaaactatgcccatgttgctgttcataaaccccgaaacgcccgaaaccgcaatggcatcgtttaccgcaggctccgacttcaacacctcaaaaacattgtcttgaagcctgctgatttcgttgggagaactcttggttgacgctacaaaaacgccggtcgcaaatccgctgtcgccttcggggaaaaaggtcttgggcaatacggacgcaaaatgcacggtgccccagaagcaaagaacaatcacaagaagcgtcaaaacattctgcctaagcatccagcgcaatgtcggagagtaaattttaagaaatgcgctttccaagcggtgcgccattttttcgattttggtttttgaattcggatccttgctgcgcggctgcaacattctcgaacacatcatcggagtaagcgtaaggctcaccacgcccgacattatggtggcggcaacaattgtgattgaaaactccttaaaaacccttcccacaatgcccgacataaagacaagcggaatgaaaaccgccgcaagggaaagcgtcatgctcaaaatcgtaaagctgatttcccttgcggaagcgaaagtagcctgcgtcggagtttcggaaaagtcctccattctgcgcacagtgtttt

SEQ ID NO: 4431 - DNA, 9241 bp, synthetic construct
  misc_feature 1..9241: note = Synthetic
  source 1..9241: mol_type = other DNA
gtcttattagtatttccattagggccacccattcctgaagaataatcattacttgcagctgtaattaaagaaataccggcagcttctactgcatcgtatgtttcattaattgcgtcattatcagcctcacgattaaatccacaagatgtacctaaagacatattaatacaatcaacacctaaaataaccgcgtcattaagtgctgcaagaatatcatctgtttcagcaccaccagatgtatcggcaaataccttcattaatactaattgagtattagtcgcaacacctgtaatagtatcatcttttccgccaatgataccagcaacgtgggtaccatgctcagaatcatatggatttacatcgtaatccttatctgcataatcatatgtataaggaatttttttgctataatataaataatcagaacaaagaaaggaaaaatactgatatggaaaataaaaaagtattcggtttcgatatgggcgcaaattcgataggctggtgcgttcagattattggagaagacgggttcaccctggagattttgggaatggggtcgaggattttcgaaaattcccgcgatcccaaaacccgggtgccgctttctgtggaaaggcgtatggcgcacgcgatgtcggtaaggcgtggcagacaaattatgcgcacgcgaaacctgtgttcgatattgcgcaaatacggcttgctgccttcgggcgaaaacgtttcggtttcggaacgcaatccttacaaacttcgggcgaaggccgtttcggaaaaagtggacatgtttggaatagggcgcgcgatattgcacatgaacaagcgccgcggattcaaatcaaacagaaaggccgataagaagtcggatggcgccgaatcgcggggaatgaaactcggcatatccaagctgcgggaggctatgggggatcgcaccctcggggaatttttgtacgagcgcaaaaaatccggcatgggaacgcgaatgagggccgacgccattaggggcaaaaacgaatatgaaatttacgccgaccgcggtatgtacgagtcggagttgcggcgcatttgggattgccagcggaaataccacaggaatctgaccgacgaaatgctgaacgagatttccggagcgctgttctttcagcgtccgttgaaaagtccggaacgcgggttttgccgttttgagcccggcgaaaggcgcgcttataaggcgtatccggtctcccaaaaattcagaattttacaggaagtcaacgcccttgaaatactcgatatcgccggaaacggcgaaggcataacgttgtctatgcggcagaaactcgcgcgcgcccttctcgaaaacgacaggaaaattgtaaataaaaaaggcattgcgacttttgccaaaatcaaaaaatttttggggattccccagtcgctgaacttcaattttgaaagcgaatcccgcaagggatttgacggcgactctacggctgccgttatggggtctgccgaatgtttcggggacgcctgggcggatatggacgattgcctgcgcgaaaaaatcgtcgatttgatactcgccgacaaggagggggaatttgcggctttgtgcgccgaaaaattcggcttcggagcggaaaagtcctgcgccattctcgacgcgggcggagagctgaaagacggaacggtttccctctccgcgaaagcgatgcgtaaaatccttccgcatcttgagggcggcgcgctttaccatgccgcatgcgcggaggccggatatgattttacggctgattacgatggcgaacgctcggatttgctgccgtactacggaaaaattttgaggacatccgttctcggcggaaatccgaatttcgatccggaaaagcagccggaaaaatattacggaaaaatcaacaatcccacagttcacgtcgccctaaaccagctcaggaaagtttacaataaacttgtggcggtttacggcaggccggatatggtcgctgtcgagacggcgcgcgagttgccgctcggcgcgaaaggcctcggggagctgctttcggagcagggtaaaaaccgcggcaaaaatctggaaatagccgaagaactcaaaaaattcggagccgcgaacaattaccgcaaccgcatgaaatacaaactttgggaggatttgaatccggattgcataaagcgcgcatgccctttctgcggacgtccgattgaacttcaaaaacttttcacgccggaatttgaaatagaacatttgttgcccttttccgaaactttcgacgacacccgggcgaataaagtcgtctcatgcgcgtcgtgcaacaggattctcaaagggaatcgctctccgtatgatgctttcgcaaatcgcgccggatatgattggaacgggattttatcccgcgtgtcggatatgcccaaatccaaacagtggagattccgcccggacgcatgggagattttcgaggaaaaatacggggattatatcgcgcggatgctcaacgatacgcgctatatgtcgaaactcgcccgcgagtatcttacatccgtcatagagcctgaaaaaatccttacggtgacaggttcggccacatccatgcttcgcgccaagtggggattggacgctattctcgacgactcctccccgctccaatttgggggagagtcggaaagctcggcggtaaaagcgccaaaagctcccgtgaaaaaccgcgaagaccacaggcaccacgcgatcgacgcctttgtgatttcgtccctcaaccgcaagcttatatcggcaatttcccaatgcgcgaaacgggccgaacaggcgcatctcgaaaacttgttcaaggcaattccgagagcgtatgagcgcatatcgtatgaaaagctcgaggctgccgtgaagtccataaacgtttcccacaagctcgacaggggcgatgccaaaggcgccctgaaaaggggaggaaccgtggccaaactgcacaaggaaaccgcgtacggcatgataggctcgccctatggcggcaaggcgactttggcgaaaagagttccgattttgtcggtagaatgcgatgaggggcaaatatcggaaatagccaatgcgaaaatcagggcggatttgtcgcgcttttgcgagcaggtttaccgcgaggcggctacgaaggaggaaaagaaatccatgtgggcgcggctgcttggcgaatattgcgcatcgaataaaatacgcagggtgagaatccacttgccgaaccgcgaattgaaaaaactcattccaatttccgacaagaagggcaaagtgtataaatatatggaaaatgcggagagttattgcatagacatatacaagccgcgaaattcggaaaaatggaaatttgaggttataaatatgttcgccgcgcacaagaacgagatgccgcaatggagaaaagacgattcgcgcgcaaagcttgtaatgcgccttttcaagcgcgacaccatagcctacgaggaaaacggagagtacaggcttgcggtggtggcgggaatggcgacgcatggacaaatcagcctgctcccgttaaatgtcgccaaagttgagggcaatcctccgaaaaaaacgccgtcagttctccaaaaactcaatgcacggaaagtctatgtagacgaaatcggaagggtttttgatccgtataaaagagagaatgaaagaatgcagagttgttgaaatatcggaggacgcgcgcttcataggcgtcgagcgcggatttttaatcgtaaaaagcggcggaatggaaatcgggcggatagagctcgattccatagcggccgtcatatgtacggcaaattatgccacagtcggaacttccgccatctccaagcttgccgaatatcgggtgccgcttgtaatttgcgatagaaagacgaaagtcccggcaagcgcggcaatcccgcttgcggcgcattggcggcagggcgatgtgatggaggcgcaggcgggatgttcgcttccgaaaaagaaatccgcgtggcggtcggtagtccgcgcaaaactttcgcagcaagcgcaggttctgaaatatttcggcaggggcgcagaaagcgaattgctttccaatctggcggataaagtgaaatcgggcgatcccgaaaatttggagggcaggggagcgtcagcgtattggcgcgcgctaatgggagaaaattttcggcgcgacagggaggctggggacgaaaatattctgtttaattacggatacgcgatattgcgggcttgcgcgattaggtctgtatgcgcggcggggttgcacccgagcttgggaatgcaccactgttctgcggggaacgcccatagacttgcggacgacattatggagcctttcagatgttttgtcgatattcgcgcgcgggaaatttgcgacggaggggatatttggcttacgaaggataataagaaaaagctctgcggagttttatcggagagatatttcagaaaagacaaaataacttccgtgtcacaaatgttggccgacgccgctacggaacttgccaaatactatttggaagagtgcgaatcttttcaggtagacatcgtaagaagccggcatttgaagggaatcggaaatgaaacttagcggctataaacttatgtggatgatggtcatgtttgatttgcctacggggactcctcccgagcgcaaaatgtacggggatttcagaaacgtgctgctcgaaaacggattcaggatgtcgcagtattccgtttactttcggttttgcggagagcgcgaatgctgcgcgaaatatgtgcgcgcgataaaaaatgcagctccgccggagggcgatatatcaatattattttttacggacaaacaatttgggcaaattataaatataataaagagaaaatttgtgcgtcctcccgatgtccctgaacagttaatgctgttttaaaaatgtaaaaaaaccgcaaattttttgaaaaaatctgcggtttttttaacgtaataatggcataactcggtattgcactcgcagttatgatattaatattgtagaaatcaaagaacagtagtcaatccgcaacaaggtaggggacattgtatggattccctttattgtagaaatcaaagaacagtagtcaatccgcaactgccgttattgtgttctatttccgcaagtcattgtagaaatcaaagaacagtagtcaatccgcaacgcgacggagtctttgacgaaaaggcgtttaattgtagaaatcaaagaacagtagtcaatccgcaacctcaaaattcgaataccctaccgacgacctattgtagaaatcaaagaacagtagtcaatccgcaacataaatttttttcttgacgacttagtaagtattgtagaaatcaaagaacagtagtcaatccgcaactaacactcggaattagctttcccgatgaaaattgtagaaatcaaagaacagtagtcaatccgcaaccaatcaaacttaccccaccaactataatagattgtagaaatcaaagaacagtagtcaatccgcaacttaccagggtaagtgaataagttacgttctattgtagaaatcaaagaacagtagtcaatccgcaactaacaataaactacttagacaaatgagaaaattgtagaaatcaaagaacagtagtcaatccgcaacttaccagggtaagtgaataagttacgttctattgtagaaatcaaagaacagtagtcaatccgcaaccgaaagtcgggttgccctgcgcgtccattcattgtagaaatcaaagaacagtagtcaatccgcaactcaagcttatcattagtcgcggtgtcgccaattgtagaaatcaaagaacagtagtcaatccgcaacaaacaatggctacgttaaagattaacgttaattgtagaaatcaaagaacagtagtcaatccgcaacataattgacatcgtaatcgtattgtcaagcattgtagaaatcaaagaacagtagtcaatccgcaacgaagtccgcaacctcgttttggacaggctgattgtagaaatcaaagaacagtagtcaatccgcaacattacgactacaccaccgtcgggcgcatatattgtagaaatcaaagaacagtagtcaatccgcaacaacgcacgccgaagcctacaaaatggcatgattgtagaaatcaaagaacagtagtcaatccgcaactttgcttacgcaatcggcttttcaaaatttattgtagaaatcaaagaacagtagtcaatccgcaacccaccatgttcagcgtcgggtcaagcgaagattgtagaaatcaaagaacagtagtcaatccgcaacgcgatagagtggataaagggcaaccgctcgattgtagaaatcaaagaacagtagtcaatccgcaacttcggagacgttcactgtcgcggacgcgaaattgtagaaatcaaagaacagtagtcaatccgcaacaacggtacgcagataaggcattatgcgctgattgtagaaatcaaagaacggtagtcaatccgcaacttttatcgcagacacgcccaacccaagaccattgtagaaatcaaagaacggtagtcaatccgcaaccagccaccgcgtcggggttcagcgtttcgaattgtagaaatcaaagaacggtagtcaatccgcaacgcacctgcaattagcgtatgcaccttttttattgtagaaatcaaagaacagtagtcaatccgcaaccgacgtgtacgaggctcttgaactccgcgaattgtagaaatcaaagaacggtgggcgagtgttaacagatgcggttttttgttccgccttcgagccaggatttcaggttttcggcggcgatttgtattaggcgcttcctggcctcgcgcgtcgtccaggctatgtggggggtgatgtggcagttctttgcggaaatcagcggattgtcgggcggcgggggctcggacgatagcacgtccacgcctgcggcgcctattttgccggattccagagcggctgccaaatccttttcgttgacgagtcctccgcgccccgtgttcacaatccacgcgccgtctttcatttttgcgatgctttcggcgtttaccatttccctcgtggagtcgtttaatacgcagttgagcgaaattatgtcggatgagcgcagaaggtcgtcgagggttgtgaagcgcgccgccgtgtcggaagtccccgcgggcctgctcggggagtatgcggcgacttccatcccgaaagctttcgctatctgcgccaccttccggcctatcgcgccgtatcccactatgccgatggtcttgccggcgatttcggttaacggggcgaggcagtaacagatgtcggcgcacttcgaccagtcgcctgcccttgcggactgcgaatgctcttccgtcttgttggcgatgttgagtatgtgcgcgaataccgcctgcgccacgctgtcggtaccgtattccgctatgttcgtcacggctatcccgcggcttttggcgcattgcaaatccacgttgttgtagccggtggcgagaactcctatatagcgcagttcgggaagggctccgatctgctccccgaacattggaaccttgttggtgaggacgacttccgcgccccttgcgcgctcgataattttgtctttcggcgtccggtcgtataccgcgacctccccgaaggcttcaaagctcttccagtcgagttcgcccatggtcgaagtgtatccgtcgagaattgcgattttcataaagcttgcctattctttttaatttccgattatcaatttttttatccgcgaatagaagcttttttgaagagaaatgaaatactctcacgtcatatgggacttcaacggcacgataatcgacgacgtgtctctcggcgtagaagtctttaacgaactgcggggcgactgcgggctgccgcccgtgacgaggtccgaatacgtcgaaaattttaaaattcccgtccgcgatttttacgaggatacggggttcgacttctcaaaattcgactttcgggaaataggcgagaaattcgccaggctctatggcgcgcgccgcttcgggtgcccgctgactttcgggttcaacggggcggcgagggcgctgtcggaagccggggtagggcagagcgtgctttcggcgtacgagaacgggcttttgaacgaggcgctgcgccactacgggctggacggattcttttcgagaatcgacggcttggacaacatagacgcgggctccaagaaagagctcggcgtaaggcacgcggcgagcctcaaaacgccgcccgagaaaatcgtcatggtcggagacaccccgcacgacaaggaagtcgccgacgcgatgggcaccgcctgcgcgctcgtcgcctgcgggcacgcgtcgcgccggaggctcgaaaagctcggcgttcccgtgttcgaaaatcccgcggagttcatagaggcgtttttcggcggagggctttgagcctcctgcccgtctccggcgatattagcgcgcggggaaccgccgcgcgcttccaacaaacaccccgctattttttgagccttttggcggcgatgtctgtgagttttgcggtcgattccctgaattgtttcaggcattctccgagctcttcggcgaagttcgagccgtcggaggatttttcccccagaagggacgacgcgagcgccgacagggccgcgtttttgtccggcgccgacttcggcattttcgcgagtgtttcggagagtttttctccggattttactatttcctctttcgcgactttgacatcttctccgcaagccgacacgtctgttttcctgattttggaaacggccttgtcgagattttcgcgcgttgcgtattttttgcagaaggccttggggtccttggggatttcgccgactttttcgagaaggttccggatttgcgaatattctttcgccgcatccgtttcagcgaccgaggcttttatggcctcggaattcatcaggctcttgaaaaagccgtctgcgggaagatccgcgaccggagcgaagacaaaagccgcggccgcggccgatattgcgatttttgttttcataactgaaactatgtccgcggcggcgcgggaaagtcaatgagtttcggagcggaaagtcagaatttccccacgctttccttcgcttccgccgcccgcttttccgcctgttttttatagctttgctccaaattcgcccgcatggccttgtcgaatgcggagtcgacaaagagcactccgttgtagtagagcttggcgcggacggagccg

SEQ ID NO: 4432 - DNA, 5027 bp, synthetic construct
  misc_feature 1..5027: note = Synthetic
  source 1..5027: mol_type = other DNA
acgcgctcgccgcataccgcggcacatatctcatcgtcagccacgacagggcgttcctcgacccgattgtggacaaggtgtacgagctcggcccgtcgggtttgcgcgcgtatcctggcaatatgacttcgtacgtcgaaaaaataaaggcggaggggcgcctgaacctgaaaaattcgcccgccgccaaaaagcccgccccttccttcaaggagcgcaaggccgaagccgcgaggcggagggcggaaatttcagccctcaaaaaaaacgtcgcgcggattgagggcgaaatcgcggcggcggaagcggagctcgcgaaaatcgaggccgaaatggcggagccggatttcttcaagcgcggcgcgcggtgcgcgtcggctgcggaggcgtacaacgcgctcaaatccgaaatcgaaaccctgtattccgagtgggaggcggtttccgcctcgcttgaagagtcgcagcccgccgactgatggcggttcgccgaaatttgcgtattgaaaaaacctgcggattttctaaaccatatttcccatgaaaaaagactgcttgaaaattgtatcgctcttcttcggggcggccgcgctgtttatgctctccggctgcgagcttccggaatcgtggaacgaccccgcgtatttcggcgacggcaacgatttgggcaagaacgtaaacggctccggaaccggatacgagacgtacgatcccgacgtgctctgatttttccccaatggggcggcgggattccccgggacgcgctttcctgcaatcctcccgttgcgcccgtaaagcgccgctttcgcgattttgcttccgcatttgtaccgccgcgccggtttcccgacgcgcatggggaggtcaattttgcgcgcccgaatcccgcgcgggcgcaaaacgggccgaacgaatgttcggcccttatttggcggactgaaagtccttgttaacggatatgcgcccgaaagcgcaacagggcttgcgccccagactccattctttgatttctacaatctttctttcgaaagcaacggaaatcctcggagtttttatggttatgtcaatatttttatttgatttattttttgatatttttaaaatttaattaaatttggtaaaaatactgatatggaaaataaaaaagtattcggtttcgatatgggcgcaaattcgataggctggtgcgttcagattattggagaagacgggttcaccctggagattttgggaatggggtcgaggattttcgaaaattcccgcgatcccaaaacccgggtgccgctttctgtggaaaggcgtatggcgcacgcgatgtcggtaaggcgcggcagacaaattatgcgcacgcgaaacctgtgttcgatattgcgcaaatacggcttgctgccttcgggcgaaaacgtttcggtttcggaacgcaatccttacaaacttcgggcgaaggccgtttcggaaaaagtggacatgttcggaatagggcgcgcgatattgcacatgaacaagcgccgcggattcaaatcaaacagaaaggccgataagaagtcggatggcgccgaatcgcggggaatgaaactcggcatatccaagctgcgggaggctatgggggatcgcaccctcggggaatttttgtacgagcgcaaaaaatccggcatgggaacgcgaatgagggccgacgccattaggggcaaaaacgaatatgaaatttacgccgaccgcggtatgtacgagtcggagttgcggcgcatttgggattgccagcggaaataccacaggaatctgaccgacgaaatgctgaacgagatttccggcgcgctgttctttcagcgtccgttgaaaattccggaacgcgggttttgccgttttgagcccggcgaaaggcgcgcttataaggcgtatccggtctcccaaaaattcagaattttacaggaagtcaacgcccttgaaatactcgatatcgccggaggcggcgaaggcataacgttgtctatgcggcagaaactcgcgcgcgcccttctcgaaaacgacaggaaaattgtaaataaaaaaggcattgcgacttttgccaaaatcaaaaaatttttggagattccccggtcgctgaacttcaattttgaaagcgaatcccgcaagggatttgacggcgactctacggctgccgttatggggtctgccgaatgtttcggggacgcctaggcggatatggacgattgcctgcgcgaaaaaatcgtcgatttgatactcgccgacaaggagggggaatttgcggctttgtgcgccgaaaaattcggcttcggagcggaaaagtcctgcgccattctcgacgcgggcggagagctgaaagacggaacggtttccctctccgcgaaagcgatgcgtaaaatccttccgcatcttgagggcggcgcgctttaccatgccgcatgcgcggaggccggatatgattttacggctgattacgatggcgaacgctcggatttgctgccgcactacggaaaaattttgaggacatccgttctcggcggaaatccgaatttcgatccggaaaagcagccggaaaaatattacggaaaaatcaacaatcccacagttcacgtcgccctaaaccagctcaggaaagtttacaataaacttgtggcggtttacggcaggccggatatggtcgctgtcgagacggcgcgcgagttgccgctcggcgcgaaaggcctcggggagctgctttcggagcagggtaaaaaccgcggtaaaaatctggaaatagccgaagaactcaaaaaattcggagccgcgaacaattaccgcaaccgcatgaaatacaaactttgggaggatttgaatccggattgcataaagcgcgcatgccctttctgcggacgtccgattgaacttcaaaaacttttcacgccggaatttgaaatagaacatttgttgcccttttccgaaactttcgacgacacccgggcgaataaagtcgtctcatgcgcgtcgtgcaacaggattctcaaagggaatcgctctccgtatgatgctttcgcaaatcgcgccggatatgattggaacgggattttatcccgcgtgtcggatatgcccaaatccaaacagtggagattccgcccggacgcatgggagattttcgaggaaaaatacggggattatatcgcgcggatgctcaacgatacgcgctatatgtcgaaactcgcccgcgagtatcttacatccgtcatagagcctgaaaaaatccttacggtgacaggttcggccacatccatgcttcgcgccaagtggggattggacgctattctcgacgactcctccccgctccaatttgggggagagtcggaaagctcggcggcaaaaacgccaaaagctcccgtgaaaaaccgcgaagaccacaggcaccacgcgatcgacgcctttgtgatatcgtccctcaaccgcaagcttatatcggcaatttcccaatgcgcgaaacgggccgaacaggcgcatctcgaaaacttgttcaaggcaattccgagagcgtatgagcgcatatcgtatgaaaagctcgaggctgccgtgaagtccataaacgtttcccacaagctcgacaggggcgatgccaaaggcgccctgaaaaggggaggaaccgtggccaaactgcacaaggaaaccgcgtacggcatgataggctcgccctatggcggcaaggcgactttggcgaaaagagttccgattttgtcggtagaatgcgacgaggggcaaatatcggaaatagccaatgcgaaaatcagggcggatttgtcgcgcttttgcgagcaggtttaccgcgaggcggctacgaaggaggaaaagaaatccatgtgggcgcggctgcttggcgaatattgcgcatcgaataaaatacgcagggtgagaatccacttgccgaaccgcgaattgaaaaaactcattccaatttccgacaagaagggcaaagtgtataaatatatggaaaatgcggagagttattgcatagacatatacaagccgcgaaattcggaaaaatggaaatttgaggttataaatatgttcgccgcgcacaagaacgagatgccgcaatggagaaaagacgattcgcgcgcaaagcttgtaatgcgccttttcaagcgagacaccatagcctacgaggaaaacggagagtacaggcttgcggtggtggcgggaatggcgacgcatggacaaatcagcctgctcccgttaaatgtcgccaaagttgagggcaatcctccgaaaaaaacgccgtcagttctccaaaaactcaatgcacggaaagtctatgtagacgaaatcgggagggtttttgatccgtataaaagagagaatgaaagaatgcagagttgttgaaatatcggaggacgcgcgcttcataggcgtcgagcgcggatttttagtcgtaaaaagcggcggaatggaaatcgggcggattgagctcgattccatagcggccgtcgtatgtacggcaaattatgccacagtcggaactttcgccatctccaagcttgccgaatatcgggtgccgcttgtaatttgcgatagaaagacgaaagtcccggcaagcgcggcaatcccgcttgcggcgcattggcggcagggcgatgtgatggaggcgcaggcgggatgttcgcttccgaaaaagaaatccgcgtggcggtcggtagtccgcgcaaaactttcgcagcaagcgcaggttctgaaatatttcggcaggggcgcagaaagcgaattgctttccaatctggcggataaagtgaaatcgggcgatcccgaaaatttggagggcaggggagcgtcagcgtattggcgcgcgctaatgggagaaaattttcggcgcgacagggaggctggggacgaaaatattctgtttaattacggatacgcgatattgcgggcctgcgcgattaggtctgtatgcgcggcggggttgcacccgagtttgggaatgcaccactgttctgcggggaacgcccatagacttgcggacgacattatggagcctttcagatgtt

SEQ ID NO: 4433 - DNA, 22916 bp, synthetic construct
  source 1..22916: mol_type = other DNA
  misc_feature 1..22916: note = Synthetic
ggtgggtcaatttgctggtaaacaaaacggcttccatccttcaaaacacggacaagaatcgttgtttcatcgtcttctctttggatcagaatattagcggaactatcctgtttggcagcccctaaaagctctgaggcccgcgtcaagcttgcaaagggactttcctgtggccgccacaaaccctgctatatttttaacagatatattcagccggatttcaggaaaaccctctctgtggaaatttttggtgaacagctcaagcttgacttcatccaaggcaaacaacgtcgcctcttcacaattaaatagtagttttaggtttttggtaagggaaaggaggctatcctcattaaaattagaatcccccacctggcttgcaaaattttctaacgtcttaatattttttcccttggaatcttccaaaacagaacctgtcttagggttttataccaggcgcctcgcctttgaaggcacccggcccaatgttatcataaaaaattagcggtaatgtattgattttaatactttatctgggttgatgacaagattttttcaattattataaatgccaatctatctaaactaaaatattgaggtaaacatttttcccgaaatcacaactccctgcctccaagccccagatattcaggagcttgaatcctcaattccggggactcagaatcccaagaccattttcagggttgtgtgttaaactattgtttttaaaccactcaatatttcggaagccgctatgccatccgatcctctcatcagcaaacccctagtctctaatatctcacctaccgagggacaattgcgtgataagcgaaagcgtacgactctgaccgctctgggagtttttatcgctctcatcggcatgacctttctggaaaactattttctacaggcccaatctatttcaatgatcggcaacaatattgccgttctcgcagtgttcaatgtcattttaatcctgctttttttattgatcattctgattacgcgaaatcttgttaaagtttataacgagcgcaaaagcaaaatcatcggttccaagtttcagaccaaattaatcatcgccttcttgatcctggcgctggttccatccatacttctcttcacggtggccagcaaattattcaccttcagtatcggcaactggtttaatttgcagatagaacagaccctggaatattccatggatattgccaggaattattattcagaccttgaaaagagagccctttcaaaaactaaaaatattgagcgctttatcaataatgaggaactgtacttaaagatgaaacgggacagattgcatgccctggcccgggaaaaagtagtcgaatataatctggccggtatcctcatttacgacaataatttaaaacctattgtccaggaattggattcctccaggctttctttacagaccccgttgaatttttccgaattaattaagaaaagtcttgatggcgaaggtgtgacagaaattcaaatgaccaataggggaagtctgatgattgtggtggttccccttacagagacccttgaaggaaaaatttccatatggggatatatcctcaccctcaatcctgttttaaaaagctcgttaagaaaaattgaaactatccgaaacacctttgaagactaccagcaacaaagttttctaaaaattccggtcagtgcaaactactacacgacctttctgctcattactttgctaatacttttttctgccatctggctgggtttttatatggcaagaggtatcactgtacccattcagcaattggcagaaggcacacgacgtatcacagaaggagatctcgacttcaagattggagtccgggcaaccgatgaaatagcaattcttgtggactccttcaacaccatgacccggcaactaaacgaaagccagctcaagattcagcacgcccatgaggatcttaaaagaacaaatatcgaactggatcgaagaagaaactatatagaaactattctggacaacatcggggcgggtgtggtttcgatcgataaaatgggctatatcactacctttaataaagccgccgaaaaaattctcgatcttaaaagtgaaaatgttttcggctcctcctatcgtgatgctttagaattttcctgtcatcagacaataagaaaactcactctacgtatgttcagtcagaacagggaatccatggaggaacaaattgatctgcgcataggagaaaacaacctcacccttctagtcaatattcagattcttcgaggagcaacccgaaaataccgaggaatggttatcgtctttgaagatctaacccatttgataaaaactcagaaaattgcagcatggaaagaagttgcccagggaatcgcccatgaaatcaagaatcctcttacgccaatccagctcaacacccagagattgaagaaaaaatattatgaaaaccgggaagactttgaccgggtttttgatgagagcatcaatattatcactcaggaagtcgagggaatgaaggaactgctcaatgagtttctacggttttcaagaatgcccactcccaatccaagacccacctctctgcataaaatcattgatgatatcctgatatcctattcagaacacgataagcatttaaagatcaaaaaaagttttgaccccaatcttggagctgtcaatattgatccggaacaaattcgccgcgtattcatcaacctttttgaaaacgccacagatgccattgatgatggaggagccatacaaatcagcacacgggtcctgcaaaaggaaaaactcgtccgcattgagttttcagacgatgggtcagggatcagtcctactgacagggaaaaactatttcttccttatttcactaccaaaaaacgcggcacgggtctggggttggccattgtcaaccggatcatcattgaccacaacggttccattcaagccaaggataaccctcccaagggaacagtttttgtcatagatcttccttattctccccttgtcctgaagacggcaagttcttcctctcggaattctcgcaaaattacttccgcccaatcttaaaccgctactttcattccatgaacttttgttctaaaatgttcttactctgaaatatttttggtgttttttatgtcaaaaagagtgaccctgaatattgacccggaactttatcagcatcttgaacaacgattcaagggtgatgaacaagggttgcagcaatttattattgaagctatcaggaagcagttgacggggccaccgccgttgccgaaaaaaaaagacgacttggaaagctatttgaaaaagggttcttcaggaagtcgaacctatggggtaaaaggacagggttggtgaccaggtggcaatatgcaggagaatttctgatttgaagccctgaaaaccttgggtcttataatatttattttttctaactgtaaaatcgacccgaaatgggaccgaatttaagagaacaaaacttatggcaaatgatcgatttgtggataatgggaatggcaccattaccgataaccaaatgaaagtaatgtggaaaaaggtcgactcctttcaggacactaaaaaatggctcaactggtttaaaggccaggattatgtagaaatcactaatatggaaaggttcgccgggtgcgaagactggcgtttcccgaccgaggaggaagcctggtcgctgtttgacttgagctataagaatatcgacaagtatggggatgaaatctatcttccttccgtctttgaatccggtagcgctggaaccacctggactctggaggaacgggactcctcagctctggttgttcagtatgaggatggaatgaaagtatggccctcaaaatacgctcatctcaatatggcctaccgtatggcccgacccatcaagtagcttcagtttaacttttcaaattcaggccgatcgggataaataatcttaattaccagtttgcggtgagcttcataattaaagcccggttggataacaaaccggatttttgccgggttgctgttaaaccttttaaattctcgggggtgcactcgctgggcccccaactccaaaacaagaggtttcccggttggcaggttcagggttcccacaacacttttttcgagatcgatttttattgctccgggtctcactccttccacacggtaagcaccttccgccatatggacgttgcttccttcataaaaaatcctccataaataacgggtttcaaaaccacgcgctccggccaaaggcaaagccggatcgagaaactggagttgcgctcgacctttgttcttgaagaaatggatactccgcatggaccagagagcgaagtctctctcaaaagaacgccgggacatgagaccacaacggcgaacttccagaagcgtttgtaacggcacccttttttttcggatcaaattcctacggacttccaaagcgctagggctgtaaaaataacaggtcgccacacccaatttggcatcccgcaccgagtcgggagaatctgctagattttttttcaatctttcgatcagtttagattcgatttcgggggtataatcccggcccacttccctaaaaatacttatcacaccatcccaatccctgccagtcagcgctgtttcaaagtcgaaaaccactttatcctgataatccattctggtttcaggaaaatattcctttcctccaaacaccttgctttttaaaaattgataacgcttaggatgactatagcgaaagtacggatagttgatataggcggaagctgaattggcaaaatcttcctgagggctctgtctggaataagtagaaagctggcgggtagagaccggagcgtagtggcctgcatccgggtcactgagagccgcgaataaataatcatctcccggccgagcgtcgagagcgggaagatgaatcaaattgaatttagagattttcagccactctggggaaaaagaaaggtaacgttgaaatatatcaaaaacatgtgccatctcatgctggacaatattctggaacttgtccctgtcctcataaaataaggtattgaaaaactcgacgcgaggctcctgatcatctacctcgacatggtaagacaggtttgaactccggtatactgttcggaaaccaggaaaagtggcggcaggcacatcgtccacgggcatcccttccggagccgcccgaagcttactcaaatgataaaaacccttaacccccggtatatgcaaaaacgtttccggcagcttggaaaacgccaaagtgagctctttgatttcatcgggtttccagcccaactctaaatccagtagttcgtaaccaaattgggttttaaaattatctttgagttggttgatctgttgccggtaatcgccggggtcttcgtagaaaggtcgtttgggctcttgtgcccacgaggaggcatcagcgcatagaagattaagaagcaaaaccaagcctaccaagaaccgtgggaacaactgggcaagagatcgtaaaacccagagcttgggtgaccgcagtaaaaagccattacaatttgtacccctgtagggcatgaaaactaaggaagaataccacgccaccgaaggctctccacccgtcacccatttgctcattggcttaaaaatttccaaattgatcattgctcatagattagcagaataaactttatttcgccatagtcagagtaggtatacaaaatcaatatgttaccttgggtaaagtgctggaaatatatttgtacaatttttgcatctttccgcacgttcggacatcttaaaagtgtctcttaacaacctaaaaaggaggtttttccatggcaaaactgccaggcagcaatgtaaaattaatcaggttaaatccggactggtcggtagaaaaagccgcctccacaccactagaacaagaactgtcgatcgacgatttcaagggcaagagactcattatcaccctcccgggcgctggcggtttctgcaaccaagaatttgatattgtcaaagataaccaggacaaattcaaagccgcaggcgttgatgaagtcattgttgtggtaggaaccgatattttgagtaacgcaggaagaggtttgcccaatgtgttccaggatgtgagtcaggagtttggcaatgccaacaagctgacgctggaaggggtcaaaagccgttacctgcaacgctccgtcattgcagtggatgcgaatggtgagcagatcgcccgggaagatgctgagctattggggtgcagaactgttgatgctctggtagaggtagcaaaaaaagcgttctcctgaaaaacagactgtccttcaataaaaaacctcccggctttcccccgggaggttttttattgcccgctggggatagaggtttttcaacccttaggatattcaagagtttttaaaatagactccaactcatttttcatctcccttttccattccaggaaagactcgcggtcataggcgaaatccatttgggtgccttttcttttaaaccttttcagtttatttttggcgccgacgatggtgaatttttctgtataaagcaggcgtttgatttccaggaccagttcgacatcccttttctgatacaacctttgcccagatttgtttttagtcggtttcaacgcatcgatttcgtcttcccaatagcgcaaaacatgttgctccacgccagctagctccgcgacttcgccaatcttaaaaaataacttatcaggaatcagagttgtcatcacaggaagattggttggtggagtccagtaactgtttactgggtttaaaggtcaataccgtccggggacgaatacgaattgtttcaccggttttgggattgcgggcatttcgggcctttttctcccgtaaaataaaactggcaaaccttgagatacgaacgttattaccatgagccaattcagatttaatttcgtcaaacaaaatctccacagcctggacagcttcctggcgtgtgaacccgactttctcataaacctggtcaacaatatctgccttcaccagagttccatttaaatcgactttattcaaaactgttccctcaaaaaatgaaagccttttttaatatcttctgtccttccttctacttttcttcatatgcctggttggcttcatcaataatttttttcatcaaatgttccgggacatcttcataatgatcatattccatgacaaacataccctgccctcctgtcatggaagtcaggtcagcggcataattcaagacttccgccatcggcacatacgcacggatggtctgggtgtcatcgccggaatcaatcccctgaatcttaccgcgcttggaattgatatcgcccattatatccccaacatggtcgcccggcaccacgatttccatattcatgatcggttcagtaagaatcggcttacaatccatgactccttttttgaatccaagtgaaccggcaatcttgaacgccatttccgatgaatccacattgtggtaagacccatcatataagctcacctttacgtcgaccatcgggtaatgcgcgatgatgccattggccattgcctcctgaatccccttgtcaacagcaggaatataagtctttgggatagcacctccaacaattttgtccacaaaaatatagccttctcctttcttcaagggagagatttctatccaggtgtctccaaactggcccttcccgcccgtttgttttttatattttccctgcacctttgtggaacctttaatcgtttcgcgataagggactttgggcgccttgacaaccacctcaacgccgaaacgtcgtttcaatctctccagcgttacatcaaagtgaacctggcccaatccagagagcaacaactgtccggtttgagcattcctttccatcttcagggttgggtcctcttccaacagcctatgcagggaactactgattttttcttcgtcggcccttgatttaggttccaatgcccgcgaaaaaaccggcaatggaaaagcaatgggcgggaacaccaccttctcctctgcatcagaaaatgtgtcaccggttatcgttgacttcaacttggccacagctcccatatctccctcggagatttcagaaacctgaatctgctttttgccctggagcatatacaactgccccacacgttcattcacatcctgggtggaattgtaaacagtggagtcgcctttaagggaacccgaaaacattctaaacaaagtcagttttccagcatagggatcggcaatggttttgaacaccagacccgaagccgacttactgccatttgcggaacaggtgacctccgaatcatccttcaatcgttttgccgtcaccggagcccgcaaatcaggcgaaggaagatatttaatggccgccttgagcagaaggtccacacctatattacgcagagccgaccctccaagcacagggatcaactgaccatttcggatgccctcttttaatcctttggaaaattcctcctcgttcaactctccctgctcaagatatgtttcaatcagatcatcatcgacttccgccaccgcttccattaaatcagcgtggctgagttccatttcatctttaatatcagctggtgtttcccctgtcttgccatcccctttaccatttttgtcataggagacataatgattgtcgataaggtccacaatccctgaaaaattttccccggtggcattggggagttgcataaaaaccgggttttttttgaatttctttttaatggattccaggatgggagcgatattagcccgctcatggtccagcttattcaggaaaataattctgggcaggttcagttggtcggcccagttccatattttttccgtataaaattgcaccccttcatcggcactgatcacaaaaatcaaaccatcgaccaccctgaggccagcaggcgtatcagcgatgaagttactactccccggcatgtcgacgaggtttaatttcgttccgtccacttcacaaaacgagaccgaggcatctatggaatgaccacgctttatttcatctgggtcataatccataacggatgagacatcgcccacttgacccaatcggtcagagactccggtaaaatacagaatcgcttcggctaaagatgtttttcccgttcccccgtggcccaccaatccgatatttctgatattttgaagtttatattgtttcatatcgcctcgtttggtaaatagtacacccgccaaccgggaaaattaatcctacttcctcaaaccatgaaacaagagccgctatcaactaacttctaatcctgatgattaagaactataaacattccaaatttctcggcaaaagtcaaaactttataacgttaatttaacaaatataagggatatttcaagccatctttagagagcaggacaaactgggaagggaaatgaggcgggcaatctttcctattcaattcatttcaaagcgtttaagtccgcaatagaaaaacatcaataactttcatgccccgcagaggtagaacgaagcaatccagaaaaagcttggatcgccgcgcgccttccagtccgctcgcgatgacggtcagttgaggtccctgtcatgctgagcctgtcgaaggaccgcatattgatgtaagtaaataacaacagcccaacacatatgagaattatagaatccgataaaacctaaaaatcaagactgggatcttcaggttccgtagcataatacggtccgcttaaatcaaaccgcataccagcaacttttaacttagcgggacacttcgaacagcgtaagtttttcatcactaatgtttcttcctcaaataaagcaggttgtcaaccagcggacaatggtctgccccttcacaaaaaaatgcccctaccgaagcaggggtgggtcacctacgagatcattccaaataaaaaaggcaggccgcagcctgccttttaattttgtgcgcttacccgcaggcaagcacttgttaccggttagaccaataatcggtgttccatatttatggatatttctgttataatgacatattcaattatttagtcaaacttttttgggggaaacctgtggatagaatcaattacaggctgggcatagatttaggcacaaactctctgggctggtgcctgctaaaactcaacgaaaaaagtattcctgaaaaaatactcttggctggagcccgaattttttcggacggtcgagacccaaaaagcggttcttcactcgccgaagcccgcaggctgaatcggggtgctcgcaggcgtagagaccgttttctcggacggaaaggggctctcatgcaaaagctggttgagcttggtctcatgcccaaaaataaatatgaacgcaagaagcttgaagtattgaacccctatgaacttcgggccaaagccattgaaaactcccttgcacctcatgagctgggccgcgccctgtatcacctcaatcaacgccgtggttttctgagcaatcgtaaaaccaccaccaaagaagagggacaaaaaatcaaacccgatatagatgggcttaaagaagctcttgatgcatcccctgccagaactttaggtgaatatctctggctccgagacaaaaacaaacaaagggtgagagcccgtattgatgaaaaactctaccccacccgtgccctgtaccgggatgagttcacccaaatcagaagttgtcaacttcgacaccaaaaactcactggagatgagtggcaagccttagaaacaattatcttccaccaacgggatttaaaaacacccgaacccggacgatgccagcttgagccaaatgaataccgcgcccgcgccgccttaccaagttttcagaaattccgcatcgcccaggatatcaccaacctcgcctggatcgatgagaagggggggaaacattttcttactgccgaacaaagaaaaaaattatggaatttacttcacaaacaaaagacagtcaagtttggaaaagtacgcacgaccctggaattacccgaaggggttcagtttaaccttgaagacgaaaaacgaaaagacctcaagggtaacgtcacggcaaaacttctttccgacaaaaaatattttggtgaaaaatggttcgacttctcagataaaatccgcgaccaaatcgtcgaggaactcctcgatatagaagatgaaaaagccgtcattcaaaaagccatgaatacctggtcggtcagtgaagagcaggcccgcaaccttgccagcctactgcctgaagattttccgaagggctattgtcggttcggcattgccgttctgcaaaaactggtttgctgtatgcgggatgacggccttcgttatgatgaagcggtgaagaaactgggctatcaccacagcaacaatcgccctgatgaactggtggagaaattggattattacggaaaaatgctgcccaaagccgtggcctttggcgaccctgatgaagcatctcctgaaaaaaaattcggcaagatcggcaaccccaccgtgcatgtggcactcaaccagttgcagaaggtggtgaacgacattgtcacaacgcatggtcacccgcaagaaatcgtggtcgaactggcccgcaacctcaaactaagcaaaaaacgcaaagacgatctggaaaaagaacaaagaaaaaaccagaaaaataacgagcgcatagagggcgaactgaaaatattgtgcctggaaaacaacggacctaaccggctcaaatacaaactgtgggaagagttgagttcagaccctaacgaccggctgtgtcctttttcgggtgaaaaaataacacctgtcaacctgttcagccctcaaatagaaattgagcatattttaccgttatccaaaaccctggacgactcccagaacaataaaacacttgcgacaagagaagccaatcatctcaaacacgatcgcggcccatttaaagcttttggggcgggggataccggctatgattatggagacattctcgaccgggcacaccaattgcccaaacgcaagttcatgcggtttcttcccgaggctatggaacgtttcgatgatgaaaaccagtttctggcacgccatcttaatgatacccgttacctttcaacagttgccacggaatacctgtcccatatttgtcgaacggtgcgggtcattccgggagttttaaccgccatgcttcgacataaacttggtttgaatgatattttaggtgaaagggggataaaagatcgcaacgatcaccggcaccatgctatcgatgctctggtaacagccctgaccgatcaaggtttgttgcaacgtgtctcgcaattaaccggtgccggtctgttggaaccgtccgaagaactttcagacccggtaaaaccccgactcaaggccccggaggtttgggctgggttccacaaggaagcggaagaaaaaattaaccacattgttgtttcccataaacccgaccacggcattcaaggccccttgcacgaagacaccgcctacggaatcattcagcatcccagcagctgggaaaaagaaaacggctataacgtagtccgcagaaaaccttcaagcgatctttcgaggaatgaaattggtgctatccgtgatccagacctgcgagaaaagttcatgaactttgccaatacattcgagaatgacaaagagctgaaattggcacttcccgattttgctaaaaaccttggtgtattacgtgtaagggtgctcaaaaaagaacaccccattatagaaatcatacatcaaagtacagcaaccaaacctcaaagccaaaagcgcaatcataaaaaagggcttgctccaggacccgttcatcatttggagttctggcaaaatcccgatggagcgcttcatcagggtgtcgggagggtgtcgggatcaattttttcgaggccaataaaaatgatccgatcatgaaacgtccacaccctgccgcgaaactggtgcttaaaattcataaaggcgacatgttgcgcctgcggcacaaaggaaaagtgaaaacagcccgggtggtcagcctgagcccggaaaataaaactatttggctggtggaacattttgaaggaggcaatttggctaaacgctataaagagagaaaacttgaatatatttttcttagtttttccaggctcaaagaatgtgaggccagattaattcatgtcgacgcactcgggcgcatcaaagacccaggaaccatcctatgaacagacgtattatagaaatagcggatcgcgggcaatacctttccacgcatcgagggttcatggtggttaataaaggcaaagaagagcggggtcgggttcctctcgcagatatcgaggtcttgatgctcaccagccagggaaattcactatccactaatttgatacatgccctgcttgagcaaaatgccatgattgttttttgcggtcctaattttcaacctgcaggaatggtttggccgaccgcgccacaccatctacacacccagcggcttcaactccagattggggcaaccgtccctttaaaaaaaagattgtggcagaatctggtgcaggccaaaatcggatgtcaggcagaggttttgaacttttttggcctgcctgatgcggacttgatatccctgactaagcaggtgggttcaggcgatccccaaaactgcgaagcccaggcggctcgacgctattggcccaccctgatggggaaggaatttcgcagagaccctcgaattgaaggcatcaactcattactcaactacggttattccgtattgcgctccgcaacagcacgcgccttggcaggaagcggattgcacccatctcttggcattcatcatcacaatcaatccaattccttttgcctggctgacgatttaatggagccttttcgaccgctggttgattggactgtgagacagcttgccgatgaggaaagcatagaaatggttcccgaaatcaaaaaaaggctggcggggatattgaaaatggaccttgaaacatcccgtggtcgtagtcccgtttccaattgtttgctcaaactggctcaatctctggtcagcagttttacagagcgaaaacccggactggatttgcctgactctgttattccattaacaacaaccatcgaagaattatgaaagcgttatcggggtacagatttatgtggttacaagtactgtttgatttgccggtcactacaaaaaaaacccggaaggcggcttccaagttcaggtgctttctattggatctgggttttgagatggcacagtactctgtttatcaaaggttctgctcaggaaaagaaatggtggagaactatatcaaaaggatcgaaaagagcctgccggaatatgggaaagtgcatattcttgcattcacggataagcaatacgaaaacatgaaaacattcagagggaaaaaaaggcagaaaaaacaggaaaatccgggccagttgactttattttgagaagaaaatgatgaaattttttaagctaaaaacaaataaggcctctaaaaagaggcacttatttgcgatctaagtataccagatcaatcattgtggtctaaccggaactattcgttcagcaatataaatgctttcaatagtataccagatcaatcattgtggtctaaccggaacaggaacggggcagagccaacgggttactatagtataccagatcaatcattgtggtctaaccggaacaaagagcagttgatgttggccgggcgattaagtataccagatcaatcattgtggtctaaccggaacggatgtaatggccgttcatttattggatcaagtataccagatcaatcattgtggtctaaccggaacagtgtctccatgattgttaggatcatttcaagtataccagatcaatcattgtggtctaaccggaactgatccaacgctatataaatctctgccagaagtataccagatcaatcattgtggtctaaccggaacgacatatatttcaatgagttatgatttttaagtataccagatcaatcattgtggtctaaccggaacgacatatatttcaatgagttatgatttttaagtataccagatcaatcattgtggtctaaccggaacaggctatataagccctgttttttaagctgaagtataccagatcaatcattgtggtctaaccggaactgagcttgtcaaatttattttcataaaaatagtataccagatcaatcattgtggtctaaccggaacggatggcggcagcgggtctggggattttggagtataccagatcaatcattgtggtctaaccggaactgatacgcccgtatctgttgcgtccgggacagtataccagatcaatcattgtggtctaaccggaacatgatgatgcggcgggggatcagatagtcaagtataccagatcaatcattgtggtctaaccggaactgtatatagcgtacccggtcgattgaatttagtataccagatcaatcattgtggtctaaccggaaccggcctgggtatcgtctacatttacggacgagtataccagatcaatcattgtggtctaaccggaacaaagtagtttatttcattagcatgtagttgagtataccagatcaatcattgtggtctaaccggaacgccacaagctttgtggcaggcgcaatactgagtataccagatcaatcattgtggtctaaccggaactgagtcttgctattgtccttccatatttttagtataccagatcaatcattgtggtctaaccggaacttatgttcttcgcgctctcgttcttcagtaagtataccagatcaatcattgtggtctaaccggaacgaattgtgctttacacatttccagattttaagtataccagatcaatcattgtggtctaaccggaactcagtttctataatcgcccggccaataattagtataccagatcaatcattgtggtctaaccggaacgccagagggtccaacaaataagcgtgacaagtataccagatcaatcattgtggtctaaccaggcaggtaaaagccaggtcaggccgagttaaaggagcacggcctgatcatgtcaccacacaccatattgactataaatcctgaataacggtggactgttcagaaatcttttcctttaccagataaaatgagccggacgggagtcccgataaacccgaatgtttttcgcaggctgttgatcaaataacgacggtaggaaaaatgtattccttgcggaaaattcaaaaaacatttaaacgtcggcggtcgcttcttcacttgagtggcataaaacagtttcataaatttaccccggtaattcgacatggggtttttctgaatggcacgctcaaaacattcattaagagatgcggtgggtatgctacgggaatactcttcgtaaactttctctacctgaggcaggatcttatcaactcgcaatcccgattttgccgacactgtaagcacgggagcaaattccatgaacttaagtttgtgatgcacccggtcgacaaactcctcaaataaaatttctttttcccgggacaagtcccacttattccccacaaccacacacgccttaccacgatctaaagcataacccgccaccgtagcgtcctggtcggtgaccggctgcatgccatccagtaccagcaccgcaacatcacagcggtccagagctttaagagccataatcacactaaatttatccagaacccgatgagtttttcctttgcgccggattcctgcggtgtcgatcaaaacaaagcggcgcccgttccactccagagaagtgtcgatcgcatcccgagtcgttcccggtatatcggagacaatacaacgttcagagttcaacaagttgttgatgagagaagactttcctacattaggtcttccgatcaccgctatacgaatgctgtcttcatcgaaaccggattccggttccatatcaggaagagattttgagaccgcttcaatcaactcataaagacctggcccatgttccgctgaaattggaaaggtattggccaatcctaatcgagaaaattcaggaagaataaaatggtgcgaaggtgaatccaccttgttcacggcaagaaaaaggggctttcctgatttacgaacctgagaaattatttccctgtctggcccagtcagccctgtctggttatccacaacgacgatcacacagtccgcttcttcacgggcccacatggcctgttccaccacttgcaggtctatctggttggtggtgttcacatcaactccacccgtgtcgacgattaagactgggcgattgccaaattccgtggcaccgtacatcctgtcccgagtcacccccggcgtgtcattgacaatcgccgaacgactttgtgtgagcttgttgaataaatttgacttgccaacgttggccctgccaacgatagcgataatgggggctgccatgcctcctccttaaatagatggtcccttgtcctgcaggtatttgtggataccttccgctatggaggaagccagtctataaaggtaggtaggcttggaaagcatgcgggattccttccggttggtcaaaaaaccgacctcaaccagaatgctgggcatatcagcaccatgaagtacataaaaagggccttccttgaccccaaggttcttcaactcgcgaaactttttcctggaggatcgaaaaaggttttcctgcaccgttcctgccaaacgggaagagtcattaatcttggtggtggtgatgagactcgccagaatttcctgaacctggtcatccttgacagattgaaccagttctccattctccctggcggcggtttccaaagcccgatcattattggtcgtacccaaaaaatacgtttcgataccatgcgctgattttcttttggctgcattggcatgaatggacacaaacaggtctgcatttctgttgttggcgatttcacttctttctttgagcggaataaacgtatcgtcctttcgggtcatcaccacccggtacttgaaccggttgaccagtatggtttttacatgtcgggcaatggtcaggttgacatttttttcgtggagcctgccatgatgacttttcgcgccgtggtctttgccaccatggcccgcatcgacaacgaccaagggtgcgcccgctctactcgaagaaggggcataaagatggcccttcttgccctttttgaaaagtgcttttttaaccggggctgacggtttggcttttctggccacaaccgcctttttctcaggacggcgctggacgactatttttccctgccgggccacctgaggttggggaataatttttttcttcgttggtatttctggttttgcaaacaaagcctgtttaacaggcacggactttttcgcctttggcacaaccttcggtggttttctggtgggcagcgatgaaacggttttcttctcgactaacggctttttctcttgcaacaacaccacaggttttttggtagcaagctggggtcgcttttttattacaggaacttgagcaaaagacgccagcttctgatattgcagacgggccttcctggcctgatcgcctttggggaacttttcaaatatcgttttaaaaatacccgtggccgatgagaattcttttctatcacgatagatttcagccgactcgaacaacgcatcatcggttagcgtaccgggtgaaaaatcgcgggaaacctttgtataaaaatgaagcgcttgatccagatcctttgagtttttggaaatcccgttcaatccctgatacaacccggccatggtgaaggtggctttataagcctctgggctttggggataccgttgcaccactttggagaatttttggatgacattctcccaatggtggcgaaattgctgtttgtcgggagatcccttgaactggtaatacgatttctgcgccagataataaaggtcctcagaggaataggatttcgccgcccaggcagaagaagcccacagaatcacaaaaccggccacaaacgccgcgtttttaaatttttgatggagtagatgcgctgacatagcaaggcctcaaaaaagcccaatcacattaactagttaattttattgatgttattggctaagcatagcatttccccctatccgggtcaatagcactcatctattaatgagggggtatcatcgtccttcagccagccgctcagccaggtacggaggcaggccgttactgcggattttgtcctgagccgaattcaagtcatattcaaaacggcggacttccaccgttttttcttcggagtcataaatcatgaaagcagggtcaggatttccatcccggggttgccccaaacttccatcattaaaaatataacggttttccggttcaatatcccagaactccgagacatagtcgttcacctctccctccgctgtttgttcgagaataatcggtttgtgagaatgacctacaaaacaaaggggagcttcaaaatttttaaaattgcgtgtacccccggtctttgaagtcacataatgccaggcttccggctcatagggagaggcatgcacccaatatacctcgccttcttcgtgatcaaggggaagtgagcagagaaaagccttatttttttctgtcagttttttccgggtccacaggcacgattcaaaggcgtaggaattaaaataagtaatgtcggtcttttcgacagcacccaaatcgtggtttcccgccattgtcaaatccacattttccatcacccactcaacacaagggttgggatcagctccatacccgacaatatcccccaggcaaaccagtttgtcgtgagcaattgtttcgatctctttttcgaattgattcagggcttcaaggttgctatgcaagtcggagaagatgatgtaacgcataggccggtttacttcacagttgaggtgtccgtttctttaaaaaccttatcgaggataccgttgataaaatcaggggagtcttcggtgctaaattttttggcgatctcaacagcctcgttaatgactactttgggtggcgtggaagcttcaaacatcaactcgcaaatacccagacgtaaaatattgcggtcgaccatagacatgcgttccagcgcccagtggtcactgaattttttaagcataatatcgatctcttcagcctgagcaaaaactttttcgaccagggttttcgtaaattcgatgatttcagcctgggcattggctctttcacaaaactgtcccatctgagcttcaagatcatcctgattgaactcgctctgatacaggaactttaaagccagttccctggcggcacgccgctttcccataagttacctcaaattttcctgtataaatttgccatttcgacagctgccagcgccgtctctcttcccttattggaagagtcggagcccgaccttgcgactgcctgctcaaggtcattcgtggttaacacgccaaacaaaacaggaatattaaactcgagtcctacctgattaatcccccggctggtttcagccgaaatatattcgaagtgtggggttccccctttaatcaccgcgcccaagcagacgatggcgtcgaaatttcgggtggaacaaagttttttagccgcctgaggaatttcgaatgctccgggaacccgaatcacttccaagttttcctcatcggcgccctgctctttaaatgctgaaagtgcgccgttgagaagcttgctggtcaccaagtcattaaaacggctcactacgattccaaaacggagccctgcggcgttgtggtccccttctatatatttagccatgcaaatggttcatttaatattttgaaacatatggcccaatttttcccgcttggtctgaaggtatttgatattgtcttttttagcctggacttcaatgggtaccctttccaccatatgcaggccataaccttcaagcccaacgatctttctgggattgttcgtcatgatgcgaatctttcccagccccaatttgcgcaggatctgagcaccaatgccatagtcccgcaaatcaggcttgaatccaagttcttcgttggcctgtacggtgtcttttcccgcgtcttgcaaagcataggccttcatcttgttgacgattcctatcccccgtccttcctgatacaaataaagcaggacacctttgccttcctgctcaatcatttccatggattttttcaattgctcaccgcaatcgcaccggtaggaaccaaaaacatctccggtcaaacattgtgaatgcacccgcaccaatgtcggttcatcagcctgaatctctcccttgaccaaagcaatatgtgtctggtcattcaaaatatttttaaacactacagagcgaaacacacccgaatgagttggcaaaatggtggaggtgacctcttccaccaacgcttcctgcttaagcctgtattcagcaaggtctttggtggtgatcatttttaagccatgcttttttataaatttcttcaggtgagaaacccgggccatggtaccgtcatcattcatgatttcgcaaatcacaccataaggttgtaaaccagcaatacgcgcgatatccaccgacgcttcggtttgtcccatacggaccagaacgcctccgtttttggcccgcaagggaaaaatatgtccgggcttaaccaagtcgttcctagaagaatccggatcaatcgcgactttgatcgtgtgcgccctgtctgccgctgaaatcccagtcgtcacaccattcctggcatcaatggaaacagtaaaaggcgtttcaaaaacagactggttatcatcgaccatcatgctcaatcccagttcacgggtccggctctccgtcagggtgagacaaatcagaccacgaccgaatttagccatgaagtttatgagctccggggtaactttctcagcagcgaccatcaggtcgccttcattctcccgatcctcgtcatccacgatgacaattattttcccctgtcgggcatcttcaacggcttcttctatggtgctgaattctttttgcatgacttcctctataacgcgaagccctgttgccggagaaaatcaagagacggttttttctcgcccggtttcaacaaggtttcacaagctttgaacacgtatttacctatcatatcacattcaatatttattaaatcgccaatttttctggcactcaagttcgtatgatccaaggtaaaaggaatgatggaaaccgtgaaccgattgtccttgcaatcgaaaacagtcaggctgataccatccagggcgatagaccctttttccatgatgaaagaaccgagttcttcaggatgggaaaaccgaaataagacctcgcccggtttctcctcaatgtccacgatttcaccaacacggtcaatatgtccgctgacaaaatgtccgctgattttcgtcgaaggggtaagagatcgttccaggttaacccggtctccctttttcacatctttaaagttggtccgattgagggtttcggtactcaagtccagtttgaaagtcgtcggcgtggaatccacaacagtgaggcaaactccgttcacagcaatgctctcaccatcctcaaatccggaaaagttcttttcggtattcacaaccagtacggctccttcgttttgctggacaaactcaccaattgttcctaccgattgcactattccgctgaacatggggttgcctccaccattaaatcctcaccgattttcgtcaccacaatatcctttaaattcatcgcgtcattcaccttcatcactccctgcccacccagaaaaccgggggcttgggttccacctattaataccggactgatgaatgcgacaacccgatctaccacgccggctttaacaacactggcatttagctcggcaccaccctcaatcagtatagagttcatacccctgtttgccaattctttcaggagaggcttgatgtgga

SEQ ID NO: 4434 - DNA, 14870 bp, synthetic construct
  source 1..14870: mol_type = other DNA
  variation 13712..13718: note = note, n is a, c, g, or t
  misc_feature 1..14870: note = Synthetic
  variation 14565..14676: note = note, n is a, c, g, or t
ttcaccatggcatccacggcgatcacccgggcggccagcaatttcaaccgacgcggacccagatcgccgctgaggtgttccgccagaacagcaagcccttcctgcaacgcatcgtatccggcaaggcccacggaaagcaatttcaacggttgctgtagtccgttacagaaggtgagcacgtgcgtacctacctcgtgttgcaacaacgcaaatgctcgtgaccgcgccaccgagaacgcctcgccgatgtgtacctgacccttgctcacgagcacgccgtccacatcgttccgcacgcgcacgccgagtttcaggtgtggaaaatgcgcacggtaatgttccaattcttcccgcaccaaggcctcgaatccccacgcgtccaacttctcgccggaggtttccggccagtgcgccacggcaccgatcagctggtgcgccttcttcaacaacagtggttccaccgcgccatgcaaccgcaggctggagtggacgaactggttggtgccgcgatcggtgagcagggtaagctgagtctccagttcgttgcgtttgtcgcggaagatgaactccaacgtattgtcttccacctccccgatccgcagcgcgaacaactgccgcttggcgatgtccggatccacggggatgagccggtagtggaagtccggctgcttctcgccaccatcgcgttcgaattccaaccaggcctgttcggtgttcaccggcgaaacgttcagcaacacatcgaaggaggcaccgatacgcgccaagcgatggtctatgttgagcgctgaccgcgtgatgttagtacgccccaacgtgaggtagtgcgggaagtctagcggcgtttgcacgcggatgaaatcgaaggctgtgcgttgtaccacttccgtgaaacgcgtacgcaccgcacgcagggccagcctgctgtagtgcccatccaagctccaatacacgggtggcacctcgataccgatggtgatgacaccgagcttcttcagttcgtccgtactgaagatcggcggcaaccccggcggatgccgaagtgcggtgtccaccacctccgctttggtgccttggatgtgtacggccaattcctgcaatcccttttccaggacagctgcggtggtgggcaggttgttcgccgggcacagggcgcggaaggtgtccgggttcgtagcacgatcgcccgcccagatctccacgatcaagaatgctttgctcttcttcgtcaccgctgaagccaccgtggccagcaggtcgcgcaaggcgggcaggtcttccggtgtacccgagctgcgcacgtaggcggactgtgcgcgcaccagttcttcgatgcccggatcgttggtgccgttgctgcggtacacgcagatgaagggcagcggacggtccatcatgaaacggccaccatcaggcaacaggcgcatcacacgcttgccctgctccagcttcttgcgcacggagcccagcatgtccaagaggcttgtcgctttgtcctcaggcatgctccacggcattggtggcacgcatcaccggtgctatagtggcggtgagcaacgcgtggatgcgctcgatggccgcttcatccggcgcaccggtccactcgtccatgaacactttcttgaattcaatggcgaccgggcatacccgcgcaccgaaccgttcgttgagccaaaagccgaagtgcccacctttgaatttcacgttctcgcgcacgtcgtacttacggtcatcgggacctttcatcagcgcggaggtcaacacgtccagcgcttcgccccacacatcgcgatcgatgttcgctgtgcccaggttgatctccgggttcagcgcggggtcatcgtccacacccggtgcttggcgttggtgattgtacgaatggagatcgtagatcatcacacgcggatgcatggagagcagccgttccaccatagcgccggtggtctcgtagaactcatcgtaggtggccaacgaacgctccacttcaacagttggtagtattccgttccacacatccaaaccccaacaatccgctggcgttcggtacacggctttcgtgcgcggacggttcaggtccacctcgaaacgcgagcgcaggccgatgatgctgttgtcggaaatggtcgtccaacgatcggtgaacggatcctcttcgcgcaggcgttgggcttcgttcaagtggcaaagcgctttcaacgaggggcgcatggccttgcctgcatggatggccgtgaccaacaacgcggaggggccttcggtgtatgtggcggcggtggtacttgtcatgcgcggagcacggcgaagagtgcgccacgcggcacgggcacgcgtcgttcgcgagcttccgaaaaagaccacacatacatggcgaggatgggcttccccaattctgggaacgatcgccccgcagccatgttcgtggcgcgaacgccttctgcatgcatccccatccccctactggtatgcccaccgccaaccttacggctaccacactggcacagtgctggaccaccttggtcaacccttccaccatgcgccccatcctgaccaccctgctcctactggccgctacttacgctgttgcccaagaaccgcccgcgctggacgaactcgaagtgctgctccctgcaacggagcgtgcagaaccacaactggtgctctaccccaaccccaccaccagcactttacgcgtcatctggggcagccgatcgttggtacgcatgccgctggaggtgcgctccctggatggacgcctattgctgctggacagcctttcaccagaacacgaactggacgtgagcacgttggacgaaggcttctacagactgttcttgatggatctgggcggcgtgcgagcgcaggcggtgttcaaggtggtacggtagcggtagatcaacggcacgagcgacccgttggatcatcggcattcggaaccacgaccaaccaacacatggccatcaggatcttgatgatcagcgaagggcaaatacttcaaccccgttcctgccactacacatgccatttacgctgccgtatgaatgtgcatcgtgttgcggatatggtgcgatagtgtgtatccatttcccctgcctcacctttccactgcatgcgccgcgatagggaatacgcagcaacgtgcggtgaatactgctgttgctggtgcactggtgcggcgtttgaactacttgggcaaagctcattgccatggaaaccaaaactgcagcagcacgcctcgcccagtaccttacggtggtgggtatctcggagcgcgacttcaatcgccggacaggtttctccaatggactcttggggaacgcggtgaagaacggtagagccttgggatcggacaaactggaaaaggtcctcagcaccttcccggagctaagtgccgattggttgcttaccggaagaggccccatgctaaggcaaggagtattccttaagcgcggttaaagcctccgcgtggcaacaccgtccggtttgcgtgataccgtggccggtgccccttcgctgggttctgtggccttcaacgaactggcagccacccaggtcttcagcaggccgggctggtagatgtcatacaacagcaccttgtccactagtgtggatgcggtcactgtccatacatcaccggtctccaacaacaccacctgttggcctgtgtggaataccggtgtttccttctcggggttcattcctgcaagcatgggagagtaggtttggtcagcaggccagagaggaactaaaggtaaagctgccagacacgaaactgacatgcctgttggtaacctggtgcaggtctggtcttgctgggtgaacaggggtcgcgtttggcagtagctcacctacggaagcgcgcgcgtagcagccacgctttcgctttggacacgaaagccggaatgcgctcctccaccacaggcacctctgccgccaacagggtaagctcctctccctgttgtgcgaagagcatgcgcggcggcgcctgccgcaacaccaccgcctgcacaccacctagggcgatgtccccggcggcgcggtgtttggccttgggtttcgccggtggcccattctctagggggcacaccgcgatcaccggcacaagacccgccgtacgcaggacaccgaacaccccgttggcccgctccaggatctccgccgcactaagcacctggccattgggggccggcgcttgctggtgggcgctgcaccacgctgccccatcggtacccaacgtgtccacggtaagcatcagccgcgcgtgctgttggtagtgctgctggctcttcgccagcagcgcctgtatctcgggcggaagttcgggctgcatgggtggcaaagatcaggtgcttccggagaacgggcacaggatacgatgaacatgtggatcaacggccgcgcacggggccgcatctagaaattgtagcccacatgcaagccaggctcgccgaagatgaacttggaccacatatcgtccaactgcttgaagccatccggtaggcgggtgtggtaagcccggtgggtgatggcgatggacggttggaagaagaaccggtccttgaagagcttgatgtggtagccggcccggtaggtgttgaagatctggtatccttcatcgatcttcttgtcctgggcatccacgaaatgctgcagggtgggcatcacgttaagctcggcgtagaggcccagccagaagaagcgttggtaagacagtgagatcccatactcacgcacataccccgggaatcgctcctccggcttttcgtaggcatcgttcaagaacgggtgtataccattgggccaggcatacctccaggtcttgggttccacggtgatcacatcccgacccgtaaggcgatagccgatgttgatctggaagaaatccggtggattgtccgtgggtgccaggttgcccaccagcacgaacaggctggtacccacgaaccaccgcctgtaggtgctatccgcttcggtgtatcgggcttggagggggtgcatgctggatagcaccagcgcaaggctaagtagccggatgttcttcttcatgacgaagtagggacgtgttcaatgtctcggcaaaagaagaccggcatggtgccacgcctcgttcacttaagtgaaggaatacgctcagctccgctccttctcgatgagccgtgcccgcaggcggctcagcgattgtggggttatgcccaggtagctcgcgagctggtgttgcggcacccgctgcacaaggtccggacgtgtgcgcagcaggttcaggtaccgttcttccggtgatgaggtcttgaacgcgtcgaagtccgtgcgctctttcgccaggagctcttcggagagcaccttgcacagcgtctcgaaccgcgggaaccggctgttgatatccacctccaggtctgcgtcggatatggagagaatggtgtcttccacacaactgatggtgtactccgagggtgtgcggctcaccacgcatacgggtgtcaaggcctccatttcggtgtagaaggcggtggtgtgctcctcaccatccaccacgtaaaaagtgcggatgcagccttccagcacgaagtagctatcgcgcgaccgctcaccggcgttgagcaggatggtccccttcttcaccgtgcggaagatgtccaacccgccgatcacgctcttctcctcttccgtaagcaccatgtaccggccaatgaagtcgaatagtttctgctgcatggggtgtacctgggtggtctttggtcgcatgggcaacaccggtgcggcactgcgcacaggggcaacccgggtggcggcgaagataccccgcgccgccgcacgctgcggttggcaccctatgcacgccgggcgtaaccaaaggctacgccccatgagcactgtacatggtagacttaggctgctcagcaaccgtgtgctcccggagctacaggctgcgcacaacggtggtgcacccgaacctcaacacagtacccctgtatatattgaccccatgaccaaggaagggaatgtgtgcgctggttgtggatcgccgttgacctttctaagcaagccgaacttcggcgccgggcagctgaaggatggtggacgggtatgccgacgctgtttcgcacgcatcgtggaagtggtgccatcattcggtatgcgatccaaaaaagaccacaccaaggcttcgatccaggcgatactggaaccagcaccgcacaccacccagaccaccatgggtattgacagcccgaccggtaaccaacacaaggagcccacggacgacccggtccccttcctgctgaacgcactgcggacgggccaggggaagaaagaagccctggatgccgcacaccgtgcccatgaacggtggtgggccattgatgtttccgaccgcgaacactccatggaggaactgaatgagctacttgaactgcgcgcgttcgtcctcggtgcggtggccaccgtctgtgtatggaacagcgagttcgggatcgccgaccacttgcagcctacgttcatccaccatgctgcgctctggagcggcgaaagacgggataccatcgagttgtacatcatccacctgatcttccaaaagcaatggccccggttggatgccatcttcgaagatgaacccctgaaggcggcatttctggactaccatgatctgtaccgctctgtgctggacccacactacgcgttccaaagcaagcaagaccccttcttgaacaccgtgaacaaagtgaaccagtactgtaggcagataggcgtgcaacgcctcatctgatcgcgccgagaccgcgccggtggatcatgaataagacgctggagtgctggccgaacgtccatgggctattcacacgcaagacccgataaggttcactaacgtaagtgcatggagcgtagacactgcgctgggtccagcgcacaatgcacccatctatgccatccacatggcacatgctcttacgcgaagcaccttggccccagcactgaacaccacccgccattcaccaccatcgcctacatgcccaccagccagcccgtacgctaccaggtacacgtgcggagagatccgcttcaccgctaacctcacctccagcccactgcgtttcccgggcaggttgccgaactccgcgaagaaagcatccagtgttctccccttgtccaactcccggttgatgatcttgagcgagatgggacgccattccgtgtgcactgcgcggaagaaggcggtaaggcgcgcatcggataggtacttgcgcgcagcagcgagttggcgatgggatgacggcgacatggtgctcaattgatggtgacactagcggagtttaaagctagcggcaacggaactacgtgcgcggccggttgaccagtgaaccttggcaccaagcagtggaagcgcagggtctcgaagcgaagtgcctgctacggttcatacagttggtacgcttcttggaaatacggccacaccaccaccatgaaccaacagttgcagaccaagctgcacgcgctcatacagcgcggccagttgccttcatcgcaatgcggtgtacgtttcaaagaatggataatgccgctcctacagaccggtgtggtgcgtgaagtgcggaccggcgccggtgcatcgctcagtatcataaacgccaatgcggtgcagggcttctacgacaaggcctttccgaacccagttctggatgaagctcttgggaaccgtatcaacggcgtggggctattccgtaattcaaaggcgatagcgaatgatactcccgagatcataatggcacgtgtggcggaaggcagtcccatcctgcatgatggcccgctcaccgaaagcgtacaagccacacaacgtaatggcgtcttcgcgatccggctctcttcacgccaacggcccgtgctacaaggcaattgggtgttgatcgagaacccagccgtcttccaccaacaccatcgtgtgttcggtagcgctacatcggctttactggtcaatggtcgcatgtctcaccgtgtgcttcagtggttggcagaacaaggcacggatcatctgaacttgctgcactccccagactatgaccccgtaggcctggatgagttcgtccggctccacaacgtgctaggcgaccgcatccggctctacctaccagccgacattgagcagttgttcgcccggtacagctccaaacaattgatgctgctggagaaacagcaaaccctagcgcgaaaactgagtgaccatccacacccctatgtacagcggatcgttggccttatcagcgcgaacaatgccgggttggagcaggaggcattgctgatctagcgagggttgaaaaggtggtcggggcagcgcaacaggcactactcctacccatcgccatccccaccataatgttggtgcggcttgtagccagcatcgggccgttgcaggtagtggtccaggtagtcgtcgaagctgttgttcaccggcaccaacagatccacggctatgaagcactgtaaccagggttccggctcaggcgccgcattagccacgtaagcggagagcagcatgccatggtcgatcaagttggccaacgctttgttctcgaacatggataggtagcccagcttgtgcgcctgccagtacacggccacggcatcggggtcgtgttccttgccatactctcgcaccatgtcaaggtcgtcatggtccttcatctgcgcgaccgcctggccaccactatggtattggaagccgcgcacgaaaccatcgtacacgaaaagctggtggccgtgtttggtcaacgccaggcggccctagacctcgctggcaagcagctccagcggtggcacggtgagcaaagccggaccgccgaggagggtgtggagtaaggtgaggcggtgcatgggggggctatttgatccaacatgatgttataggctgtccaacaagcatatcggcagaaagaatacattcggaaaaccaagaccagaaaataagcgaccccacatgttgccatgcggggccgagtgaatgttcacacaacgggataaacccttattgtgatctgcttcagttcttggcacaaatatagacaaccgaaccacatgaagaagatcttaggactggaccttggtaccacctccataggctgggcagtgatcaatgaagcggagagtgagaaggagagttcaggtatagtgcgatccggtgttagggtggttcccttgtccgtggatgagcaaaccgacttcgagaaaggcaggccactatcgaccaatgcggatagaacgttgaagcgcggcatgcgccgaaacttggaccggtaccaagaccgccgcgcgcacctattctacctgctaagagaacacggtctgatcaaagagggaactgtactaacggaaacaggtaagggaaccacacacaccctatgggcgctgcgtgccgacgcggctaccaagccgatactgctggaagacttcgcccgcgttctattggccatcaacaagaagcgcggctacaagagcaacaggaaggccaaggatgaagatgagggccaagcgatcgacggcatggccatcgccaaggagctatatgacaacgatcttacctgcggacagtacgggctgcaacggctgaatgcgggaaagcgccatattccggaattctaccgatctgacctgaaggcggaactgaacaggatctggaacaagcagcgggagtatcacggtgaactgttgagccatgttcttctcgaaaagatcgcgggtaagaaccaaacgaccacgtgggccattcttaaggagccatggggactggtcggtgagaagcgaacttccaagggattagacaagagagtagaagactaccaatggcgtgtggatgccttgagccggaagctgacactggaacagttagcagtagtgatccaacaagtgaatggggccatctccacttccagcggtctgttgggtgctatcagtgaccgaagcaaacagttgatgatacaggacttgaccgtgggacagttcctgtacaatcagatcaaagagaacaagcacaccccattgaagggtcaggtcttctaccggcaggattacctggacgagttcgagcgtatatgggaagtgcagaaggacaagcatccgcagctgaccgcggaactcaaacacgacatccgcgacacggtgatcttctaccaacgccgcttgaagtcacaaaaggggcagcttgcggtgtgtgagttcgaagggaaggaacaacctgtgatcgatgagaatggcaagccagctttgaccaaggaaggcaagccgaagatgcgaaaggtgggacctcgcgtctgtccgaaggcctccccccttttccaagaattccggatctggcaagtgctcaacaacattgagttgatctatgaaggaaaagatggcacaggcgatgaacgctcggaaaacggcatagtacggaagggccgatcttggtgccttggctcggagtacaaagcccggctctacgcggaactcagttggaccaaggagctatccgcatccgatgcgttgaaggtcctaaaactacagcctaaggagtggaaggtgaacttcaagaagttggaaggtaaccggaccaatgagaagtacttggagatgttcggagcgatgctccgcgtgaccggccatgatgaagtggacttgaacaaactgactgccgaagagcgcgccaagacgatcgaagagatcctgggagccttgggtgtggataccgacatcctgcacttcgacgccacactttccggcaaggaattcgagcaacagcccgcgtatgcgttgtggcatctactgtactcgtacgaaagcgacaattcgtcccgcacaggcaacgaacggctcatcaaacaactggtagagaagttcggcttcaaccgggaatgtgcggagatcctgtgtaagatccacttcgaggatgaccatggcagcttgagcacacgtgcgatcaagaggatacttccccatctgaaggacggccagatctatgacgtagcctgtgaacttgctgggtacaatcactcccattcggtgaccgccgaagagaacgaagcgcgcgagttgatcgatgcgttggggatcctacccaagaacagcctgcgcaatcccgtggtggagaagatcctgaaccagatggtgcatgtggtgaacaaggtgatcaaggtctacggaaggccggatgagatccgggtggagatggccagagagctgaagaagagcgcgaaagagcgcgaggagatgaccaaaagcatcgatgatgccaccaaagcacacggcgtcatccgcaaagagatcgcgcagtattaccccttcaataccggcgtgcgcatcacgcgtaacgacatcatcaagtacaagctgtatcaggaactgaaggagaacggcttcaagaccctctacagtcagacgccggtggtgcccgaagagctattcggcaagaagttcgatgtggagcacatcattccccaagcgcgtctgttcgacgacggcttcagcaacaagacgatagagttgcgttcggtgaatgaggagaagggcagaatgaacaacgcgaccgccatggattacatggaggtcaagtacggccccgaaagcgaacaggtggcgcagtacaaagcacgtgtggaacgcttcttcaaaaaggccagtccggcgaagttcaagaagctgctgatgaaagaagccgacataccggatggcttcatcgatcgtgacctgcgcaatacgcaatacatcacgcgcatggctcttggcctgctccgtcaagtggcccgcaccattacgcccaccaccggtagcgtaacggatcgactccgacaggactggcaactgatcaatgtgctacaggaattgaactggaccaagtatgacaaggcaggcctcacctacaccgagaagaacaaagacggtgatgtggtgaacaagatcaaggactggaccaagcggaacgaccataggcaccacgctatggatgcgatcgctgtagcgttcactcggcccagccacatccaattcctgaaccacctgaacgcacggcgcgatgaggaccacaaaaaacacgcggtcatccaagccattgagcgcaaggaaacctacatagataccaagggtcggcgactgttcaagccaccaatgccgatcgatgaactgcggaaggaagtgaagcagcagttggagagcaccttggtcagtttcaaggccaagaacaaggtgacgacccgcaatgtgaacaagagcaagacgaaggacggctaccaccgtaaagtggaactgaccccgcgcggacaactacacaaagagaccgtgtacggcaagaagcagttctacacgaccaagttggtgtccgtaggcccaagctttgaccaagcaaccatagctcaagtagccagaatggactaccggcaagccctactgctacgcttgcatgccttgggcggcggtgaacccaaaaaggcgttcggtggtaagaacgcactgagcaagaatccgatctgggtggacgagcaccatatggagcaagtcccagagaaggtgaagctggtgcaaatgacctcgcgcttcacgatcaggaaggccatttcaccagacatgttcaaagactccaagaagaacgatgacttcttgaatagggttgaggacgtacacgatagggccgtggtgaatgcactgaaagcgcactatgagcgcacgcggctggaagttgaagcgttcaatcagactgtgagttcagtgaaagagaggaagaaagtgctggaaacagccttctccaacctggatgataatcccatctggctgaaccgtgaaaagggcatcaaggtgaaccgggtgaccatcactggggtaagcaacgcagaagcactgcacaccaagcacgatcacaacggcaaggccatactggacaaagatggtcgtgaaataccaagcagttgggtgcaaaccggcagcaaccatcatgtggccatctaccgggaccaagaaggaaatttgcaggagagggtggtttcgttctatgaggccgttacacgccggctacagggccaatcagttattgaccgcagccttaatgcgaaccaaggttgggtgttcctgtacactatgaagcagaacgaaatgttcgtgttcccagacaaggaaaatgacttcgacccaagcactactgacctcaaggacccatcgaatgcttggaggatcgcacgtaagctgtaccgcgtgcagtctcttgcacgcagtgagtacgggaacaatgtgatcagggactaccaattccggcatcatctggaatcacaactggtcaatgcgaaggagctacagaattccacctactacaagatcaaaagtctcaaggacttggagggtattcaaaaggtccggttagatcatcttggccgcgtggttcacgtgggtgaatactgagccatgatcaagcgcaccatcgccattaccacgccctgccatctctcgctgaagcttgggcaaatgctggtgcgcagcaaattattggagggcgatacgggtaagagcgtaccgatcgaggacatgggtatgctgctgatggagcatgaacaggttaccgtgacacagggcttgctcgccaagctgttagaacacaacgtggcggtggtgaactgtaacgcacagcatcatcctgttggcatgctgctcaacttccaagggcacagcacccaaacggagaccttcatcgcccaggccgaagcatccannnnnnnaagccgttgaaaaagcaactatggcagcaggtggtcaaggccaagatcagcaaccaagccgccattctcgataaaatggggcaggacggtggtcggctgctcaagcttgcccaagaagttcgtagcggggatgtggacaatcgcgaaggtgtagctgccgtgtactactggccgcgtctgttcaaagggatcccacagtttttgcgcgaccctgaagggcactaccccaacaacgtcctgaactatggttacgccatcctgcgtgccaccgtggcccgtgcgttggccgggagtggcctccaccctactctcggcctcttccatcgtaaccggtacaatgcctattgtctggccgatgatatgatggaagcctaccgcccagtggttgatcaagtggtggccggcatagtcttggaccgcccatttgcccagaccgaactggaccaaggggtgaagatcgaactattgcgtacccacaccctggacgtcgatatgggtggcatcaagcgccccttgatggttgccgtaagcgagaccaccgcatcgctcgccagagcctttctaggttcggacagccaattggccttgcccaagcccgtatgagccatgaccgctatagcgcctaccgggtcatgtggctgttcgtgatgttcgacctcccgacggagaccaagaaggaccgcaagaacgccgcgcagttccgcaagagcttagtggagaatggcttcaccatgatgcagttctccatctacttgcggcattgtgcgagcaaagagaacggcgaagtccaccgcaagcgggtgctagcgcttttaccacagcacggcatggtcaacatcctggcggnnnnnnnnnnnnnnnnnnnnnnnnnnnnnnnnnnnnnnnnnnnnnnnnnnnnnnnnnnnnnnnnnnnnnnnnnnnnnnnnnnnnnnnnnnnnnnnnnnnnnnnnnnnnnnnnggtcggggccaattggccccgaccgtacatccttcggaattttttccggcccaaagtcgccgattcccttgtccctattgcctttcagagcatcgtgttggatcaactaggccaaaggaaagaactgaaagcagatcacaacgggatttaatgtggaacgctggaaacttaggttggatcaactaggccaaagg

SEQ ID NO: 4435 - DNA, 12121 bp, synthetic construct
  source 1..12121: mol_type = other DNA
  misc_feature 1..12121: note = Synthetic
ggccgtccggacgcctcttccgcggatgcatcgcaccaaggttaccgggctggcaacgacctggcaaggggaatggatcaacccggcgcaggcccgcacgcatccgatccgccaccggcccattggcgtgcatcatcctcgggcggtacaccggtcgcccgacaggaacacgggcggaataaaccgcggcaaatggacttgttgaccaccatcccgactgccgccgtccggccaccggccgcccccttggccaccacctccagccccggctatttccaggtggtgttgcatgcctgggaccgaagaaccatcacctacgtgtgcgccgatgcggacggaggaagccccgccgccggggtaccagcgctcacggtgcgcgttgatgtggtctccgctggcggctacaactggcacatcgtcggtggcacggcgccgttcacggtgctcgccagtggcgtggaccccgccggcaatgcctgtgtgcgcgttcaggatgccgaaggccaattgtccacggcctgcggaatgatcggtaccatgaacgagatccgggcgatccactgcgcgttcagcaggccggacacgaattcattcaaagcgctacacaagcacggaagcgcccccgggcacggcgcggttggaaccgccccagtaagcccgccccggcagcccgacccaccaccgcccgcgcgcaaagacccttccccacttccctctccgccacggggcccggatcccacaaagccgcaagatccctaccggccgccggtgcgggtggtcctgaccgatccggacccgcccccgcccccccctgggcctgtgggccgtaacccctcagtgcccgatccgcggaacacgccgttgcacccgccggggaccatgaacggcggccaccgggatccggccatccagcgcccggccctgatgccgtccccggtcacccatggtggcaagccctcaccaagcccacagccccggccttcgcctgcacctgcggcaccggccaaagggaaggcttggtgagcactgcgggtgcggcacgaacacgccgcaccccttatgttcggcccatgccgcgcacccggatcaggcagcaggaactgcgggaaatattggaggaagcgtacgaccgctttgccacgccggatttcattgcggacgatcccatccaagtaccgcgctccttcgccctgcgtgaagatgcggaggtgatcggcttcctcaccgccaccattgcctggggccagcgcaaaaccatcattgccaatgcgtggaagctggtgcagctgatggacgaggctccgcatgatttcgtgatgcacgccaccgcactggacctgaaacgcctggattccttcgtgcatcgcacgttcaacggcaccgacctgcgcacgttcatcggcggcctgcgccacttgtacgccacctacggcggtccggaggcatccttcctgcctaccgaagaaggtgcgcagttgccttccttggcggaaatgatcgccctgttccgcacgcgcttcttcgaaccccggcacccgcaccgctcggaaaagcacgtggccaaccccgctcgtggcagcaacgccaagcgcatcaacatgtacctgcgctggatggtgcggcctgccgatcgcggggtggacctgggcctatggaaacgcatcccgacctccgccttgcacgtaccgctggacgtgcataccggccgggtggcgcgcgagctgggcttgcttcaacgcaagcaggacgattggaaagccgtggaagaactcaccttggccctgcgccgcttcgaccccaacgatcccgtgaagtacgatatcgcgcttttcggatcgggtgtgagcggcaggtagttgatggtggggtgggtagcgtgatctacgccctgcgcactacgccctacgaactacgccccaacaaccacaccacctaccccacactgtagttcggggcctcccgcgtgatgaacacatcgtgcggatggctctccttcatgcccgccggggtgatgcgcatgaacgtggcctgttgcaacgccgcgatgtccgccgcgccgcagtagcccatgcccgcgcgcaggccgccttccatctggtggatcacttcgtgcagcgggcctttgaagggcacgcggccgctgatgccttccggcaccagcttcttgatgtcgtcctccatgtcctggaagtagcggtccttgctgcccttctgcatggcctcgaggctacccatgccgcggtaggtcttgaagcggcgtccttcgtagatcaccgtttcgcccgggctttcctcggtgccggcgaagagcgagccgaccatcacgctgtcgccgcctgcggccagcgccttcaccacgtcaccggtgtagcggatgccgccgtcggcgatcacgggcacgccgctgccggcaatggccctggcgcaatcatgcacggcggtgagctgcggcacgcccccccctgcaatgacgcgggtggtgcagatgctgcccgggccggtgcccaccttcacggcatcggcacccgcgtccaccaacgctttggcggcggcgccggtggccacgttgcccaccaccaggtccaccttcggaaaggccttccgcatggtgcgcagcatgtcctgcacaccgatgtggtggccatgggcggtatcgatctccagcgcgtccaccccggccgccaccagggcattggcccgctccaggctgtcgcccgtaacgccgatggcggccgccacgcgcagccggcccaggtggtccttgcacgcattgggccgctgcttcagcttgatgatgtccttgtaggtgatcagccccaccagttggccttccgcgttcaccacgggcagcttctcgatcttgtactcctgcaggttgtccgaggcttgcgccatggtcacctccggcttggccgtgatcacattgtccttggtcatcacctcggagaccggcttgcccaactcccgctcaaagcgcaggtcgcggttggtgacgatgcccaccaggttgttgccgtcgtccaccaccgggatgccgccgatcttgttctcggccatcagcttcagcgcatcacccacggtggcgccggcctgcaacttcagcgggtcggtgatcatgccgctctcgctgcgtttcaccctgcgcacctcattggcctgctcggcaatgccctggttcttgtgcaccacgccaatgccgccctgctgggcgatggcaatggccagcgcggagccggtcaccgtgtccatggcggccgacacgatgggcaggttcagcgcgatgttgcggctgaagcgcgtgcggatgtccaccgcgcgcggcagcacctcgctataggcgggcaccagcaagacatcatcgtaggtaaggccttgcacggcgaagcggtcggcaagcggagcggccgcaggggccgtgcgatcgccgcgctgcggggcgatggcggatggggatcgttccatgcacaaaggtaatgtgcgggcggaaatggccggttcgggcagcaagggcatcgcctcttgctgcgccagtgcagtgactactgacgtgttgggctggcacaggctggtgaagaggtgcggacgtatgccacttcgcctcgatacccaaccaccccgggcagggcccaagggtgaacaggggccttgagcctgctgccgcacgtgtaccgggcgcgtggccttttccaggaaattcagaaaactgaaatgcccctgcgatccagtgttaaatatagcttatgcgagatggcgcgaaatgaaaattcagatggctacgtacattcgaccagaatgaactggccacaaataagcgacccggcaacattgctgcgccgggccgagtgaatgttcacacaacgggataaacccttattgtgatctgcttcaattcttggcacaaatatagaaagcaaccaccacatgaaaaagatcttgggattggacctgggcaccacctccatcggctgggcggtgatcaacgaagcggagaacgaaaatgaacaagcctccatcgtcggtactggcgtgcgcgtagtaccgctcaccgtggatgagcagaccgacttcgagaagggcaggccgctttccaccaacgccgacaggaccctcaagcgcggcatgcgccgcaacctggaccgctaccaggaccgccgcgcgcacctgctgcaactgctgaagcagcacggtctcatcactgaggatacggtcctgacggaaaccggcagcaacagcacccactcgctatgggcgttgcgtgcagatgcagccaccaagccgatcgcgctggaagccttcgcacgggtgctgctggccatcaacaaaaagcgtggctacaagagcaaccgcaaggccaaggacgaggatgatggacaggccgtggatggcatgaccatcgccaaggagctgtacgacaacgacctcacctgcgggcagtacgggctgaagcggctacaagacggcaagcgccacatccccgacttctaccgcagcgacctgaaagcagaactggagcgcatctggcgcaaacaacgggagtaccacggcgaactgctgcgccatgaactgctggagaagatcgcgggcaaggcacaaaaagccacctgggccatcttgaaggaaccctggggcctggtgggtgaaaagcgcaccaccaagggcttcgagcaaaaggtcgaagactatcaatggcgtgtgaatgccctgagcgagaagatgagcctggaacaattggccgtggtggtacagcaggtgaacggcgccatctcctcttcaagtggactcttgggcgccatcagcgaccgcagcaagcaactgctgatccaagacatcaccgtgggtcagttcctgtacaagcagctccaggaaaacccgcatacccgcacgaaaggtcaggttttctaccggcaggattacttggacgagttcgagcggatctgggaagtacagaaggaagcccacccgcaactcacggatgacctgaaacgcgatgtgcgcgatacggtgatcttctaccagcgccgcctgaagtcgcagaagggccagttggccgtgtgcgaatttgaaggcgtgaagaagccggtgatcgacgagaacggacaaccggcaatgaccaaggacggtaagccgaagatgcgcaaggtgggaccgcgcgtgtgccccaaagcctcacccctgttccaggaattccggatctggcaggtgctgaacaatgtggagctgacctacgagggaaaagatggaagcgccgatgatcgctcggagaacggcatcatgcgcaaaggcaaagcttggtgcctcggtccggaatacaaagcgaagctattcgccgaactcagttggacgaaggaactcaccgcagccgatgcactgaaggccatcggcctcaaacccaaggaatggaaggtgaacttcaagaagctggaagggaaccgcaccaaccagaagtacatggaagccttcggggcgatgctggctgttaccggccatgatgacgtgaacctcgaggagctacccgctgaagaacgggcaagcaccgtggaagccgtgttgaacaccttgggcgtggataccgggatcctgcacttcgacgccacgctggcgggaaaggagttcgaacagcaacccgcgtacgcactgtggcatctcctgtactcgtatgagagcgacaacaagtcgcgcaccggcaacgagcggctgatcaagcaactccgcgacaaattcgggttcaaccgggaatgcgcggagaccctgtgcaagatctcctttgaggatgaccacggcagcttgagcgcacgggcgatcaaaaagatcctgccccatttgaagcaaggggagatctacgatgtggcctgcgagctcgccgggtacaaccactcccattccgtgacggccgatgagaacgaagcccgtgaactgatcgacaccctggagatcctgcccaagggcgccttgcgcaaccccgtggtggagaagatcctgaaccagatggtccacgtggtgaacaaggtgatcgccgtgtacggccgccccgacgagatccgcgtggaaatggcccgcgaactgaagaagagtgccaaggaaagggaggaaatgaccaagagcatcgatgcagctaaccgggcccacgataccatccgcaaagagatcgcgcagctccaccccttcagtaccggtgtgcgcatcacccgaaacgacatcatcaagtacaaactgtaccaagaactgagcgtgaatagttacaggaccttgtacagcgatgtggagatcatcaaggagaagctcttcagcaaggaatacgacattgagcacatcattccccaagcacgcctgttcgacgacagtttcagcaacaagaccatcgagctgcgcagtgtgaacctgaagaaaggcaacgccacggccatggacttcatggagaccgagtacggtcccgacagcgagcaggtggccgagtacaaggcacgcgcggagaagttcttcaagaaggaaagcccagggaagttcaagaagctgctgatgaaggaagccgacatcccggacggcttcatcgaccgcgacctgcgcaatacccagtacatcacgcgcatggccctgggcttgttgcggcaggtggcccgcaccgttacgcccaccaccggcagcgtcaccgaccgcttgcgccaggattggcaactgatcaacgtgctgcaagaattgaactgggacaagtacgagaaagcgggcctcacctacaccgagaaggacaaggacggcggcgatgtacgcaagatcaaggactggaccaagcgcaacgatcaccgccaccacgccatggatgcccttgccgttgctttcacccggccgagccacattcaatacctgaactacctgaacgcccggcgcgatgaggaccacagaaaacacaaagtgatcctcgccatcgagaacaaggagaccaccgtggacagcaagaaacgtcgcctcttcaatccgcccatgccactggaccagttacgcgcccaagtgaagcaacacctagaaagcaccttggtgagcttcaaggccaagaacaaggtgaccacccgcaacgtgaacaagagcaagaccaagaacggccacttccgcaaggtggaactgaccccgcgcggccaactgcacaaggagaccgtgtatggcaaaaaacggttctacaccaccacggaagtgaaggtggggcccagcttcggtgcggacatgatcgcccaagtggccaaggccagccaccggcaggccctgttgctgcggctccatgcggtgggcggtggcgaccccaagaaagccttcggtggcaagaacgcccttgccaagaatcccttatggttagatgaccagcacaaggagcaggtaccggaaaaggtgaagctggtgcagatggaggagcagttcaccatccgcaaggacatcaccccggacttgttcaaggactcaaagaagaaagacgacttcgcgaaaagggtcgaggatgtgcatgacaaggccgtgagaaatgccttgaaagcccactatgaacgcacaaagctcgaagtggaggcattcaatgagaccgttacgaacgccaaggagaaaaagaaggtactggaaacagccttctcaaaccttgccgggaaccccatctggctcaatcatgcgaaggggatcaaagtgaacagagtgacgataaccggagtgagcaatgccgtagcactgcacgtgaagcgcgaccaccacggcaagtcgatcctggatgccgacggtcatgagattccatccgactacgttcagaccggcaacaaccaccacgtggccatctaccgcgatgccgaagggaacttgcaggatgaggtcgtatccttctccgtggccgtggagcgtgtacgccaaggcttatcgccgattgacagaagtttcaatagcaataagggctggcgatttgagtacacactgaagcaaaatgagtttttcgtccttccaagtgcagaaaccggatttgacccaaccgtagtcgatctgcttgatgggcggaatgccaagctcatttctccgaacttgttcagagtccaaaaattctcaaagctgcaatatgggaacagctttgtccggcagtacatgttcagacatcacttggaaactacgttgttggacaccaaagaactgaaggatgtagtctacaaggacatcaaaagtttagggtacttccatgggatcagaaaggtgaggctgaatcatcttggtcaaattgtccacgttggcgaatactgagccatgatcaagcgcaccatcgccatcaccacgccctgccacctgtcgctgaagctggggcagatgctggtgcgcagcaaactgatcgaaggtgatgcgggcaaaactgtaccgatcgaggacatgggcctgctgctgatggagcacgagcagataaccgtgacccagggcctgctggccaaactgctggagcacaacgtggccgtggtcaactgcgatgagaagcaccatccggcgggcatgttgctcaacttccaagggcgtagcacccaaacggagaccttcatcgcccaggcggaagccccgaagcccttgaaaaagcaactgtggcagcaagtggtgaaggccaagatcggcaaccaggcggccgtgctggaggccatgggccaggatgggggcaggctgctcaaactggcccaggaagtgcgcagtggcgataccgacaaccgcgaaggggccgccgccgtgtactactggccgcgcgtgttcaaacgcattcccgatttcctgcgcgaccgggaaggcgattatcccaacaacttgctgaactacggctacgccatcctgcgggccacggtggcgcgggccttggcgggcagcggcctgcaccccaccctgggcctcttccaccgcaaccggtacaatgcgtattgcctggccgatgacctgatggaaccctaccgcccgctggtggaccaagtgatcgcgggcatcgtgcaggaccggcctttggaccgcacggaactggaccaggaggacaagattacgctgctgcgcacccccaccctggatgtggacatggacggtaagatgcgcccgctgatggtggccgtgagcgagaccactgcctcgctggcacgggccttcctgggttctggcacggccttggctctgccaagaccggcatgagccatgaccgttacagtgcctaccgcgtgatgtggctgttcgtgatgttcgacctacccactgagaccaaaacggaccgcaagaacgctgcgcagttccggaagcgtttggtggagaacggcttcaccatgatgcagttctccatctacctgcgccaatgtgccagcaaggagaatgcggaggtgcaccgcaagcgggtactcgcactactgccacctcatggcatggtgaacctgctggctgtgaccgataagcagttcggcaccatggaaatctacctcaacaccaaggaggtagcggagatggacacgccgcaacagcttgaactgttctgaaaaagaggttggagcacctcgctccagccctcctttccattcagttttttttcgggcccgaatcgctggaacgcccgtccttagtggactttgtggaatcctgttggatcagctacccacaaaggaaagaattgaaagcagatcacaacgccaacacgcccacggaccgcgcgccttccgttggatcagctacccacaaaggaaagaattgaaagcagatcacaacgccggcgcattcgtgaacagcggcgtggtggttggatcagctacccacaaaggaaagaattgaaagcagatcacaacaacgagcttggcgttgagccccgcgttgctgttggatcagctacccacaaaggaaagaattgaaagcagatcacaacacgggccggtcaatgaaatcttgacgctcgttggatcagctacccacaaaggaaagaattgaaagcagatcacaacaccgcgttgtggaacctgcccaccacgcgcgttggatcagctacccacaaaggaaagaattgaaagcagatcacaacgcacaatgagcaacaggaaccacaggcgtagttggatcagctacccacaaaggaaagaattgaaagcagatcacaacaacccatttgaaccatggaacaacacctgagttggatcagctacccacaaaggaaagaattgaaagcagatcacaacagggtaggtgctgaattccactttcaggtggttggatcagctacccacaaaggaaagaattgaaagcagatcacaaccggacgtggagtatcaagctcccgccaacgttggatcagctacccacaaaggaaagaattgaaagcagatcacaacaagcagcgacaatgaagccactgagcttgggttggatcagctacccacaaaggaaagaattgaaagcagatcacaacgcattgatggccgtgatgctgctcaacgtgttggatcagctacccacaaaggaaagaattgaaagcagatcacaacggcaccaaacaaatgatgaatacgccaagtgttggatcagctacccacaaaggaaagaattgaaagcagatcacaactacgtggaaaaagacggaaacgtaattctagttggatcagctacccacaaaggaaagaattgaaagcagatcacaactcttttttcgctgctctcttcatcatcgcgttggatcagctacccacaaaggaaagaattgaaagcagatcacaacgcacggcgcgcgcggatgctcgccttcattgttggatcagctacccacaaaggaaagaattgaaagcagatcacaacctcggcatcgtagccgagcatctccagcgcgttggatcagctacccacaaaggaaagaattgaaagcagatcacaactcggatcgcgcctgcggtaccggcattctggttggatcagctacccacaaaggaaagaattgaaagcagatcacaacaaataagctgcggcatagtaaagagtgggggttggatcagctacccacaaaggaaagaattgaaagcagatcacaacgggatcaaaacgcttttgatgtttaattcgttggatcagctacccacaaaggaaagaattgaaagcagatcacaactggatttctacaggttcgccatcgttggatgttggatcagctacccacaaaggaaagaattgaaagcagatcacaaccgcctgcttgccgcttggtcgtgaggttacgttggatcagctacccacaaaggaaagaattgaaagcagatcacaacgcatcatgcaccacgccgttgatggcgaaggttggatcagctacccacaaaggaaagaattgaaagcagatcacaactgattaccttcggtacatgccggtgaatatgttggatcagctacccacaaaggaaagaattgaaagcagatcacaactaggggaatcatggaaggagcgtgccctggagttggatcagctacccacaaaggaaagaattgaaagcagatcacaacaccaccccatgtttcctttctttttcattgttggatcagctacccacaaaggaaagaattgaaagcagatcacaacttgaaggtgaaaacattgaaggaagagctagttggatcagctacccacaaaggaaagaattgaaagcagatcacaaccttgagttttccatcggagccctccgggccccactggaaaactcacgcctgcggcgtttgctgtataggtgttgcacgtccgcgctccacgcctcctcaccgccccgccacaaacgtcaccgtgccgcgcttctccacggtttttccggcgccgttgcgaacggcgcaataccaggcgtacaccccttgcggcaccactgatccattgatgcggccgtcccacggcaggtcggggttgttggtggtccagatctgctggccccagcggttgaagagggtgaactcgtagcgcgacacgtccgcaaaggccagcacgggcttgaaggtgttgttgtagccgccctcgatgaaggcgttgggcacccacacttcctcttgctggatggcgcacacgttgttgctttccgatgtggcgttgatgcccgctgggttgccggcctccaccgcctgcacgtagtagcagaacttgccgggg

SEQ ID NO: 4436 - DNA, 4324 bp, synthetic construct
  source 1..4324: mol_type = other DNA
  misc_feature 1..4324: note = Synthetic
cctgctccatgccagggcggaccagggtgagttgccaacgcgcgctgaccatcacgcagctttgggccttggcacccaccgccatatcggggaccttatgcgggttcaacgaatatgcggctgcacttgcctccttgtataaggccgcaaatcatactttgctcttcgtttgaagccgagaccacagagtagcccacccaccaataaagcgaccccgtatgcaagcacacggggccgagtaaatgttcacacaacgggatagacccttattgtgatctgcttcaattcttggcacaaatatagacacgcgaacaacatgaagaagatcttgggattggacctcggcactacctccattggatgggccgtgatcaacgaagctgaaaatgacggcgagcatgcggagatcatccgtacaggcgtacgggtcgtaccgctctcggtcgacgagcaaacggacttcgagaaagggaaccctctttccaccaatgcggagcgcaagcagaagcggggcatacgccgcaacctggaccgctatcaggaaaggcgagaccacctgctcggcctgctcagggagcatggcttgatcaatgagcaaacggcgcttgccgagaccggcaagaacagcacccatgccctgtgggctttgcgggccaaggcagcgaccgaacgcatcgaactggaccagttcgcccgcgtgctgctcaccatcaacaagaaacgcggctacaagagcaaccggaaggcaaaggatgaggacgagggccaggccgtggatggcatgtccatcgccaaggaattgtatgataacgacctcacctgcggccaatacggcttgcaaagactacaggcgggcaagcggcatataccggacttctaccgctccgatctaaaagaagagttggaacgcatctggaacaagcaacgggagttccatggtgagttgctcagccatgagctgaaggagaagatcgcgggcaaagcacaaaaggcaacgtgggccatattgaaagaaccatggggccttgtgggtgaaaagcggaccaccaaagggttcgagcaaaaggtggagaactaccagtggcgggtggatgcgctttcgcgtgagttgagcctggagcaattggccgtggtggtgcagcaggtcaatggcgccatctcgtcctcaagcgggcttcttggtgccatcagcgatcgcagcaagcaactgatgatccaggacctttccgtgggccaattcctgtatgcacagatccagcgtgacccgcattcccgcgtaaaagggcaagccttctaccggcaagactacctggacgaattcgagcggatctgggaattgcagaaggagttccatccacaactcacaccggaactgaagagcaaggtgcgcgacaccgtgatcttctaccagcgccgcctgaagtcacagaagggtctattggccgtgtgcgaattcgagggaacgaagcagccggtgatcgacgagaacggacaaccggccatgaccaaggacggcaagccgaagatgcgcagtgtaggtccgcgcgtttgtccgaagtcctctcccctattccaagagttcaggatctggcaggtgctcaacaacgtggagctgatctatgaaggaagcgaaggcaccggggacgagcgctcggagaacggcattcagcgcaagggcaaagcatggtgccttggtcctgcatacaaagcgcaactctacgcggaactcagttggaccaaggaactcactgcgaacgatgtcttgaaattactcaagctcaagcccaaggagtggaagatcaacttcaagaagatcgaagggaaccgcaccaaccagaaatacatggatgccttcaaggccatgttggaggtttccggccacgacgaagtggacctggacgcggtttctgctgaagaacgcttgaagaccgtagagaccatattgggcgctttgagcgtggacactgacatcctccacttcgatgccacgctcagcggaaaggaattcgagcagcagcctgcgtacgccttgtggcacttgctctactcctacgaaagcgacaacaagtcgcgcacgggaaatgaacgcctgatcaagcaactcatcgagaaatacggcttcaaccgtgattgcgcggagatcctgtgcaaggtccacttcgaggaggaccacggcaacctcagcgcaaaggccatcaagaagatcctgccgcacatgaaggaaggacacatctatgacgtggcctgcgacatggccggatacaaccactcacactcggtaaccgctgaagagaacgaaacaagaacgttgatcgacgcactggagatcctccccaagaacagcctgcgcaaccctgtggtggagaagatcctgaaccagatggcgcatgtggtgaacaaggtgatcgaggtgtacggcaggccggacgagatccgcgtggaactggcccgcgaactgaagaaaagcgccaaggagcgtgcggagatgaccagcagcatcagcacggccaccaatgcacacgatgttatccgtaaggagatcgcgaagctccaccccttcagcaccggcgtgcgcatcacgcgcaatgatgtgatcaagtacaagttgtaccaggaactgaaggagaacggctaccggaccctgtacacggacacccatgtggtaccggaggaactcttcggcaagacgttcgacatcgaacacatcattcccaaagcgcgcttgttcgacgacagcttcagcaacaagaccatagaactggcaacggccaaccgcgagaaggacaattccaccgcgctggactacgtggagaccaaatacggtgcggacagtgaaaaggcggtccaatacagggcacgcgtggaacgcttcttcaaaaagacctgcccgtccaagttcaagaagttgatgatgaaagaggcggacatcccggacggcttcattgagcgtgacctgcggaacacgcagtacatcgcacgcatgtcgatgggcctattgcgccaagttgcccgcatcgttaccgccaccaccggcagcgtaacggacaggctgcggcaggattggcaactgatcaatgtgttgcaggaactcaactgggcgaagtacgaaaaggccggacttacctatgccgagaagaacaaggatggcgaccaggtgcgcaagatcaaggactggagcaagcgcaacgaccaccggcaccacgccatggacgccattgccgtagcctttaccaagcccagccacatccaatacctcaaccacctgaacgcacggcgcgatgaggagcacaagaagcacaaggtgatccacgccattgagcagaaagagacggatatcgattccaagaagaagcggtacttcaagccgcccatggagatcaacctcttgcgcgatcaagtgaaacgccacttggaagccaccttgatcagtttcaaggccaagaacaaggtgaccacctggaacgtgaacaagagcaagaaggcgaaagggttccaccggaagaaagaacagaccccacgaggccaactgcacaaggagaccgtgtatggcaagcaacaggtctatgtaaccaagctggtgaaggtggggccgagcttcgaccaggacaccattgcccaagtggccaagaagagccaccgccaagcgctgctgcaccgcttgcatgcctccggtggcgaccccaagaaagcattcgggggcaagaacgcactgagcaagaatccggtttggttggatgagcaccacaaggagcaagtgccggagaaggtgaagctggtggagatggaaacgcagttcacgatccgaaagcccataggcccggacctgaaaatggacaaggtgatcgacggcagggctaggcagctcctggaacggcgcttggccaagttcaacggcgatgccaagaaagccttctccaacttggaagaagacccgatctggatcaatggcaagggtggggcgcaactgaaacgggtcaccatcacgggcgtgagcaacgctgaagcgctccacaccaaacacgacctacacggtaaacctgtgcttgatgctgacggcctgcggcggttgctcgacgaaggtccgggaatccttcccgttgcgtaagtctcaattcaccaaaaatggcgaggcttagagacggatcgacgaggctggtgagaagatgacgaacatggctgcgaactccgctacaacgacacgcgcaacgaaggcatcgacgtcgagtcgctcgtcccgcaaagacgccccgccgcgcgttgagaagcccgagactctggagcacctgctcgcgacgtaccgcaatgcaccggatcaggttggcga

SEQ ID NO: 4437 - DNA, 24197 bp, synthetic construct
  source 1..24197: mol_type = other DNA
  misc_feature 1..24197: note = Synthetic
ttatttccctccttcaaaatagcagccaaaaaatgttccgtacctatttcttctaatcccaaattggtagcttccaaaaaagacaatttaataactctttcagtttgttttagtaatgggacatctttttcttgattcaatgcttggaatacatcagtcttttgaatagcttgctctatttctttttttattacctgtgggtctatattaaaatcagctaatatgtgcattgccttacattctttctgtcgcaccattcctaaaaataaatgctctaccccaaaaaaatcactccttagtcgcattgcctcatcgctgccttcttttattaccttttttgcgttatctgttaatttagcatccataatttatttataaaatatctttcaaaagtactaagaatatcttaaataacaaccttttaataaattattattgatatggattaatataaaactcattctaaaacattattaatcaaatttcaacataaaataattattttaaactttaaactttctttccttgtcttataaatcaatctcccttttaaaatagcaatagaaaaatagaactaagagataattttttagaatcaagagataaattattagaatcaaaagataattttttagaatcaaatagtaattttccacatttaaatattagagtattttatgtaattattttatcattaaacctctttttcttttcttttcttctatgtttgaaaagaaaatcttaactttgcaaactaattaaaatttattacaaataaacattttatataaacaataaacaaaaatagaaaaatggcaagagttaaggcttttaagggcttacgccctccggttgagattgcagaaagtttggcatctttaccttatgatgtgatgaactcacaagaggcaagagttaaagctaagggtaatgagtattcattattacatattactaaggcagaaattgaccttccagagggtgttgatgaacactctaaggaggtgtatgataaagttgtagaaaacttccaaatgtttaaggataagggctggcttgttcaagacagtgaacctaaactatatatctatgctcaaactatggatggaagaactcaatatggtattgttggctgcactcatattgaagattatttcaataatgttatcaagaaacatgagcttacacgtaaggataaagaagatgatagaatgattcacgttaatattacaaatgctaatgttgaacctgtattcttcacctatcctgctcataaggaaatagaccaaatagtttcaagcgttattgataacgaaaaacctatttacgatttcgttgctaaggatgatggttttggtcatactttttgggtaattaacgataagactaagataaaaagattagaagaaatttttgataaagagatagcttctctttatgttgctgacgggcaccatcgtactgctgctgctgcaagggttggtcaagaaagaaaagcaaataaccctaaccataccccagaagaagagtataattattttatggcagttatattcccagacaaccaattaaaaattattgattataatcgtgttgttcaagatttgaatggtttaaccgaaaaagagtttattacaaaacttaatcactcatttgtaattgaagagatgggtaaagatatttatcgtcctgcaaagttacacgagtttagtatgtatatgaatggattgtggtataagctaactgccaaagaaggtacttataacgacaacgatcctattggagttttggacgttactattctttctaatttggttttagatgaaatattagacataaaagacctacgcacatcaaaaagaattgactttattggaggtattagaggtttgggcgaattaaaaagaagggttgatagcggagaaatgaaggttgcttttgctttatatcctgtttctatgcaacaattaattgacattgcagatagtggaaacattatgccacctaaaacaacttggtttgagcctaagcttcgctcaggattggttattcatgaattaaaatagaaatttaattatctaataatcatttattaatagaaaaagcaagaaattatttagccgatattgtttacaatttcggcttttttgctgttatatatgttgtaaaaggattgtattaataaattatttttcgtttctttgcaaaaaagattattaactaaaaattatatgatatgaaaagaatacttattatttctgtaattattgctttactatctcctgttttgttttggagctgtaaagatgaggatgagcctgcaattgataccaattttatgaattctgttccttcatcagggatttattttaaggctaaaataggaagcaatattacttgggaaggaagtaatattactgaaatgtatgccaagaccgagcctttggaagatacaaacaaatttgtagatatagttgtctgcacagaagaccaaacaagtgcaccaactgtaattggtcaatggtgttacgctcatgtaagcattaatgatgatggtagcttttctaattatgcaataaaatatgcaaagaataaaactacgggatatccattttcttttgaagagtatatgaataatcgtccaggttcaggaaatttacagattattgaaaaaacagcagaaactattacagctaaatttaaagggaagctctatagagtaaatgataattcagaggtggatgtaataatgtatttccaagaattcccattaagtccagcaaagaaataagctttatgtttaatcatataaatacaaattaaataaataatattatggatgagaataaaaatttaattgtccttattataggacttattttagctattagtatattctttgtcggtttatttatctacaaaggacttaaatcatttagcgataaagacagagtggtaagcgttagaggattgtcagaaaagattgttgatgctgattatgttaatttgaagataaaatatattgaaggcgataacgatatgcaaagccttttaaaaaaggttgaagacaataacctcaagatagtaaactttattaaagctaatggcctaactgatgaagagattaatattggagtgccaagcataaaagacaaaaagaataccgaatacaacgataatttctctacaaatacatttagatactattgtgaggtaacaataacaatactttccagtaaggtgaaaaatgttcgagctattgaattatctcaatttgatttatacaagcaaggaataacacttgttcaaaatagatacgagtatgatgccgattcaaaatatactttcaccaagctaaacgatattaaacctaagatgatagaagaatctacagctaatgcaaaaattgcaggtgagcagttttctaaaaactccaatgctaagcttggtggaataaaatcagcttatcaaggacaatttgaaataattccaacagaaaacccattaaagcttaaagtaagagttgtttcctcaattagctatttccttaatgattaaatgtaaacttaatttattagcattataattaacaagtagagggtattgaaaaataccctctatcaatttatacatattatgaaaagaaaaatcttctttaatttattctttgtttttatttcttttatttctatgcaagctcaaacaagattaattgattatgtcaatccaatgattggaacaaaaagcatgggacatactttccctggggcttgtgctccttttggcatagtacaattaagtccagatactgaaacaattcctcataatattgatggaaagtatcaaaaggatacatataaatattgtgcaggatatcagtatgatgataaaacaataattggattttcgcacactcatttcaacggaacaggtcattcggatttaggagatattctaattatgcccgcaataggagacattaaattaaatgttggtaattcagagaatacatcatcaggttttcggtctaactttaatcataataaagaaaaagcagagccaggctactattctgttgttttagatgattataacatattagcagaattaacagcaacccaaagagtaggagttcatcgttatacattcccaaaaacatcaaaagaaggtcatatagttatagatttatcttatggaatttataattacgatggtaaagtattaatggcaaacctaagagttgaagatgaatataccctaacaggatataggataacacgaggttggtcaaggatgaattacacttattttgctattaaattttccaaaccaatacttaattatggttgccaaaacgatgaaaaggtcaagtataatggcttttggagaaagtttgatatgagcgagaacttccctgaaatgtttggaactaagctaatcacttactttaattttgatttctctgataaaaatccattagagattagagtagctttgtctgctgttgattgccttggagcattaaagaacctaaatgcagaagctcaaaacaagtcttttgaccaaataagaaaagaaacccaagaaaaatgggaaaaagaactaagtagtataaggatagatgctgataatgacaagaaatctattttctatacttcactatatcatacaatgattaatccttctgtttatcaagatgtagatggaagatatagaggtatagaccataatatccatactgcaaaagacaatcaagttaattattctattttctctctttgggatacttttagggctgagcatcccctaatgaacataataaaacctgcaagaagcaaagattttattaattccttacttaatcattacctgcaaagcgttcataaagcattacccgtttggtcgcacatgggaaatgagaattggtgtatgataggttatcatgctgtttcggttatttcagatgcacttgctaaggatattgaatttgataataaattagctatggaagccttaattaacagctccaatttgaaatactatgatgggattgaggactatgttagcttgggatacgttcctaatgagaagaattactcttcggcttcaataaccttggagtactcttatgatgattggacaatttattcttttgcaaaggctctaaataatcaagaaagaattcgagagtatgccaaaagagcaaagaactatcaaaatattttcaatacttccattggttttgcattacctaagaacagaaatggagaatttaaaaaggattatgatttattggatacacataaccaaggttttattgaaggaaactcgtggaattactccttttttgtgcctcatgatgttaatgggctaataaatcttatgggaggagaaaagagatttattaatcacttggattctctttttacaatggagttgcctgcaaagtattttgaaaacacagaagatataaatgaggaaggaattatgggaaactatgtacatggcaatgaaccaagtcatcatattgcttatttgtatagatggacaaaagaaccatggaagacagagttaagagtccatgatataatgaataaaatgtataagaataaaattgatggcttgtcaggtaatgatgattgtgggcaaatgtctgcttggtatattttttcttcacttggattttatcctgtttgccctggaagcgaccaatacataataggttccccaaaaaacaatgaagctattattaatttggaaaatgggaaaacatttacaataaaagcattaaatcttacggataataacatttatattaagtcaataaagttaaacggcaaagattataagaagcagtttatttctcataaagatatccttaatggaggaaagataatatttgaaatgacaaataaaccaaacaaaaaatctgcactttacactaagccattttctttttcagatgagatgaaatagctatgcaagagagcaatcctatcaattacataaactcaaagtcaattctttcaaagctttcctttgttgattcttggtttgggataacttataatatgaatctttacagaggatgtcagcatggttgtatttattgcgatacaagaagtgaatgctatggcataaacgatatttcaaaaattacaattaaggaaaatgcaatagaattacttacaaaagaactatcctcaaaaagaaaacaaaaaggaacaataggaacaggctccatgaatgacccttatatgccaattgaaaagaaagtttgtttgactaaaagagcattggaagtaattaataggagtaaatatcctattcatataataactaaaagtaatttggttgaaagagatattgatttacttaaagagatttctaaaacatattgtgcagtaagtttcacaataacaacttatgacgattcgcttgcaaagaaaatagagccttatgcaagttctacttctctaaggtttaaagccattgaaaatttagcaaagcaaggtatttacacagggataactctaatgccaatcctaccatttattaacgatagccaagaaaacataaaatccattctacataaagccaaggattctggtgcatcgtatataatacctatctttggagtaaccctaagaaaaggttcaagagattatttctataaagccttagaccaaaacttcaataacattaaagaaaaatatgaaatgacttttgacaatcagtataattgcccttctttaaactataaaaagcttcaagatgtttttaatagcgaaacatataggttaggaattacctcaaaaatggagttttataggccagaacaaagctcgcaactatcaatattctaaataaaaaatcccaaagtagaattgctctgggatttttctttgttttatacgatatttcttttattcaattggaatatatatttctgtctttaatttatgtgcaggagtgttgttaggattattaagatatttctccatccataaagcattgcggaatttataacccttatccttcaaataatcattgtaaataaaatcataaaccttaccaagattatcataagaacccttgtataaaaacatcaagaacttaccaccttcaatttctttaatctttatttcatcggtatcttcaatcttgcgagttatggtaatacaagcatcaaacttgcattcattagcaggagttgtggttgggtcagaagaatatattcccaagaactccattctcatactaaatagtttattcttcttaatgaatggccaaagcttattccataaagaagaataatcaatttttgaataattgccaaaagcagtgattgttgcagcctctcttttggttctttcaattagcttaggagctttaatattaagctcagtgcttatttttttactattaaaacacataatgataaaatttttaaattaacgaaaataatattgcgataacagaaactacaaaaaagtaaccaacatcaattccagctaaggttatataacgcttccaattacttatttggaatttgagagttgatttcatccaagcagatatagcaataacaactacaacagataaccaaacagagattgaagttaggataaaatacataaaaacgacaaaagctgttgcaattatttgaatcagaaatatcaaagcattagagcttttcttacaagtgcatttttcaccattaacaacatcagctccgcaagcacattcatattttacggctttcatccatacttttgagaataaaaaaccataccaaattgcacccacaaaaaaggatacaacgacagcaataccataccataaccacgatattgcttcaaaaggacattgatttgtacaacaagtttccatattaaattattttaaaattatatttgcaaaaataactgaaaatttaatatccaatattatttttctaaataatattttgatggatttttgtttagctaaattatctcttgattctaataatttatcttttgattctaataaattatctcttgattctatttttctgtaattaagtttcatttttaacaaaagggacttaatcaaaaataatcagtgattaaacaaaataaggcttcaattgaattcaattgaagccttattcattttgcggaaagtgagggattcgaacccccggaggtgttaccctcaacggttttcaagaccgccgcaatcgaccactctgccaactttccgagtgcaaaggtactactttttgaattattgcaaagttttttgttatttttttgtgaagtttttccttataaagaaaaatattgaaataagtttcaaataattatcctatatttgcaaactgaaatattaaatgaaatatattataatttaaagttaaaacaaaagacaaaatggaaaagaaagaattattgaaagatgttgttaaacacattgacataaaaaaaatcaacactactgatttaattgatgctatgcgtgatatgtcattttcttccagagatacagcaacggctactgacatttacgatagaatgattaacgataaggattgctccattatcctcactcttgcaggtagcacctctgctgctggttgtatgcaggtttatgttgatatggttagaagtaatatgattgattgtattgttgcaacaggagcatctatcatagatatggacttcttcgaagccttaggtttcaagcactataagggaactccttttattgatgataaattccttcgctctaactacatagataggatttatgatacatatattgatgaggaagaacttcaaaactgcgacggaacaataaagctaattgcagacaaattagagaaacgtccttattcttcaagagaatttatttgggaaattgggaaatggctttctgagggtaatgcaaagaaaaaagactctctaattcaagcttgttatgagcataatgtacctatcttctgccctgctttctccgattcttctgctggttttggtttagttttgcaccaagttgaaaaccctaattctcatctaagcatagattctgtgaaggatttcttagagctaaccaatattaagataaaggctggcacaacaggtttatttatggttggaggcggagtacctaagaacttcacacaagacactgttgtttgtgctgaaattcttggtcatcaagttgatatgcataaatatgccatccaaataactgttgctgacccaagagatggtgcttgttcatcttcaactcttaaagaagcatcttcatgggggaaagttgatactacttatgagcaaatggtttatgccgaagccacaaccgttgtacctttaattgcttcttatatatatcataagaatgattggaaaaacagacatgcaagaaactttgctaaaatgttttaaagaataaatcttattttgcttttagtaataacgcttactcattctgagtaggcgttatatgttttatacttattgtcttgacaaaattatagaaataactttaaatacactcaaaagtttttggagttagaacaggggtaatttaatagtcattagattcaatcttaaaaagaaattctatatttaaagtgtgatggggctcaactatcacgcatctattaagactaattcaacgaaggaataattttcttagtctattcaatcaatatgagtattaactaaaatctgggtagaataaaagcaaaaaaagcgaaagtaaaatattagactttacttccgctttgaatgttttcacaacggaaattcgaattatgttaaaaatattttaatattgagattaatatgtaaaaatattctctatctttgtcaaaaattaaaaaagcctcacggagtacgcaaggcttagatttctcttcggcttatagccttattgtgaaaagtcttttaagtttgtgtgtgcaaaaatataaaatatttattatacaaaccaaatattattataaataatggaaactttaggtatagatttaggcacaaattcagtggcaatcgtaaaaaggaatagtgattcaagtactaaaaatcttattgaacagattgaatattttggcgttacgatatttaataaaggtgttggacataataagaatggagaattttcttacgctgcagaaaaaactaaatataaatctacaagaaaattatatcgagttaggaaatataggatttggagtactttgcaagttttgattgaaaatgattattgccctttgtctttggaagacttggataaatggagaaaatatgatacaaaaaatggctttagtagattatatcctattaatgcatttaaatttgagcaatgggtaagattagattttaattgtgatggaaagccagattattctagtccatatcacttaagagcagagattgcaactaaacagttagatttgaccaaggaagtagatagacacaaactaggacgagctttgtatcacatagcacaaagaaggggttttaaaagttcaaagggagattcaattaaggatattgaattaaatgattcttttgatattaatgacttaaaaagatctgaagaattaaaaataaaagaacaacataaagcaattgaagatttgtctattaacatgaaagaatatccgacaattggctgtttgttgtatgaaataggaaaaaagggaaatcggattagaaaagaatatcaagttgtacgctctcaattgttagatgaagtaaaatttatttttgattttcaaaaagggttgtcacaagagagtaagttctttttagatattaaaaagtcaatattttatcaaaatccccctcgttcccaaaaaggttctgttggtaaatgcacattagaaccccaaaagtcaagatgcccgattagttatcctgattttgagtattttagagcattaagcttaattaataatattaaattcaagaaggaagtagatgataattggcaatacttatcaaaagaagataagcaagaattatacgaacgaatttttagcagagtaagattaagatttaagttcgaagaaataagagagtggattgagaaaaaacataatatcattcttgattataaaagtaaaacaattaattataaagataatacaaatatatcaggttgtcctataacttcaaggattaagatttttcttggtgatgattggaaaaataaaattattaaaagtgataaaaagagaataaataaaaaaactggagaggagaagtttatacactataattgggaagatatttggcatgtgtgttttagttttgaagatgtagaatgtttaatagaatttgcaaaatccagtttaaagttagaagataataaaaagttaaaagaacttgtaaatattttttcctctatttctgtaggatattctatgctaagtttaaaagcaataagaaatattaacaaatttctatttgaaggttttaattattcaacttctgtattattagctaaaatgcctgaaatatttgattctaattgggcttcaaataaagatcaaattattaaaacattagatgatataataaaatctaacgtatataaaaaaagaattcttaatattgttaatgctctaattgcagaatacaaatcattagaattttctgagcaacaagctgctcataatactaattaccaactgaatgaagaagataaaacaagtatagtggagttttgcataaaaagttatggtcaaaaatcatggttaaagattgaagatgatgttaaggattctttaattaatgaagtatcacaaaaataccaagatttttttgcgagcagtaagagagacttttatagattaccaaaattggttgatgagataaaaacttttttatttgaaaactataaatttttagatgagaaaaaaatcaaatctctatatcacccttcaatgattgaagtttataaaccttctaaaatggaattgtgtgattataaaggagtaaatttatgtttgaagttgttaaattcaccaaagacaggctcttttaaaaatcctatggctatgcgaatgttacatattctaaggaagaatattaatcatctactattagaggggattattaatgaagaaacgagaattgttgttgagacagcacgagatttgaatgacgctaaccaaagatgggcaataaacaagtatcaagaagaaaaagaaagacagaatagtgaaatacataaggctctgtgtgaattattatcaataaatgaagttaaagattcagactttgagaaagcaaaaagtctaattgatcaagcagagataattgaatctataaatagtgacactattttaaataaagaaaatattaaaaaagagaaaaagaaaaaaataatagaaaaagctgataccttcaagattaatacaacaaaatataaattgtggttagagcaaggaatgacctgcttgtacaccggtaaaatcattaatttacgagatttgtttggagaaaacccaaaatttgacattgaacatactatcccaagaagtgtgtcattggataattctctagaaaataaaacaatatgttgctcatattataatagaagtattaaaaaaaataagattccgacagagttaccaaattactatactgattcaggagattatactgcaatattaccaagactaaaagcatggaaagataaagttgatagattggaaaacaatgttgagtattggaaattacaatctaagcttgcacaaacaaaagaagataaagattttagaattagacaaaggcatttatggcaaatggaattgaatcattggaaaggtaaactagatagatttgaattaaaagaagttacagaaggatttaagaacagtcagcttgtagatacaagaattattactaaatatgcaacactttatttgaaatcagtatttgaaaatgtagatgttcaaaaaggaatagtaacatcagagtttagaaaaatcctaaaattacaagaattagataagaaaaagagtagagataaacattctcatcatgctattgatgctgcagttctaacattaatccctgcctctgcaaaaagagataaaatattatcactttggtatgaaatgctagaaaatagaagtaagaatcaatatgatagtactatcgaaaaaaaattaaataaggaaattcgtagcttaaatataggtaacattaataattttgttgaagaaatagatgataatattttaataaatcatatttctaaagatagagcattaacaagtacaaagaaaaagattagaacaagagggaaagtagtttatgcttctgagaacaatccatattattctactggcgatacaataagaggtcaattgcatggagaaacatattacggagcaataaagcttgcaaaaaaggatgagaataataatatcctttttgatgaaaataataagatgataattgatgataaagttcattttgttataagaaaagagatatcttcatttaaaaaatgggaggatattgaaaaggttattgtagatataaatctgtatcataatattaaaatccaaaattcagataaaagtccagaaaaagacacaataactttaacagacaagaaaggagtaaaaagaatagttagacgtatacgatgctatgaaaagagcataacaaatccaattaagttgaaaaatcacacatatttatcaagcaaagatcataaacagagttattatgtaaatggaggtgatttatattctattgctaaatattctaatgattctgaggttgaatataatgtttttggcctttttgatatttcaaagaatagagaactaaactcagaagatattccacaaacgattatctctaagaagaagaaacaaaaacttgaactagattatactttagtttctggaatgaaagtgattgtattaaataaagatgaaacattctctgacataaaagatattctttccaaaagattatatgtttttgaaagaccagaaagagatctgagaattaatttaaaacatcatttatgtgctgatcctgatattaaatctgagtccataaaggattattctaaactaccaagcaagataaggtgttctataaacacaatcagaatacttattgagggtgttgattttgacatgtcattatttggaaaaatagaacagaaatagaattatgataaaacgtacactacactttagttctggtgcatatttgagtgttaaggataatcaattggttattcaattagcagaagataataccaaaacaaaaaaaactatccctattgaagatattggtgtagtgattttagataatcctcagattaccattactcagagagtattaacattattattagaaaataatacttcaattattacctgcgatcaaaaacatcatcccattggtcttcaactatgtttggacagtaatactattcaaagcgagaggtttcaatcacaaattaatatttcggaaagtcttaggaaaaacctctggcaacaaaccataatgagcaagatctataatcaagctatggttttgaaggaaatgaatatcccaataaataatatgataacttggtctaattctgttttgagtggggatagcaaaaatcatgaagcaagagcagcagcttattattggaagaacttattagaaagtcatgataattttaaaagagaacgttttggggaatatccaaataacttcttcaactatgcttacgcaatacttagagccataactgctcgttctttagtttcatctggtcttttgccaactcttggaattcaccataagaatagatataactcttattgcttggctgatgatataatggagccttatagaccatttgctgataaattaattgtagacattattagaaaataccctcaagaagaaactctaacaactcaaataaaacaagaaattctaaagctacctattattgacgttgagataaataaaaaaacaagtccattgcaaattgcaatgcaagaaacaacttcatcacttgctcagtgttataattcaacaagaagaaagattaaatatccagtttttggaacaaaggtttaacgcttataagataatgtgggttttagtactatttgatttgccgactgaaacaaaagcagataggaagaattatgcaaattttaggaaggaactattgaaagatggttttactatgtttcagttttctatatatttgcgacattgtccatctaaggagaatgccgatgtacatattgcaagagttaagaggttattgccaaaatatggaaatgtagggatactttgtattacagataagcaatttggaaatatggaaatattctttgggaaagaaccaaaagaaaaccctaatgtggttcagcaattagagatgttttaaaacaaaatgtcatttcattaattataataaagagttagaaaattgaattaaagagtcattttgctaataatagtttcgaggattttacatacaaatctttattaattacaaaattagatgaattagtaaaagcaagtacttatgtttattctaaaccttacgataagaataaagatcaaccaaaccccatggtgataatgtatcactatttcaaaataatattattagggaaggaaagaattttaaatattagagaacttaaaactggagaatattattttcacgcattatctaaaagagaaaagagcaattaactcatatctgctccttcacaataggagagctgttgttaaccactcttttcaaatgcaaatatacaacaatttagaagaaaagtcaagtaaaaaataaaaaaatgaaccctgaccaatttaaaaagcatttaaatgctgttcaaatacagattaaaacctttgctaaaaaagatgctccacgcatagctggcaaggtggcaatagaccactttaaggagaattttcaaaacgaaggttttgagaaaaagaaatggaaagaagttaaacgaagaaaaagcaaatacactaaaggagctaagaaaataagaaaaatccttacaggcgacacaggcgaccttggtcgctcaatagaaaatgcaaaatattctaacaatgttgtgaattgcttttaaatttgtatttttgcggtatctaacaacctcaacatggctgtaagcatcaacacttgagttgtgaattgcttttaaatttgtatttttgcggtatctaacaactctcctaaatcttcatacccaagattaacagttgtgaattgcttttaaatttgtatttttgcggtatctaacaacatagaagattgttgtaattgtaaatcttttgttgtgaattgcttttaaatttgtatttttgcggtatctaacaactcaacaaaacaaatccctttcatcacttagttgtgaattgcttttaaatttgtatttttgcggtatctaacaacgtagatttattaaaaccaacaggggtttcagttgtgaattgcttttaaatttgtatttttgcggtatctaacaactcaaggttttcaggagctttccctccgtctgttgtgaattgcttttaaatttgtatttttgcggtatctaacaacatctctattaatatcctcatcgtcttgtgtgttgtgaattgcttttaaatttgtatttttgcggtatctaacaacttatgaatgaatttcctcccatcaacacttgttgtgaattgcttttaaatttgtatttttgcggtatctaacaacgattctttctaagggtgctgcattgggagtgttgtgaattgcttttaaatttgtatttttgcggtatctaacaacaatcccaaacaactaatgaggttgtggaacgttgtgaattgcttttaaatttgtatttttgcggtatctaacaacgtatccgtcagaaaaaacaaaagcgttaagttgtgaattgcttttaaatttgtatttttgcggtatctaacaaccccaactactcaagcaactacacacaattagttgtgaattgcttttaaatttgtatttttgcggtatctaacaacggtgaacaagtaaatggtccagaagttaaagttgtgaattgcttttaaatttgtatttttgcggtatctaacaacacttttcaagaaaaccaatctcgttatcccgttgtgaattgcttttaaatttgtatttttgcggtatctaacaacaatttaggttttgggcttaggcagggagtcgttgtgaattgcttttaaatttgtatttttgcggtatctaacaacaattctgccaacatagttgcggggcaactcgttgtgaattgcttttaaatttgtatttttgcggtatctaacaacaatgctttctgcaagactattactaacttcgttgtgaattgcttttaaatttgtatttttgcggtatctaacaacataattagagtggaacaactcaagggcaagttgtgaattgcttttaaatttgtatttttgcggtatctaacaacaagcaaatcgataataaaactacttttgcagttgtgaattgcttttaaatttgtatttttgcggtatctaacaacttgaccgaatgaatagccttgacctgcatagttgtgaattgcttttaaatttgtatttttgcggtatctaacaactcatttttcttttgtgccgttttaagtgtgttgtgaattgcttttaaatttgtatttttgcggtatctaacaacgaagcaggttatctgtttgactttggaacagttgtgaattgcttttaaatttgtatttttgcggtatctaacaacgcttcaacataacttgcataagccattccagttgtgaattgcttttaaatttgtatttttgcggtatctaacaacaatgtttccaaaggttactgaagacgtgctgttgtgaattgcttttaaatttgtatttttgcggtatctaacaactacttgtatttcgtcttgcaagttagaatagttgtgaattgcttttaaatttgtatttttgcggtatctaacaacagaacgtgtttgatttgtagttgtgtcgtagttgtgaattgcttttaaatttgtatttttgcggtatctaacaacaaaagtctacctctgtacctatttctgttagttgtgaattgcttttaaatttgtatttttgcggtatctaacaacttttgttgtactccagtataactccaatatgttgtgaattgcttttaaatttgtatttttgcggtatctaacaactgagggtaccgcaaaattttattaaacaaagtgttaagatagtgattagaaattgttaaattattcatttttattttgcgagaatggtaaatgattaattaaacaattctattattttatcttttcattataattatccatcttttctattattaatattctgcttttagattaactatatcaatatagcttatcaaaaaattacctttatgttttctaattaaatattttttgtaactttgcagtctgacaatagtgtcagactattttgtaatagattgtatgaattactataaggttggtttagatgttggctctacaacggctaaaattgttgttattaatgatattggaaatattgttttctttaaatacataaggcattgtgcagatattttaagcactgtcgtttctttgtttaatgagatgaaagatgctttgggagagtgcgagttttcattatcagtaacaggttctgttggaatgggacttgcagaaagatatggctttaattttgttcaagaagttagtgcttcggttgaatatgtaaaagcttatcatccagaaatttcaaccataattgacattggtggagaagactctaagatagtttatttgaaagataatgggaatagtgatttgagaatgaatggtaattgtgcaggaggaactggggcttttattgaccagatggcaactttattaggagtttcggttgatgaattaaatgctttggcagaaaaatcaaataggatacacccaattgcttctcgttgtggagttttttccaaaacagatatccagaatttaattagcaagaatgtggatagcaaagagattgcaatgtctgttttccatgctgttgcagttcaaaccatagttactctttctcgtggttttgaagtaaagcctaaaatattattctgcggaggtcctctcacctttattccttctttgagaaaggcttttgtgaattatctaaaaataaatccaaaagacactcttactcctgaaaaagcccatcttattcctgctatgggaactgctatttataagaacgggatatctaaatataggattgatgaagttttaggtattttagcagatacttatcaaacagacttaaaaaccacctcttgtttagaggctcttttcaattccgaacaagactatttagaatggaaagcagaaaaagaaaatcatagtattgaaaaagctgatataaaagatgctgattctgatatatgggttggaattgactccggctctaccacaacaaaggttgtagcaattgacaaagatgagagagttgttttctctttttattctcctaatgaaggtaatcctattcaaactgcaaaaagaggtttagagcaattgattgcagaaaacggaaataaaactctaaagataaaaggtagttgttctactggatatggcgaagatttaattaaggctgccttcaacttagattatggaattattgaaactattggacattacgcctctgccaagaaaatatctcctaatgtatcatttgttttagatattggggggcaagatatgaaggctatgtttatagagaatggggctttaaataggatggaaattaatgaagcttgttcctctgggtgtggttcttttttggaaacgtttgctaaatcacttggatatagtatttcagattttgcaattgcagcttgcaagagtaaatttccttgcgacttaggtacacgttgtactgtgtttatgaactctaaaattaaacaagtcttacgcgaaggagcattaatagaggatattgctgctggattatcctattctgttgtaaagaattgtctttacaaggttttaaagattaagaataataaagaattaggagataatattgttttgcagggaggaacaatgaaaaacgattctgttgttagagcctttgaattgcttaccaactctaatgtttatcgcagtaatatatccgaacttatgggagcttatggttgtgctatatatgccaaaagtaattctcaatcagaaggtgttttattggaagatttaatttcaacagcagattattcaacaaaagaacttcaatgcaaaggctgtgaaaacaattgtattattaataaatatacttttacaaataagaatacattctattcgggcaacaaatgtgagaaaatatttaccaattcaggagaaaagaaaaagaaaggtaaaaatgtatataccaacaaatacaacttactctttgaaagagaagccttagaaaacataaaacaagatattgtaataggaattcctcgtgccttaaatatgtatgaaaactatcctttctggcatactttatttgcaagttgtggcattaaaaccatactttcggagccttctacctttgcaaattatgaattaggagttcattctgttatgagtgataatatttgtttccctgcaaaacttacacatagtcatatatataacttaatagaccaaaagggagataggatattcttaccttatgttatatttgagaaaaatgagactaagaaatctgtaaatacatataactgccctattgtttcgggttattctgacgtaattaagagtgctataaataataatatccctattgactctcctacctttaattttaaagatgatgatttgctaaaaaattgttgcagaaaatacttaaagacattatcaattgatgtaaaaacaattgataaggcaattattgatgcaacaaaggcacaagaagcatataataaggaaatagaaaacctaaataataagatttataattcaaataaaggcaaaaagaaactaacaattcttttagctggaagaccttatcatactgaccctttaatacaacataaaatatcagatatgatttcggatatgggtgttgatgttatttcggaggatatcgtaagaagtaataatgaaatagactttcaagaagctcattatgtttctcaatgggcttacattaatagaattctaaaagcaactcaatgggtagcaaaacaagataactatgtgcatttcgttcaaatgacttcctttggctgtggacctgatgccttccttttagatgaggtaagctccatattgaaacgccatggcaaaagcttaactatcttaaagattgatgacgttaataatattggctcattaaaactcagagtaaggtcattaattgaaagtataaactatcaaaatgaccaaaagcttaaacaagattcttttgtttcaacccttactttcacaaaggatgaacgccatagaaagattatagctccatatttcactgattttgtttcgccattaatgaactctttctttaaattagctggttataattttgaagttctaccaaaaagcaatattctttcagcagaagaaggtttaaagtatgccaataatgaagtttgctatcctgcaaccttgataattggagatattattaaagcattgaaatctggcaaatataatttaaaagaaaccgctgttgcaataactcagacaggtggtcaatgcagagcctccaactatttggctatgataaaaagtgctatggttgaagcaggttttaaagaagtgcctgttatatctgttgcttttggaaaaagtatgagtaatgaacaatcgggttttagtatcaattggatgaaatatgctcatattgcaattgattcaatcttgtttggagattgtatagcaaagttctattatgcttcaattgtaagagaaaaagaaaaaggcttagcaaaaaaactcaaaaaatattatttgaatgaagcaaataaatacattgcaagaaatgatacaaaaggaataaaaaacctacttttgaaagcggccaaagaatttaatacaataataaaggatgacgttaaacttccaaagattggtatagttggagaaatatttctaaaattcaattcattctctcataaagatattctatcgtggattatgaagcaaaagatagaagtaatacctcctatgctaactgatttctttatgcagagcttcgttaatgataaaattaatatagagaaacatcttaaagtaaagtctatgcctaattttgtaatagacactttatataaaatagttgagaaagaaattacacgcttcaacaaagcagcctcatcgttcaaatactatactccatttaataatatatttgaagtagcagagcatggtaaggaagttatctctctttctgcacaatttggcgaaggctggttgcttccaggagaagttgttggctttgcaaaacaaggaataaataatgtaataagccttcaaccttttggctgcatagcaaatcatataattgcaaaaggggttgaaaagaagattaaaacactttaccctcaattgaatttactatccttagacttcgatagcggagttagcgatgtgaatataataaatcgtctccatctaatgatagataatataaaatagaaaatgtattatggaaaagacatcacataacgagaatacagaagctcatataatagaaacagccaaaagactcttcttaaaaaacggctataagaatacaaatatgtgtgatatagccttagagacagggattaatcggacaaaactacactactatttcaacacaaaagaaaagatgtttaaagcagtttttagtgaaataatagaatctttcttacccgaaatacaagacatactacataaaaacgaagattttttcttaaagatagacaaaatcattgaacaatacataaaactcctcttaaaaaacccatatctacccctatttataataggagaaataaatagggatataaaacaccttcttgatgcggcatatagcgttgggcttcaagagtatttagatgaaataaaacaaaccttaaccgaagaaatgaaaaaaggaaatattaaaacactccctttacatattatatttatgtcatttattagccaattgatattccctttccttgcaaaaaatatagtaaacgagatattggtttgtgaagatgtacaatcacaagacataatacaagaatggaaatcttacctttcaatacatgtaagaaccattctcacaccctaattctttttaataagatttaatttagaagagccgtaagattggttattatgagtttaacactcattgccaaaaggataaccccaaagaactttcttaaaatataaattcctgccttacctaatatcctctcaacaagatgaactttctttattacaaaatagactaccagcatatttatagctattgctataattaggtttgtaacagatatttctgctcttaaagaaagtgttgttgtaagagttcctgcaccagcaataagaggaaaaaccataggaacaatggttgaatgcccacttggaccatcatttttgaaaatttctatattaaaagtcatctcaacagccaaagcaatcagaataacagcacctgcaatggcaaaagaggcaatatcaaccccaaaaagttttagaagtccctcccctaaaaatagaaataagaccataagcccaaaagaaatcagtgctgccttacctgcttgcacctttttccctgatgagttcaaatcaataataataggaacagctccagtaatatcaattaccgcaaacaaaaccataaaagccgtaaaaatctgcctaatatctaatgtgaaatcaattaacataaacctataataaatagaaattaataaagtgcaaaattagtaataatccatcaaatacgaaattaattctattaactcttgattctaatttattaactcttgattctaattttttatcttttgattctaatttcctatctttaaatgataagaagctattactttattatccttaaaaaagatttagttatttgtcaaaaacacttatctttgcac

SEQ ID NO: 4438 - DNA, 8343 bp, synthetic construct
  misc_feature 1..8343: note = Synthetic
  source 1..8343: mol_type = other DNA
agtaactgtccgtgtgataccagattgaaaccagcgcgggcttgttctgcgcgataatctgctcggcgttcaggtcgtcgtccttgttgacctgctgctcggcgaccttgggcgcgggcggctgaacttccttgctgttcttgtcctgcgccgcggtaaacgaaacggatgctataatcagaaacaaacaaaaatactttttcaaactttttccctctcttgctttacgttttatattctatgctttatactttatacttactttttttgctttcgttcatttatctctaagaagttagtagttagtagttagaagttagaagttagaatcttaaaaattaattgctaactgttcactgctaactgttcattgtttctactctcgctcttaattgctaactgctaattgctaactgttcattgtttctactcttgttcttctctgtgcgctctgtgttctctgtggtaattcgtttttgctcttaattgctaactgttcaatgctaactgttaattgtttctactctcgctcttaattgttaattgctaatcgttaattgctaatcgttaattgctaattgactaagtgtcattagcgtctttgcggtgaatctctattgctctaattcgtgaaaattcgtgtcaattagcggctgacgctcttcatcttcactcagaatcaagaagcaagaatcaagcctttaaaaccgcgccgcttttctctttccgtctttcacgcgggaaccctagaaaattctcttgctcttcactcagaatcaagaagcaagaatcaagaatcaagttctcttatatctaaaaaatcttttgctcttatacctagaaaatctcttgctcttctctgtgctctctgtggttaaatctttgctcttatacctaaaaaaatctttttctcttcttcgtgtccttagtgccttagtggtgaaacgctcttaattactaattactaattactaattgttaattgctctcatctctgtttccactccggcttcctcttctccacgaacgccttcatcccttccttcttatcctccgtcgaaaaaagaaaataaaaattcttcctctcgaactctatccccgactcaatcgtcgtatcgaacgccttcagaacgctctccttcgccaactgcacggccagagtaggcttcccgcaaatcgccttcgccagcgacatcgcgtcatcgagatacttatcgtcgggagaaaccttcgtcagcagacccgcctcgaacatctcataagccgacaccatcctgcccgtaagaataatctccatcgcgcgcgccttgcccacggctctcgtaagcctctgcgtaccgcccgcgccgggaatcacgcccagattcacttcaggctggccgaacttcgccgactccgacgcggcaatcatatcgcacagcatcgccaattcgcatccgccgccaagcgcatacccgctcaccgcggcgataaccggcttcttcaccttccgaatcacatcccacgaagcgaacatttcccgctcgtaaatctccgcggaattcgcgtcagccatctccttaatatccgcgcccgccgcgaacgccttatcgctgcccgtaatcacagagcatcccgccttatcatccttatcagccgcggtaagaaccgaagcaatttcgcccatcaactcgatattaagcgcgttcatcgcgtccgggcggttaatccgaatcagaacagtattcaggcaccccgcgttctcggtctcggaaacgagaatgttcttgtaactgccgttaatataagttctctctcccataattttaataaaatattaagttgaaattatcaaatatgtataagaataacaatgaattgcccctaaatgttcaatatttcacccattcctcactccaacctccaatcttcttgctcttattgctaactgttcattgctaatcgttacttgaaaacccccgcgtagcaggcggcacctaatagcattcttgaagtcacaaactgtgacctcaagtcgtcgctcaccgtaaccctgaacgcatccaccgtggcggaaacgctcttaaaagtttccccgttaacgcactgttcaatcacaacattttaacgcaaacaaataattactattttcacatgcacatactaattattaccgattgttaataaaatcaaacttgcataaatctttctttattcataaattcccaaatatcgccataaataacaacacgacacaaaaatacacctgacaaattatcacttgttgataataattgattttgactatttcggaaattataccaagttgtatatgaattatttcaaaatgaatacttcttaaaacgcaacaaccccgttattactaacgaggctgctgaaaagttttcacaacggaataatccttattgtggtttgctttaaaatgtgagtaaaaatataaataaattattcaaataatcaaatatatattttcatgaaaaagattcttgggctcgatattggaaccaactctattggatgggcattaattgattctgaaaatggatttcttaataaaattgttgatattgggtgtagaattatacctgaacaggatgaacatagagactttgaaaaaggaaatgacattagtaaaaatgcgcagcgaagacaaaaacggggttcgcgtaggttaaaccaaagatataaacaaagaagaaataacattattaaattatgtaaaatattaaatatcattccatccggtttagaacctctttttctgaaaacagaatattctggcaatgctgttattcttcccgtaaatgcttttaacaagggtgattttcaacacaaaccacaggaattgtatgaattaagaaatcgtgccttgaccgaaaagatatctttgcaggatttgttcagaattatctaccactttaatcaaagaaggggttttaagagtaacagaaaaaccaataaggaggaaaatagtcgcgatgatattgttgatgataaaaataacttgacagaaatatcatttgaaaaagtgcgcatcatttcggtaattccaaccggagaaaaaaagggaaaacgcggaaaagaagaattactgatatctcttaaggatggtagaatagccgtctctgataaatttcagtttaagaactttgttgataaggaaataattcttgaaataaaaaaagaatttattaaatcaaaaaatgattttaagtttactttttcatttccttcaaattggcaaaaaagccgtaaagaactaaatgatttaataataaaaaatggcggttatccgggaaaatatttctttggagaatttttaaaagcacaacaagaaaataaactttttaattttaaagtgcgcgaaaacattgtaaacagagaattatatgaaaatgaatttcaagccgtttggaataaacagaaagaattatggcggtatgaaaatgttgatattgattttttgcctggttttagcgggtgcgttgaaagaattataccttgcaataacaaagaacaaaaacaattgttcatgtcaaaaggccttggagcgtttctaaaaaactatattatatactttcagagagatttaaaatctcaggttaaatctatcggtgattgccagtttgaagaaaaatatttggaaataaccgatttgaaaaccggagaattaaaattaatacgaaatggtccaaagtgttctcctaaaagtcatcctgtttttcaagagttcagaatatggcagcagatccacaacttgaaatgttttaacgaaaaaatagaagaaatacccattagcgacgacgttaaaattaaactgttcgaatatttgaacgaaagagagtctgcaaaaaaagaggatgttgataaattattaaaaaaaatattagtaggatttgattattcaaacattagtgaacattcaacgtgggttgggaataagacacgacatttttttaagaaactcttcaaaaaatttgattacgatggtgaaaatatatttaatgacagtgataaatattttcgcttatggcatttgatttactctgtttctgatgagaagggaattaaaacaggacttaaaagaattgacgttaatatgcccgaagaattgattaccgctctgacaaaatcgattttcagcgaagaacaatatgcatctttaagccttaaagcattaaataatattctcccattgatgcgatgcgggaaattgttcagacaagaaaatgtttctaagtttgccgaatcaagaattaaatcctttctaaatgacgatagcgattctgattttgacgctaaaacacttgaaacacttaagaagaagaaattatacaccgaattttacggtttgtcttattacgaatcagcctcattgatttatggcaaacattcagcgaagcaacttgatttatattcttctccggacgaaatgatttctattaagcaaaattctctaagaaatcctgtggttgaacagattgtaaatgaaacacttatgctcgttaaggatatttggaaaacttaccccgatttaaaagacggggaaatcaaaattgaactagccagagaattaaaatcgaataaagaagaaagaaaagaaatgtcaagactgcaatacgagaattatcaaacaaacgaaaagataattgaagaaataaaaaggcatttcggtgattcacataatccgtctttgtcagatatcgaaaaggtgaagttatggaatgaggctcgaaaacaatctgtatatactggaaaaacactcgatattagcgaagtcctgtccgcatccactgaaattgatcacattattcctcgttcacgattttataatgatggccttgtgaacaaagttgtttgtgaaagctccataaatgcggataagggaaatatgactgcttatgagtatatgaatacgggtacaaaattgaaaaaactcaattataatgagtttctttcgttgataaaatatcttccgcgaggtaaaaaaaatcttctcactcttaaagaaattcccgatgacttcatacaaagacaattaaaggaaacccaatatattactaaaaaagttaaagaagaactgggtaaaattgtgggaaacttgaacgtcggtacaactacaggtcgaataaccgattatttaaaagatcaatggggattatctgaacttatgcgcaacttaatcgctccccgtttcgaaaagcttcaagaacaattcgggataaatttaataaagaaagtagatgtacttaaccgtgagaataagccatccggaaagaaacgaactattataaagggtttttcaaaaagatatgaccacagacatcatgcgctagacgcacttatcgtttcctgtacaaggcaaggcattattcagcagttaaatcttctaaatcaaataaacaacaacagaatcaagcctaaggaagatatgtttaatggcagtcctcgcaaatttatcccgcccacagggaaagaggataaaggtgcgtcaatattttattcgcttgccgaagatgcggcaaattctattattgtttcgtataaaaataaaaaacggttattggcaaaaggtaataattggtatcagatttttgattcggcttctaacaaaattataaaagtaaaacaaaccgaaagttcaacaattaaaaaaaactggtctattaaaggtcaactacacaaagaaacaaattatggattgataaaatacaacggggcgttgcgtcattcgtctcgctgctcgctttcttcgctaacttcaaacaaaatttccaatattgccgattatactttaaagaaccaagttttaactcatattaataaaagtgaatattccggtgatctaaaaaaagcatttagtccggaaggcctaatggaatttaatagtaaaagaataatcccggtctattcagttagggttattgaagatggtttaatcgacaaagtaaaaggaaaaacgcccttgtatgatttcgaccgtaaactattcgtcgaaaaaggcgggaattattgcgtggctttctatgaacaccccgaaactaaattaagaaaatttgatgtggtctctttttttgatgccgtgcatcttaaagtaaatggagagaatccctatcaaaccgaaatgggtcatgggtatataaatgaaggctatagattaatatttactctttctcataatgatttggtttatataccacaaaatgctgtgttagacagtattgattggaaaagcaaaaaattgtttccacaaatataccgtattgttaaattttcagataatcggttatattttcaacctcattattttgctaaagaaatcacgattcatcatggtgtggctaaaactgcttccgattataaaggcgaattttctaaaggaactaatggaactgaaaaagtttttaattctgatgtttcaatcaaggatatttgtatcaaattagatattgataggctcggaaatattaaaccattctatcagctatgataaaaaaaactctgtatttcggtaatccgtgctatctgtacactaaggacgaacaaatatttataaagaaaaatgatgaatcaggtactgaggaggtcgtatcaattccgattgaagatacaggcgttattattgttgaccattacggcgtaaccttgtcacaggcgcttctcgctaaactaaacgaaaataacatcgctgtaattatctgtaacgaaaaacacatgcctgtttctatgcttcttaacctcgatggaaactgcgtccaatccgaacgattcaaggctcagattaatgcgaaaagacctctcttaaaaaacctatggcagcaaaccgtttcttataagatctataatcaggctatgctccttaataaaaacaagatcgaattccgtaatatgattgcttggtctaatgatgtgaaatctggagacagcacgaatatcgaagcgcgcgcttccgcttattactggaagaacttgttccctaagcatcttgtcttctttcgtgacagatttggtcctccgcctaacaatttattaaactacggctacgctgttcttcgcgctattattgcgcgaggactcgtcggttccggcttgctgccgacactcggtattcatcataagaataaatataatgcttactgccttgcggatgatattatggagccttatcgcccctttgttgacgagattgttttatcaattgtaaatagattttcggattattccgaattgactgtcgaacttaaaaaaattcttcttaatattcccgctcttgacattcatttcggagaggaaaaaagcccccttatgatcgggcttcaaagaacaacttcctcgcttgctaaatgctataagggagaaacaaaaacaattgtttaccccgaattatgttaaaccgcttaaacgagtatagaatagtgtgggttatggtttttttcgatttgcctacggataccgaaagggataggaaaaattatacccgcttcagaaaatcccttcttaaagacggtttcgaaatgtttcaattctcaatatacacgaggcactgttcaagttacgaaaatgcagtcgtccatgtcaaaagagttaaaagtgttttacctccgaaaggcgatgtcggcttgatgttcatcacggataagcaattcggtatgattgagatttttcacggaaaggttcaggcagaagttaagccgcctcctcaacaactcgaacttttctaaataaaaaatgggttataacggtataacccattttcattaagacgattttttcttctcttaaaatcccctaactgccatattttcattgcttttgacgagtttgtactctacaaaaaatcgtcaaactcacatttgaaagcaaaccacaacaattgcaagttacttgataaaagcgcgtgaactctacaaaaaatcgtcaaactcacatttgaaagcaaaccacaaccagtgaatcaatacgggtaattttccgtaaactctacaaaaaatcgtcaaactcacatttgaaagcaaaccacaaccatttcaggcgtaacagtaaagaaattagtactctacaaaaaatcgtcaaactcacatttgaaagcaaaccacaacttaagagaaatcagtaaggaattagcggatactctacaaaaaatcgtcaaactcacatttgaaagcaaaccacaacgttcttcgtatgcggaaatgatttttgtttactctacaaaaaatcgtcaaactcacatttgaaagcaaaccacaacagcgttgccggtatatcaagattccataacactctacaaaaaatcgtcaaactcacatttgaaagcaaaccacaacttgctgtcgtggtttt

SEQ ID NO: 4439 - DNA, 21070 bp, synthetic construct
  misc_feature 1..21070: note = Synthetic
  source 1..21070: mol_type = other DNA
ccccagcggaaccttccgaccgtcgagccgctttacgattccccggctaagacgaacttcgaccgcaatctggtcaaccatctcgatatcggcacacctgtcgcggtcaagcacgctaccgccgacgggaaatggctttacacggtcgccccgctcaccgagggatggatcgagaccggggcagtcgcgttctgcgggctgcaggatatcaaggacttcgagggatatcccgtattcgccgtgaccaccgcagtccgcaccgacctgtacctcgacccgtcgatgacgaagttctacacagtcctgcggataggggtgaaacttcccgtctcgaagaaacagcccggcggctcgctcaagatcgtcctgccgttccggggggacgacggtaagatcaagtggggcgtggggtatgtgaaaccgtccgatgtctcgaggggatacctcggatataccccgcggaatatctacgagctggcattccggctcctatatactccgtacgggtggatgggttcgatgggcttctacgactgctccgacttcctgcgcgccgtgttcgcgtgcaccggggtcgtccttccgcgatacagttattaccagatttccacgggcgacgacaccaagttcccgaaagacctttccgagaaagaccggctcgcgctggtggtaaaaaagggcgtggggggtatcaccctgatccgcacaaccgggcatatcctgctctacatcggctcggtcggtaacataccctacgtcatacacgatacatgggggtatgttgacaaggataagaaatactggcagattgcgggggtgactatctccgacctgtcgctgaaccagtactccaccaacgggtcgctcgccatgcagatggaagcgatgacggtaatcagattaccttagcgggctttcccccgcgcgggaaccacgggataatccggctcgttcgctttttatactccttgtactccgggtacttccccgccgatatccgttcggtcagcgcagtcgagccctgaaacagcacggtcaacagtaccgcgcctatgatactccaccccagccattcgccggacacggcagcgccgaacaggtacaccatccaccatatcataatctccgcgaaatagttcggatgccgcgagaagcggaacaacccgtgcgatacgaatttctcgaatatcctcccggtcttcttcagttggtggaaatcccactgctgctggtcggcgattgtttccatggccaatagcccgacgaacaggaccgcccacacgatatcgagggctcccaacggcttcccgcgcaggatatacgcctgatgtaccggaagcacgaaaaggacgaatagtgcgttctggtagccggaaatgaatccgaaattgaacgcctgccagaggaactcgttcccgataaactgacggactaccgcccaacggtaatcctcgttgccggaatatccccctttccgcgcgaagttgaatgtcagccgtaccgcccataacgtaatgagcgccgagataagaatgaggcgggcgtccggccaccccctcgcggtcagtatccatgagtacgccgcggggaggatgctccagaggcggtcgacccatgagtactcgtcgaagatcaggccgaacacgaagctgatcagcgccatcgccgccgcgaccgggataatcaccatgagcggatccgcgctcgcgatatactccaacggtctgcccaacgatacggcgaacagcgcgccgaacgccccgacggggagggtgatgaaaaaaatgatgaatttcatagaaactccgctaactgacttgcatatattataatgcgttgtttcccggtgtcaaccatatttgcgaaccgcgcaagggtatgatacaatattattcctttggattcgtcacgatgctgtttctgtctgccgtcaacggcggggtaaaaatgttcaaggaaatggggaaatataccgggtttatctcgaattcgctgaaaaccattctagcgtaccgtttcggcgcgctgatttggatgatattcccggtcgtattcatactcatccagtactttctctggacgggtatattcgacagcgccggcggaaccctttattccattaaactttcgcagtacctcacctatatcgggatcgggtatatcaccatccgttttgcctcatgcggacgcgaggggatgatttctaatgaactgaaaaacggaaatgtcgcgactgcactcactaaaccctacgactatatcactatgaactttttccagcatctcggtcagcgtctcgcgttcgggatacaatccatcccgatggtcgtgatgatcgtactgatagcgcagataccgctccagaccctgccctatatcgggtactacctcgtcagcctgatcttcgcgttcgccctcaactttctcttctcggtgtttatcggcagtatcgcgttctgggtcgtcaatgtatgggggctgttcctgctgcgcggaggattgcggatgctgttttccggggaaatcatcgctatcacgttcttttttaaaatcgccaaggaaggcgtgaagatacagaattttccgctccagtcgctcgacaccgccggggtgaagggtgttttccatgccctcggggtgatcgcgtactgtctgccgtttcaggcgatgtacaatacgcctgcggcgatatacagcgggatgttcgcatcggataaggaagtcctgctccacctcggcttacaggtactctggatcgtgtttttcctgctggtcaataaagtgctgtggaaaaaggcgctgaaccgcgtcaccatattcgggggctgatatgcgtttcctgaggctgtatgccgcatttatcaaacaattcttcaagagcctgatggaatataagatggatttcatgctggggctgatcggattgtcgatcgtccagatcggaacatttttcgcgctcttcgcggtattcacccagataaaaacgatcgcggggtatacgttccacgaggtactcatgctgttcgggtacgcccagatcatccggggcatcgatcatatttacaacgataatatctggttcgtcgcgaccttctatatccgcgagggaagtttctacaagttcctgatccgcccgatcgacccgctccttcatatcgtcatggaacgaatctgcgcggacgggttcggggagttcctgctcggcctcgtgatattcctttacgcgaagtcctcgctcggactctcgttcggcttggccggatggggacttttcctcctgttcaccgtttgcggtctggtgatctacttcggcatcaaactcgcgttcgcgagcatcgcgttatggacagtcacgtccaatgaaattatgtcactcgcctacgaagttaattcttataccctttacccgctcgaaatctataataataagttcatccagttcttcatcacattcgtcctgccgttcgcggtggtcagttattttccgatgatttactacctgcgggacagcgcgcagatcggggcgtatttcggtatcgcggggttcgataaaaactggctcatcctgttcatccccgccgtcgcgcttatgaccctcgggataagcctgattgtctggcgcgcggggttgaagcgattccaggcgacaggcacataggaggaaacatgatcgaagtaaaatcgctgactaaagaatttaagtccccgaagaaatatcccggtttccgcggcgcgatccggtcgctattcacccggaagtacgatatcaagcgcgcggtcgatgatgtcagtttctccatcggcaagggcgagatggtcgggtatatcggcgtcaacggcgcgggaaaatccactacgatcaagatgctttccggcatcatggtgccgaccgccggggaatgcactgtcgatgggattattccgtacaagcgccgtcaggataacgcccgtaatataggggtggtattcggccagcgcacccagctctggtgggacctgcccgtatccgaatcgttcggtatccttcaaaaaatatacgaaatcccggagaagcgctacaaggaaaaccttgcctatttcaaggagatgctcggactggaggagttttacttgtcccccgtccgtaacctgagcctcggccagaaaatgcgcgccgacttcgcggcatcgttcctgcacgacccgaaggttgtttatcttgacgaacccaccatcgggctcgacattctggtcaaggataacatccgccgcgcgatacgcgacctgaacgcgctcagaaaaacgacggtcatcctgaccacgcacgacctgaacgatatcgaggaaatctgtaaccggattatcgtaatcgaccagggacgccggatttacgacggttccatcagcgaattgaaggtgaagtacggacgccgcaaggaaatccttttcatccggggtgaggataccggagcggcggaattgcccgatctagataaggctctcaaggcgccgaaaggctcgttcgaagtgacctaccccgagggcgggatactgatccgtttcgagcgtgaccgtttcgatatcggggcgattatctcggcggtactgaaacgcgcgagtatccgcgacattgtcatcgaggaagtggggatggaggaaatagtcaagcagatttacgcggggaaaattcccatgaacaaataaccggtcttacggataaacccgaagcgtttcttattatccgcacataaatagaaaaccatgtatacattgacattttcttacaaccgttataatctattaaattttctactgagaaataacgtctgaatacattatcggcgaaaatgaaagaactttacaacacgggaatcagcgcggttatactcgaaggaatcgacggcttatatgacgtggtatacctgtgccccgtagaacgatcatagttcgatggattaacgcaataataaattatattttcttcccattcaccttgcctttttttcccttatcatttagaattacctgaatgtattgaatatttattaataaaaaaattcctgaaataattctgcggggtgttatgcaggaaataaaagatcagaatggtcatagctccattcatatttcctacttgaaggatatatcaaaaatcgtatccatcgggtttgtttattttttagcccataaaatttcttttttctttcccgatacccaaaaaatccttatggcgatctggccggctggcggtatcggattagcggcgctcctgctcaatcccaagcggctctggcccgcgatactgattaccctttttatcgcggggaatactgcaaatctgatagagggacgccccctcctgaatagcctcggcttcatgaccgcgaacatccttgaatcgttcgggagcgcatggttaataacccgactatgcggtcaaaaaatccgttttacccggattaaagagatattcgcattaatcttagccgcgactgtacttaatttttttacggggcttctcggcgcgggtaccgcggcattatcgaataccgcctcgttctggagtttcctgggtgcgtggtggatagcagacggactgggaattctgatagttaccccgttcatcgtatcgtggagcgacttcaaggatttcaagtttaaaaaagactggaaatggattatcgaatcgactgtttttatcatcggatggtgtatcgtcagtcagatgatctttaacacccataaaaccacatccctgctgtatccccaaccttactttctctacttactcctgatatggggaagcctccgcttaggcataaaaagcgttacactcgcactggcagcggggtttgtcattgcggttacgggtaatgctgtcacctccggcccgttattatggggaggggatacttttaccgaccgggtgatattagcccagatgttcatgggtgtggcgtcgttcgccgggttgattttggcggcgaccattaaagaaaaatcctctgtggaaatatccgcgcatgaagaacgggaacgaataaaatccctcggggacaatattcagaacgggatggtctaccagatcatcagtgataaggggaagagcaggaaatttcaatatgtcagcgcggggatggaacgtatcaacggagttaccgtggccgaggtattaaatgacgctaacgcactatataatttgtttatcgaagaagaccgcgcaaaggtcgcggaactggaagacgctgccttgaaggcaatgtctcaatttcacgctatagtgcggttaagaaagcctgacggacaactccgctggatggaattttcttcatttccgaccgtgctgcccgatgggctgattaggtgggacggtattcaaatggatgttacggaacgcatgaaagccgaggaagcgttgtgcgaaaatgagattatcttttcctccttcatggaacatagtcccgtgtatgtcttttttaaggataaaaatatccgttccctccgcctgagcagaaattacgaacagatgctgggaatgcccctcgaagacgctctaggtaaaaatatggacgagttattcccatccgacctcgcgaaaagcatggtggaggatgataaaaggatactggaaaagggcgaggttgtaaaaattatcgaggaactggcggggaagacgtatgagacgacgaagttcccggtatttatcgatgggaagccgaatatgcttgccgggtttactttggatatttcggaacgggtggcgtccgaacaggaaaggaagaagctccaggaacagctccagcaggcgatgaaaatggaggcggtcggacggttggcggggggaatcgctcacgattttaacaacctccttaccgctattcagggaaacattgaaatcgcaaaacttgatcttagcccgcacgacccccaaatcatccatctggacgaggctatgaatgccgttgacagcgcggtatccctgacacgacaactccttactttttcacggaaacaggttattgaaccgaatgtcctgaatctcaatgacattatcaataatcttcgaaaaatgctgcatcgtttgatcggtgagaatataaaagttcagtctattgtcgaagataacctgtggtcagtcaaggtagacgccgggcaattcgaacaggtaatcatcaatctggcgatcaattcccgcgacgctatgcccgatgggggcgaactgattatcgagaccgccaacgtgattctggacgaagaatattcgaagacgcacccgctgatacagcccggggaatatattctgcttcaaatctccgataccggaatcgggatgagcaacgaggtaaaagatcaccttttcgagccgttctttacgacaaaaccgcagggattgggtacgggtttgggactggcgaccatcttcgggatagtccgtcaggccggagggtcaatagaggtgtattcggagcacggtaagggtaccgcgtttaaaatctacctccctaaattcgacgaggccgcggtaaaattaagatttgacggttccgaagaggatttacccggcggaaacgaggccatcctgctggtcgaggacgaggccaatgtactcagactgacgttatccatcctcgagcgtctgggatatcaggtattctccgcttccagcgcggaagaagcgttaatcttcacggaaggaaataaaacgcctatcgacctattaattacagatgtggtcatgccggggatgaacggccgggaacttgcggagaagatggtaaaaatcctcccggaaattaaggtactttttacgtcgggatacccggagaacgtcatcgcgcatcacggtatcctggacgaaaaccttaactttatcgggaaaccctacactatgtccgctctcgcgaaaaaaatccgtgacgtgatcgggaaggattccgtttcgtaggcaattaattattttttcatagtaagtacttcaccactggccggtggttaataccaatctattcccatataatggggttagcctgcgtcccgcatcttgacatccatgtcgctgcggggcttccccttccgcggggtcgcagtagtactgcgtacactatacccgatatcaaactatttataacgatgaagatatagctcgtgatgaaagcaaaaatgtcatagtgagcctgtcgaactatgccgttatgtgttttacgcatattgatgttcggctatactccatgtcgcaggtactgcgtacgctaattcttggctatttaccttgccgcaggctatttctctataatatcagcaattttaataatggggttagccctccgccccgcatcttgacatccatgtcgctgcggggcttccccttccgtggggtcgcaggggttgcgattacggcggggatatgctaaaataatcccgccgtatcggagggaaaaatgcgccggataatactttatattcctacagtaaccgttctatttatcgcggcggtctattccgcgaatattcagccgtccacgaccgcccccgcaatcctgccggggatcagacccgagatgatgtcggcgggattctggataggcatacacccctcgcccgataaagccatcctaacatccaagcagatcagtaaactcaaccagtacatcatcgcgcaaacaggggtcgcatctatccctgactacggcccgaccaaaaaggggaaaaccgttaaaaacctgatatggggcaatttttattatatccttaacgatatcgggccgctcgtgtcggcggggcaaaaaatcacattgacaaatctcatggatgttaaaaaaaatatgaacgcggagtggtttccgtataaggtcaagctgaagtacggtctcgtgaccgcgatggcgaatctccgcgttatgccgaccatgcaggggattttcaacgagccggaggagaatttcgaccgtctccagctcagtctcgccgaggtgggcaccccgctcgcgatcatgcataagtcgaaggacggaaaatggctattcgtccggggagaccagaccgagggctggatcgagtcgtcgaaagtagtttactgctcgctcacccagcttaaaaattacatatcgtccgaactatttctcgtcgtgaccagccccaaggccgacctgtactgggacaagggattgaccaagccgttcgaattcgtccgaatggggactcgccttccgctgaccggcgaggcgaacgcgtgggtatggaaggttaaagtgccggtcaagaccaagaacggcgagtatgaggtcaagcccgcatatatcaagaaatccgacgtccataaggggtatctcccctatactccgcgcgtcatcctcgatcaggcgttccggctgctgtatactccctacggatggggcgatatgtggggcgagcaggactgttcgcggtttatctggcaggtgttcgcgtgcgcgggtatctatctcccgcgcaacacgtcggaacaaatcctctgcggaaagctgatatgcaggttcgagacgaacgcgacgtatgacgcgaaaatccccgcgctcctgaaactcccgcccgcgacctcgctgatctacaagaaggggcatatcatgctgtacctcggcaaggtaggcaatgtcccgtatatcatgcacgacacatgggcatacgccgataccaaccagatcaatcgcattatcgggggagtcaccgtatcggacgtatggctgaataaggaatccaccaacggggctatcctcaaggaaatccgcgcggcgattcaggtcaccctgccctagcggtcatttctttcttaaactacaatcaataacaaatgagtataatattcgtataattgacaaatattcctgaggggttataataaataaaaaaaacggcccgaaggccgctgagggatttcccgtaggaacttgcccgcgtggtgtacccttactagggcttgtggatagtattattctaattgttttcaaaaaaagagtcaatagaatattcactttcggaggaataaatggataaaaaatcagattacatcctaggactggatttgggtagtaattccttagggtgggctgtgatccaaaacgacggtaaaaagaatcccaaagccattcttggcatgggtgtcaggatattcaatccgggaatgaaagaccttgagacatccaatccggtcaccgccgcgagcgacaggagaaacgcccgccagatcaggcggcaatcggatcgaagaagacgccggaaactgaaagtttattatcttctgaaaaatattggtttattcccgtcaggcgaaacgagggaaggatttatcgaacggatcgataaggaaaccgtaggaaaatatctcgaccaatccttcgatccgaagcagtttttccacatcatcccgtactatctccgcacccgcgcgctcgaccatcaactatcccctgaagaactcgcaagagtattgtaccatctcgcacaacgtaggggctttttatccaatcgaaaggaattaagaaagcaggacgactacggaaaagtaaaaaaaggaatatcagaactacatcaagaaatcgagaactcaggcaatcggacaatcggagagcattactcgaaaagcaatcccttggagaaaaggatcagggggagatataccggaagggatatgtacctcgatgaattcgagaccatcttcgaaaaacaacggcaattctatccacaacttctaaacgaagattataagaacaaactcaaagacgcgctattcttccagcggcctctaaaaagttcgcgccatctggtgggaatgtgcgaatatgagaaaacatcaaagcgctgtccgtggtaccggatcgaggctcagcaattcaggattctccaaaccctgaataacctgaggataatggaggagaagaaaccgagccggaaactgtcctatgaagaaagtgacatactttttaaggctcttgataaaaccgatcggctgacgcttacggaaaccaaaaaactcctcaatctccctgcaaaaggtaccaagatcaattttgaagaggggggcgaaacacggctattagggaacaagaccaatcatgtgctttcccagatattcggcgatgaatatgaaacgtttacgggagtacaaaaagaggacctccttcacgatatcaactccattcaaagtatcgagaggttaaaagctttaggaaagacaaaatggggattaacggcagaaaaagccgaattgctcagtgaggcagtactcgaagaagggtactgcggattatcgctcaaggcactgaagaaaatacttcccggaatgaaaaaggggatttcctaccccgaggcagtgaaggatatatatggcgaatttcatcaaaagacgactattctcgaacaaataccgatgctggaaaagagcctgcagaatttaacaaatccgttagtcaaacgctgtttaacagaggttagacgatgtgtgaacgcggttattacccgatacggactcccacaggaaattcacattgagcttgcccgtgagatgaaggcgtccaaagaaaggcgcgccaagatgattcaggataaccgggagaacgagaaggagcggaaacgcgcggaggcctatctggaaagcaacgggattacgaacccgtcgcgtgaaacgatcactaaataccttcttgccgaagaaagccattgggaatgcccttataccgggaaatcgattagtcacgccgctcttttcgggcctaccccggaattcgatatcgagcatattattccgctcagcaggagcctcgaagattcttttgctaataaaacactttgctataatgaagagaaccgcacggtgaaacgagaccagacgccttacgaggcatatatatcaaatcccgataaatataatcttatacaggaacgggtcagccgtttcaggggaaaattcagggatattaagctggaccggttcatgatggccgatgccagttatttcgaggactttaccgaccggcatatgaacgatacccgctatgcttctaaactcgccatgcagtacctatcatatctttatggcggattatgggacgaagacggaaatagaaagatatactgcaattcgggcgcgattaccgcctatctgcgcggatattacgggatgaaccgagccttgggcggcgacaaaaagaaccgggatgatcaccgtcatcatgctgtggatgcggtcgccatcgcgctgaccagcgggcgttcgatcaaagaacttgcggactatgccaaacatagctggatttacgggaaggccaggattcccggaaaggccgaaccgtgggaaggattcttctccgaactggaaaaaaaggtggaaacgattatcccgattcaccacatcagcaataaggtcagcgggaaacttcacgcagataccttttacggggataccggagaagaagggaaagtcactatccgcaagaaactggaatcgctttctaaaaatgaagtgcagaaaatcaaggactcctttatcagaggaaaagtcgagcagatactactgcagaagagtgaagcggaaccgcagaaaatattttccgaccctgtcaaccttcctgttatcgaggggaaagacggtatcaatattcccgttaaatcggtaataatcgagactaatttaaaaacgtttacaatcggatccggggatagattacgcagggtcgcaaacgaatccaatcaccatatggaaattgtagcggtattggacgaaaatgggcaggaaatcaaatgggaaggttattgcgtatcgatgttcgaggcttatcggagaaaaaagaaccacgagcctgtgatcctacgcgactttggagaagggaagaagtttaaattcagccttcatgaaaaaacaatgattgaattggatatgaacgataaaagagaactctttgtagttcgatctataccggaaagtcttcaaattatgtttgtcaaatctcttgatgctaggaaacaaaaagatattaaagaagcaaaagaatggttttcaaaaatgcctgataccttacgtatttcaaactgtaggaaagtaatactaaccccgttcggcgaagtgcgatacgcaaatgactaaccgtattatcgagctatcagatactggagcttatgtacacctgacaaacagcttaatcgagataaggatacatgaaggcgaaaagcacaccattccagtggaagaggttggcgttttattactgtccaatcccgcaatcacaataacccaatctgcgattgtagctatcattcaatccgggggcatggtggtactatgcgataaccggtatttacctgccggtatgtttctcccggtcggtgttcatactactgcggcgaagaactatgacacacagatcaacgcttcgctaccgttaaaaaaacatatctggaaagaaatcgtccggaagaaaattcttttccaatcggagttattatttaataaactcaaacaggacggcggactgaagcaaatggcgggactggtacagtcgggggatcctgaaaacatcgaagggcagtcatcccgaatttattggaaaatattgttcgggaaagaattcaagcgggatagagacgcctgcgaccacaaccgctttctgaattacggatacactattctccgcgcatgtactgcccgggccatctgttcctcagggcttcatccttctttcggaatacaccatcataatcaatatgacgcttttcgccttgccgacgatcttatggaaccttttcgccctatggtggataaaaaagtattcgagctactcaatgaaaaaagccccttcgaagaagtagataaggatacaaaaagaagaattctggaaatacttaccgggtccgtaagaatgaaaaaggaaaatatttctatctttgacgctttaactaaattgacggtttccgtattcaatatattcgagaaaaagagaaaggatgtcgttttacctgaatcgctcatcgtataaacacttatattctataaatcattatccgaaaataaatcatatgaaacgggaaataccgtcggaatacaaaggtatgtggttattcgtcatattcgatctgcccgttatggaacaccgtcagcgtaaagcttatacaactttcagaagaaggctattagctgaaggtttttccatgcttcaatactctgtctatgcgcgttacacgacctccagagaaaactgccaaacctatgcaaaccgaatcaaacagattattcccacagaagggcaggtcagattgatcatgattaccgataaacaattcggcgatatggaagtattttacgggcgaacgaaaaaaaaggccgaagatccgccggatcaactcttattattctagtatttttcctgaaaaagcataatatctcccgaaatatcaacgagatacacgggagatattataccttagttaaaaaaatccacaagtcccagctcattctacgatggggaaatccttaatgatattataccttagttaaaaaaatccacaagtcccagcaaatcgatcttctggaaaaccaatccgtttattataccttagttaaaaaaatccacaagtcccagcccggtgcacgtgcacatccacgcagatcgcattataccttagttaaaaaaatccacaagtcccagcaaatgtcgcgcggcaataaaacccacacatattataccttagttaaaaaaatccacaagtcccagcgaaaaaagtgtcgggcgcgcccgacagtttattataccttagttaaaaaaatccacaagtcccagccttatccgtgacgttgataaactgacttctattataccttagttaaaaaaatccacaagtcccagctcggggagaaatactcctcactccggcggattataccttagttaaaaaaatccacaagtcccagcgttaaattctactgccattgtttgggcatgattataccttagttaaaaaaatccacaagtcccagctgcgaagaaatagcaaaagaattaaacatgattataccttagttaaaaaaatccacaagtcccagcgaagaccgcgatcacgaacgcaaaaaacctattataccttagttaaaaaaatccacaagtcccagcttgtaaaatatataggacgtgacggccggaattataccttagttaaaaaaatccacaagtcccagcattgaatactgtaacggcgacatttttaaaattataccttagttaaaaaaatccacaagtcccagcaacggacgatcaggtgaaggaggttatcgaattataccttagttaaaaaaatccacaagtcccagcctcgatatgatcgatttgatttgtatctcgattataccttagttaaaaaaatccacaagtcctatcagcgcgatgatatccttctctatcgcggacggttcggtctgggacgagtaacgtttgaataagttacccctgcggccgaacaggaacttggtaaaattccacttgatcgccttggtgcccataaacccccgcgcggcggtggtcagccattgatagagaggatgcgcgcccgcgccgttcacctcgatcttcgaaaacatctggaactccaccccgtacttttccttcgtgaatttgagtatctccccgtcggtacccggttcctgatgggcgaactggtcggaggggaatcccagtatctcgaggccgtccgaacggtatttccggtaaagttcctgcaggccggcgtactgcggcgtaaacccgcagagactcgcggtattgacgatcatcaacactttcccctgatatgaagacaaatccttattttctccggtgatggttttcgcggagaaatcgtacacactgacagaactttctattttttccataatgtgcctccggttaatatcttctcatatacatactagtaatatattcaataatcgtcaatacaaaggatatttttgcaatttcacgtttttactttacattttcttatgcatctatcaaaatacgttgttgaaaatgtatctcttttatgatatattttcttcaggaagggaaaaatgaatactgtccgcgacatgattactaaaaaacatataaagaatcaaattgtcttgttcgcctctctcgcgtttattctggtaatcgcgattatatggctcgacgaaatcttcgatctgccgcattaccttttcggcgcggaaaaaactcctattaactgggtggaaagccttgtcgaaagcgtgatggttattatactctgggtaatttcggtattctcgatttgtaattttatcagacgcatcaaatatctcgaggggtttctgccggtctgctcgttctgtaaaaaaatccgggtcggcgatcagtggatacccatcgaaaagtatatatccgaacattcggaaactcagttcactcacagtttctgcccggattgcgcggagaagcactataaagaatacttcgacgacgaagagaaaaagaaactatagctaaactgtaagctcgattttatttccatcggggtccgcgatcactgcctcatagtacccgtccccggtcatcctcggttcgccgataaccgcatatcccgcgtcccgtaattccgccgtcttcctgtcgaccgcatctttatctcccagcgacaccgcgatatgcgcgtatccggtagccgcattcccgtccttttgttcggctatccccggcttcatcataatctcgatccgcgtaccgccgtcaaacaggagaaaataggaatcgaaccccgtgacgggattccggtacttctccgatacccccgcgccgaaaaaacgggcgtaaaactcccgcatcctttctaactcgtttgtccataatgccgtatgatgaattcgcatattcccctcagactagtttttttcgcaggcagaccatatttccccgcgtccatccttcatgccgataaaattccagcgcgggggtgttgtccatatccgcgagaagctggagacggcatgcgtgcatgctctttccccatttttcaaccgcgccaatcagcacggtccctatccctttcccgcgaaactccttcgagacaatcatatcctctatccatagcgaccatcccccctcgacagtggatacgctcatctggccggagcacatcccgatcaccgtgccgttctccaccgcggtcataatcacccgttcgccggaatgttccatcatcatcgataaacccctcgcgtgcttctcgcggtcgaattgaaaatccttctcgatcgagaataattcgcccagcagttccaccattacgggaatatctgactgttctgcttctctgataatcattcgtacatctccgtcttgtatttactttatatctggaataaatttaccgaaattatatgcagatattaatccgattttttgccaaaccgcgtattttatgttagcataaacctgacatttttgaaatattttaacatgattccggaggaaataaatgaaaaagttctgcactctccttgcgttcgccttattgttcgccgcggtaaaaccgttagccgccgcggatatctgggaggcgctcaccaataacgacctgccgactgtaaaaaactatgtcgagaaagtcggtttcgacctgaaaacccagccagttctcgcctactacttctcttatgggaagaaatggtctcagcctctactggactatctcgtcatgaataaagcgaatctgaacctgaaatacaaaggtatgaccgccatgcattatatcgcgattaactgggatcagagcgcggtcaatttcctgctgtcactgacgcccaaggcggcggatcagaagaagatgatcaacatcgccgcggacgataaaaccaccccgctctaccaggcggtgaaggctaagaagatcgatatggtgcgttacctgattcagctcggagcggcggccaacgctcccgactcggccggggtaaccccgctccatctcgcggtgcagaatcaggatatcccgatgatacagctcctgatgggacagaagggggtatccgccgacgcaaagatgaagacccctatccagatgaagccgtattgtacggtgactgtcgaatacaaggaaggcgcggccaagatgacgaaggtctacgtgttccggggcgatttcgaccctacgaaataccctgtcggcgctaagctcgacgacctctcccagtttaacgacactatcccgaatatcagcggaatcgttatcaaagaaatatcgatcaatacgccgttactggtaaccccgctcgatctcgctatttccgccgacgctaaacttgcggacgcgcttctctctaagggtgcgacactgaaaaataatatctccatctccgcgcaggtatacgccaaagccggcggaaagccgtcggccaaaaaactttctctcaacctgatcgaatttgcttacctgctatggaataatgagaacaacgcgaaagacgcgccccgtgaaatggaggaatggaagcgcatcaagataatccgcactcttctgaaatacaaccagattcagccgaagaataaacagctgaaagtaaagaattccgacttcgttctcgaggacgacgtcaatatactgatgactaaaatcaaggccggtgaaagcggcgcggcttatctcgaaaaagccgtcatcatggaaagcaccaatatcctttctcatatcatcggcctcgggctggtggacgaccagaaggtcggcgatatcctcgcgatggcgatggaacgcgactactacgacgtattcaccctgattatcgcgaagggtaacgtcgacgtgaatgtcgagcggaacgggaaaaccccgctctactacgctatcgaacgcgagaacatcgatatgattaagaaactggtcgacagcggggcgaatatcaacggcggatttactttaaacgctacgagctataccccgcttatcttcgctatccagaagggcaatctcgatactattaaatacctgatcgataagggcgcggatatgaaggtgaagatcaacctcgccggcagcacctacgacccgttcagcttcgcgatggtgatcggcaatatggacgtagtgtcgttcctgctcgcgaacggcggcgacgccaatgtgcaattcacctacctcggcgaatcgtttaccccgctcgggtatgccatcgtcaaggatattcccgatatgttcaacctgctgatcgataaaggcgcaaatcccggattgaagttcgaatcgatgggcaaaccctactccgttctcggatacgcgattgaaaaggacaatatcgatctattgaagaaactggtcgataagggcgcggatgttaatataaaagccgtaatgagccagaaagaaattaccccgctcggctacgcgatggtcaaggataacatcgaactgatgaagacactgcttgacaagaaagcggacatcaacagtaaattcaagctcggcgaaatggaatatactccgctcgcctatgcgatggaaaagggcaagaccgatatgatcgcgcttttgatgtcgaagggcgcatcgggcgacgccaagttccagttcggcgggaaggaatacacccctctcggttatgctatcgaaaagggcgataaaagtatgctcggtatgctgatcgaacagggcgcggacatcaactcgaccttcatggtcggcgagaaggagtattccccgctcggcttcgcaatcgagaaaggcgataccgcgctcgcgaagtcactgatcgagaagggcgcggacgtcaacgcgaagttcaaatccggaggactcgactataccccgttatcctacgcgatggagaaagaaaacaaggaactgatgaccctgatgatcgataaaggcgcgggagtgaatatcgtcttctccctcaagggcaaggagtacacgccggtgggatacgcgatcgaaaaaggagatatgccgttatttaatatcctgctcgctaagggcgccgacgccaacggaaaattcaagctcggcgataaggaatataccccgttgggatacgccctcgataagggcaactccgcgttacttgacgcgctgatcgagaaaaaggtcgacctgaacgctaagttcaaattcagtaataacgaatataccccgctcggtttcgctatcgagaaggggaatatcgatatggtcaatctcctgctctcgaagggcgcgaatatcaacggcgtattcctgatcggcgaccgcgagtatacccctgtcacctacgcgatcgataaggggaattccgcgctcctcaatctcctgatatcgaagggcgccgacctcagcgcaaaattccagtataataacgccgattataacgcgctcgggatggttctcgagaagggcaatatcgacctgctgaaaagcctgatagcaagcggcgcgaatatcaacgaaaaatcgatgggcgataagaccccgctcggtttcgctatcgagaagaaaaatcccgacctgatgaaaacgctggtcgagagcggcgcggatgtcaataaagaatgcttctggaaatatacccctcttacgttcgcgataatcggggatagcatcactatgtcggatttcctgatctcgaagggcgcgaatgtcaatcaacccgcgaaaagcggttgcaccccgctcggatacgctatcgagaagggcagtatcgatatcatcgaccttctcctgaaaaacaatgtcgacgtgaacgggaaattcgagatcaccgggaaaacgtacacaccgctccagcgcgcaaccctgtataaggacgataaaacgaaagggtcgatttacctcgcgatcatcgacaagctgaagaaggcgggagcgaaataagttaaaagtgacaagttaaggcataaatagccgtccgcgagggcggctgtttaaggtgcgcccctgtgtttggacagatttaggggcaagttaagttgaatcttgctgtgctcttttcttacatcagtcattctaagccgcctttccggttttgtcaacaggcgaaaagtatatcgaagccggcggcttataacccaggctctggtgcggtctttcatggtcgtagtatctaaag

SEQ ID NO: 4440 - DNA, 24593 bp, synthetic construct
  source 1..24593: mol_type = other DNA
  misc_feature 1..24593: note = Synthetic
cgatgaaagcatttttacgagccaagcggtacgatgtagaaacggttccttttttattataaaaaattgaaatttccttcaggtaattttgattggcattgatggatttttctaaatgcatgggcatgtttaaaaattcccaagaaggccataaaaaatgattggccaaaaaagcaagaccggcacctacaatggtgtccagtattctaaattgaacaagatcccctatgttaggagtcacaattccataaataaaaacaacatacatggttacaaatgtggcactgactttgtaatttgtttgggtaaaagagaatcctaaaagcaagcaaagaatagaaagaatactgattataatgttgtctttgacaaagaaaagaattccaaaggcaattaatccacctaaaacagtacctagaattctatgaaaagaacgttgtttagtcaagccgtaaccgggtcgcatgataacgataatagtcaataaaatccagtatacattatgaaaaggcagtatttttccaataataaaaccaactaatagcgctattgttaatcgtaaggaatgcctgaaaatagtggaggaaaaactcagattctctgtcaaagtacgccacggataatactgcggcgttaagaatttttctaaatcggtatcgattcctgtaaaatcctgtaaattaacaattgaggtaaaagcacgttctacaatttttattttctcgacttgcttttccgcatattccagcatagtggtaagcataaaaacgccttctgaggcagaattttttcctaaatctttttcataatcagtgattgccagctgtaaggcgttcaaatcgtttagcaatgtgtgttttggaatataattctttcgtttttttacactttcagataattgctttaaacttgtggccagattgtaggctaagttttgatacgtcagcaagacccttggatgattgtcgaattttcggtgcaatttatcatggtcaaatgacgtagacaatgccacttcaaggatttctaccattgctataaaaacaagcaacatttttcgattttgattagaagaacctgcgctgatatggctgttaatcaatacttctcttatgttttgatgaatggtgttcaactcgacctgaaggtttaactgcttttcaataattgcttttttatcggcgtctatggtccataaatctcctcttagcttcaaatatttagccgtaagtttgatgcattcagcaatttgtaattcgatgtagcgatgtggtctgatgtagtgaaaagtaagtgaaacaacgagatagaataatcctcctgctagaatcaaaccggaatgttgtaccatagcccaaccggtatttatatcagaaaatgtcaaggagattgaaatcagggaggagaaagaaaccattgtagctcgttgtccgtaaacggataacatggatgtcaggaaaactaataaggctaaaaaaggataaaaaatccaagaatacggataaattatatttaccagcaaattcacactagcaacaagaatggtggcaacaagaaccccgttgactttatgtttcagactacttggaatgtcactgggataagtaaaaaaggctccaagagctattgtaaagcctacttcgaatttgccaaaaaaagaaaacagcatcaccggaatcacagtggcgatagttacttttagggcattagtgaaatacgtcgtatcggtaaatttttggattttatgaatcatacaattgtattgcttgcaaaggtaaggattgtaggaatttttcaaaggaatactatcggtcttttaacctaaattttaaatagtgatgaattatcattagagcattattcattggctatttttttactatttttgcagaccgaattaaaagagaacttatttcgattttaatagctaatatttaatacaacacgaatgattttaccaattataggatatggtgatccagttttaagaaaaacaggggaagttctttcaccagaacatccaaacttgaaagaaacgattgccaatatgtatgaaacgatgtataatgcctatggtgtgggtcttgctgcgccacaagtaggattagcgcttcgtttatttgtagtcgacacgactccttttagcgacgatgaggaattagaagatgcagaacaaaaagaattaaaaggattcaaaaaaacctttatcaatgcaaaaatgatacaagaagaaggtgaagaatggagtttcaatgaaggctgtctgagtattccggatgtcagagaggatgtttatagaaatccaaccataacaattgagtattgcgaagaggattttgtaatgaaaaccgaagtttttgacggattaatcgccagagtaatccaacatgaatacgatcatattgaaggaattttattcaccgataaaatttcgtcattaaaaaaacgattgattcaaaagaaactgaaaaacattttagagggaaaaacattccaagactaccgaatgaaattctttgccaaaaaaggaagataaaacagctttttaacttcgcttggtatgatttttggtttcaaataaaaataaataagtcaaattcttaataataattccacaataacatgaatttagaaaaaatattagccatttctgggaaaccaggtttatatgtattgaaagtgcaaacaagaaccggatttgtagcagaatcattagcggatggaaaaaaaatcaccgtaaacttgaaaagcaatgtaagcttactatcggaaatttcaatttatacctatgaaggcgaaaaacctttagctgaaatcatgcaaaaaattgctgataaagaaagcaaaggtgcggcaatatcccataaagaagataacactacattgatggcttatttcaaagaagttttacctgattatgatgaagaaagagtatatccttctgatatcaaaaaagtgttgaactggtataatatgcttcaagcaaaaggacttgttactgatgaagctcctgctgctgcagtgacagaagaggttgcagccgaagaaactccagtagcggaagttaacgctcctgctaaaaaagcaaaagctaaaaaagaataatcagattttaaaatactatttaatcctgttcagttgtttttctgaacaggatttttttatttttaccaaaaactatccctaatgaattcaagacaaaaccaactgcaagctttcgaacgagtattagatattatggatgatttgcgtgaaagatgtccttgggacaaaaagcaaactatgcaaaccttgcgccatcttaccattgaagaaacctatgaattaggcgatgctattttagacaatgatttgaacgaagtcaaaaaagaattgggtgatttgttgttgcatattgttttttatgccaaaataggaagcgagacgaacgattttgacattgctgatgtgtgtaatgaaatttgtgaaaagctaattcaccgtcatccccatatttacagtgatgtggtggtaaaagacgaggaagaagtgaaacaaaactgggaaaaactaaaactcaaagaaggcagaaagtccgttctggaaggtgttccaagaagtttacccgcattagtaaaagcaagccgaatccaggagaaagtaaaaggagtgggttttgattgggaagaatcgcatcaggtttgggataaggttcaagaagaattagacgaattacacgttgaggttgaagcaggagatcaggataaaattgaagccgaatttggggatgttttattttcaatgatcaattatgcccgatttttaaatgtaaatccagaagatgctttggaacgaaccaataaaaaatttatcaagcgctttcaatatttggaaagtaaagcaggagaattgggaaaacctttaatggatatgacacttgctgaaatggatgttttttgggaagaagcgaagaaactatagtgtttattattaaataattaaattaggatcacttataaaattatccaatgccagaaaataaaactgagttaaaacgttctttaggattaatcgatgccacgagtttagttgccggttccatgataggatccggaattttcattgtaacatcagccatggcaagagatattggttctgctgcctggttattagttatttggttggtaacgggattaatcacggttgccgcggcattgagttatggagaattggcaggaatgatgcctaatgcgggcggacaatttgtgtatattcaacgcgcttatgggcgattggtttctttcctgtatggttggactgtttttacagtaattcaaacgggagttattgcggctatagcggttacttttgcgaattatgccgctatattctttcctgttttagatcaaactctttttagggttggtactggttttattttttcgtatcaaaaagtattggctatttttagtataatcctgttaacctacatcaataccaaaggagtagaaagcggaaaaacagttcagttgctctttacttcggcaaaattaatagcgctttttgccttaataattttaggattatacgtgggtctgcaaacggatgttttgtccaataatttcgcaactatgtgggaagccagcaaaacggtagtcaatcctgatggaacaattacagtaacaaaattagcaggtatggctattttgggagcagcaggagctaccattattaattccttattttctagtgatgcttggaataatgtcactttcattgcaggggaaattaaagaacctaaaaagaatatcccccgaagtttatttcttggaactttaatggtaaccattatttatgttttagcaaatctggcgtacttggcgttattgccaatgcagggaactccaaacgctgctgatattgccagtaacggaatcatgtttgctagtaatgatagagtaggagcggccgcagcaagtatgattatgggaaatattggtgtttttgtgatggctgccttaatcatggtttccacttttggttgtaatagcggattgattctctcgggaggaagattgttttttgccatggcaaaagatgggttgttctttaaacaagctacggagttaaataaaaatcaggttccagccaaagcactttgggtgcaatgtatctgggcgtgtgtgctttgtgtttcagggaaattcggtgatttactgacgtacgcaacctttgcatcgttgttgttttatatcctaactattatgggtgtattcattcttagaaaaaaagaaccgaatgctgacagaccttataaagcttttggttatccatttgtacctgcattttatattgttgtaacagtagcaatttgccttactttattgatttatgatacgttcaatacgggattaggattgtgtatagttgcacttggagttcctgtttattattttgtaatgaaaaagaaagagcaaaattaatggagctattctgctaatttttttagcgcattgatatcttttaaaataatttttttggctgttaattcaatcaagcctaattttttaaaatcagatagtaaacggatgcaactttcagtggcagtgctaattatactggctaattcatctcttgaaagttgtatttttaaggagttatccttattttttccaaaagtatcatttagataaagcagtgtttcggctagtctttctttgactgttttttgggccaaattcaccatgtgatcatcggcttcctttaagtcaccacaaatagttttcataacgttcatagaaaactgattgttcttgccaaagcatcccatcacttctgattttggaatacaaataccatcttttagacagtaaataccatttacattctctccctcttcaaatgtaaccgctccttttttactactatgggaggttttacaataagaaagttttagtaattcgtcttttgttaaggtttttaaagagctaaattatctgacgaaacgttgttcgcatttgctcatattctttggtgttaaaaggcaaatggatatacaaactgataccttcagaacgattgctctctgtgaaagatttcttcaaaatttcttcaaaatttcttctgaaaaatccatttcatcctaattaggataactggtgtattttggttccgaaacattgtatttttgtattaaggaatttttcatggcaaaatcatttatagttagtcaaaagtaaagcgactgctcacatattaaaatgacaattatcatattgaaaaaaacttttacaaaaaaaagaggcttcaaaagcctcttcacaaagaaatttgttctttaaatagtaatgcaatcctgaatcatttttatccattttttagctatttgatgatcttcatgcaaacaaacctgacctatttgatcattctcaattgtgtaaaatggaatggtgtctgtttttttaccctctttgtagtgaaattgaaattcaatttttactatcgtatcgctgttattctccgttgttggaatcagtttacaggactgaattgtatttaaatctacaaaagaaacaacttcttctttagcattaaaatccatcaaaagaaaccctttgtttttttggtctaaagccaatacttttttgttttgtgtttccattaactcaaaattaaagcgattgttttgactgaatttctgttttattgatttaatttttgttttatttagtgaactataccgaatggaatagaaaatggggatggcgattattaacgttagtaccaggccaattatagttacggatgtatccattttttttattttttttagatttataatgcaggattaattgaactgaaaactaaaaaggaatcaattcaaaatagaagataaatatatcttctaattagggtttcagtgctttaaattaccagaaaaaatgaaaaggaaagagtaagagcgaaaccatttcacaacggttgatgtcttgttttgcaaaatgaataatgtacttagaggctttaaaatttggaacagctaccaagtaattttcgtaaaaattactaacgttaggatcaatagaacgatcatgtaaagcaaatacagtatgtacctgtggttgaataaaagctgaagaatgaatgctgtcagcagaaaagaatgaatgtgacttttctgtttgaattgaatccaatgaaatagcatttgcattaaaagcaaataacagagctattgaaaagccaataaaaacaacagttttctgaatccatttcattttgtaaacataaaaaatgagactgactttatgaaattttttttaataaatgaacgttaaatgttaaaatcagctaagtcgtgtctccccataaaaaaacctcgagcagtttattctcgaggttttgatcaccagtatgtgctgaaatttattcggtttttaagtttcgtaattgtttgagtttttctttccaaacatcaagactctctttatgaatagcaatgtttttacgaacttctaatacgatggaattttctttttttgcatttcgggtattggtaaaaaactgaatgttattttccaattgaaaaatttcattttgaacttcatcaattttacgcattacaaaaatcttttcattatctaatttgcgcgtatcatggctttctgacaaatgatccattctgtttgagaaacgcaacatatcagtatcttttttactcaaacttaatttttcaaaaaggacatccagtattttgttaaattttccctcaatatgtcttcttgtgaacggtactttaccaaagtttttccaggtttcaatatgcaattttatggagtctaaatctgttttatggtctccgatcaattggaactctcttaaggtttccaggtaggtttttttagcatcaaaagcggctacttcttccccgttttcctcatttttttgctcttttaatttgtcaaaataatgattgcaggcatccttaaactctttccatattttatccgaatattttcttggtacatgccctatttgtttccattcatcctgaatttgtttcatgataggagttgtagcatcaaaatcagtgctttcctgcaattctttagctttagctacaagagctgttttcttgcttaaattgtcgttttggtctttcttaatgtctttataaaatgaatttttgaaagaattgaaatttcttacagcagttttaaaactggcccaagtatcctcatttacctctgatggcacttttccggcagagaagaaagcagttctcaaggcttctaccttttctatttgagccagccattgagaatgtgcattcactttctcggtcgccaaaacttcaatttgagcaataatttcttttttcttttctaaattctcttgttcagttcctctttgattttcgaataaaacttctcgtttatcatgcatttgcttggtcaaatcactgaatttattccaaatatcatctcgatgttctctagataccggtccaatatcctccttccagattcgatgtaaatcctgtagttctctgaaggctttgttaatatcagcttcagtaaccaattcttcaacacgcgctacaattttttgtttttgttctaagttgtgtttgaaatccaaatctctcgcttcccggtctaaatgcagataatcatagaaattttccacatgaaaatggaagttattccacacgtggttgtatttgtccttcggaattggcccggcagttttccatcgttctcttaaatcattaaaatgttttaaggtgtctttgatgttttcctgagggttaatcaactcttttaattcctcaacaatggccaaacgattttctaaatttgtttttagattcgtttgcaagctcttgaaatgggtatttttagtatctctaaaaagagagtaataagtatcaaattgagatttcaacggagaatgatattgaaattcttcgttagggtcttgattttctgttagaaattcttcttttttctcttcgaggaggtggttgtatttagctaaaaatgcttttttaatttcttcaatatgctgcttaaaagtcaaaattttgtcgctggaaactaaatttttcagttcgttgaccaatacttcaagtgataaggtatcataatcctgcatcggaatatcgtgactttctttgagtgtttcgtcttcactttcagctgcatttgtttgtgtaatggcatgaagcgcagttgtatttgctgtttctggcgctattacattctcttcggcgggaacagcagcttcgggttcatttgttggatcagtggcgtgagttgctaaaacgtttgattctaatgaattagattcaatagtatttttgtctaattttccgtctgcttcaggcaggttatcattcttttcttctaacattttttcaatgtgtaaggtttctaaatagattcaactcgaaagatactaaagcagtatgaaaatacaaaacaaaaacttaatttatagtcattttaggttaaatggctttttttttggagctatttcctgctgtccgctgtattcccaattaataaaaactacggctgaaaagccttgtttttctaaattgggagatgccgcttccatcagggctagggatttgggttaaaattatgaattgttttcaaaaaaaaagtcccaccgaagcaggactaaagattttcatctacggcatatagccttattgtgataagattaaagattagaaattttaatcagttgtaaatatacatataaaataattaggttgcaatgagggaaaccgtaaagcaggtaattattttctccgtagctttaaaaattcttacaaaatacagattgttacggcaaaaatattaggaattgtataaaaacaacgaacctccaataaattggaggctctgattaggtcacctttcggttcaatcccacggttcacttgaaaacaaggaccttattgtgatttgattaaaacaaatgtaatcaataaattgaaaaaaacataaaaatggaaaaaataagacttggattagatataggaacaaatagtattggttggacggttgtagaaaaacaagatggagtttatgattttaaaaaacaagaagacaggaatggagaattaattccttctaaaggaagttatattttttctaagagtgttgatgcaaatgagaattctaaagcgtcagagcgaagaggttttagaggagcaaggagaagaattgatagaataagattgcgaaaaatatcaactttaaaggtcttaaatgaatttctattgtgtcccaaatttacagctggtgaattgaatagatggaaaaacaagaaaatttatccttgcgggaatgataagtttattgagtggcaacgtacagggaaaaagaatggaaatagtcaaaccgaaaaattaaaacaaccttattatttacgcgatttagcagctactaaggaaggaatgatggacactgaaaatggtaaattgcaactaggcagagctttttatcatttatcacaaagaagagggtatttatcaaattcagaagaggatcaatctgatgataaaattgatttatttaaatctgctattttaaatttattagaaaatacttttgattcagtatcctttaaaactggacttgaagttatttttgaccaatataaatcagatgtaaaggttaaaagcctgaatactaaaataggcaaggaacttaaaaaagaaattgtttttgaaaatataaaatcgtttgtcaataccgaatttaataaacctgaaaatttgggtaaagtgatgtcgagtattggagaattatcaaatgagattaaaggattttcaactaaagaaggtattccaactggggaagtttttccaacgatgggatgctatttttattcaatttataatactgtaaacaaaaaatcaggattaataaacaaaattagaggtagatatacacatagagaagaacactatttagctgaattcaattatatctgtaaaatccaaaatattactggcgattttaaagacaaattacaaaatgcaatcttctatcaaagacctttgaaaagtcaaaaaggattagtcgcaaattgtacgttagaaccaaaaagaaaacgtatagccacttcgcatccattatttgaggaatttagaatgtgggaatcaataaatagaataaaaataaaaagagaatcggagggtaagttatattttctgaacaaggaagaaaaggatttaattaaaaacgaatttttacaaataacagattttgaatttgggaaaattgctaataaattaagcgaaggacagtcttatggttatataaaacgaccagaagaagtttatttaaaaggaaaaaaagtagaaactgaatccgttgctgttatttgttttaattttccaatggataagaagttttcagcttgtcctacaattgcatcattaaagaaagtgattggagaagaagcatacaataatatgcagttgttaaatacgggttatggacatgagaagggtaaaaaacaattaagtattgaagatatttggcattgtttgcaaatggatacttttggttcaaaagataaaaaaacagtacgaacagaatttgctaaaaagcatttaaaacttgatgataagattgaaaactttgtaaaaattaagttagttaaaggatatggaagtttgagtaaatctgccattaaaaaaataattccttttttagaaaaaggagagatatatactaatgcagttttcttggctaatgttacagaagttttagggcgtaaaatttcagatactgaacaaaagcaaatagcagaaataatcaaagaagctttagataattttgggattgaaaagcaaaataaaggaattgtaaataattacataagcaaatttaaaggcgacaaagagaattctttgggcaataatcaatttagtattgaagcatataaaaaaggtttagattatgaaatagcaaactggattggggaagttcaattgggaattatggagaaagaagttatttctgaaataacaaaaacttgttggggattattttataatgcagcttgtgacaaatctccaaaggaaatcatctatttgtcttcaaaaactattcctgaatttatttatgatggattaagtactgtttttataaatgataaaattaatgtaagtaaattgtatcatccttctgcgatggaagcttattccaaggctgataaaaaacttgggaatcctgaaatctcatcaataaaaaatcctgttttcgatagagcaatgcaccaagtaaaaagattgtgtaatgaattaattagaaaaggattagtcgataaagaaaccgaagtgaatcttgaagttgcgggggaaatcaatagtgcaagttatagaagagctttgacactttggcagaaagaacaagaattcattagaacttgggcgaaaaataaaatcataggattaaatgcagttgaaaaacgaagtgaagttattccgacttcaactgaaattgcaaaatatatattatacaaagaacaaaatcacaaatgtttgtacacttctggtaaagaaatttgtgttacggatttcttgggaaacaaaacaacttatgatattgagcatacaataccaagaagtaagtttaatgataattctttgaaaaacaaaacgttagtcaattatgattttaatagaaattataaaaaagcaactttacccgctttgttgaaagttgattttaacggcaaaacaattgatgcagaatcaattttgcaaaatcgcgatacctacttaaaatcgtatactattaagggtgaagaagtgacttggactgtttctttaaacgatttgaaatttgaatacaagaaatttaaaaatgcggcaaaagcgataactgatgcagtcgcacacgaagaggtaatgaccaaggctcattatacaaaaatgaagctggattatttaagagagaaatacagaaattttgaaatagaagaaataaataatcagtttacaaatgcgaatttggttgatacccgaataattacaaaatatgcaagagcttatttgaattcgtatttcaataaagtaaatgtggtcaacgggaagataacagatactttgaggaagatatgggggctgcaaggggaagaggaatctaaagacagaagtaatcatattcatcattgtattgatgcaatagtggtagcttgtgtagaaaaaggtacggctaataaaatttcggaactttatcataaatacgagaatgattatttcagaggcaatgataatccaagaattcacgcaaaagagccaatgaataatttcgttgagagattgaaaaacttgcataaagaagttttggtttatcataaacaaaccgacagaataaaaccattactgataaatgctcaaaatgagaatgttcaaaaattaaatttaagaggaaggctaaatagtcagaatccgtatgcacatattaagaaaaatgatgagctgatttttgctcaacgaaaaccaattacaagtatagtaggtagtgatattgaaaatatcattgatgaaggaattaaaaagagattattgacttatgctgatttaaaaggttgggaaaaacttatggaaattcaagctgatgatagagatgaagttgttgaaaaacaaatcgagttgaaaaagatagttgtttttaggctttatgagaaattaaaaaaggataagaagaatgagtctttgataaaaagaagcattgtaagggatgatgttgagattgatttttttgattcaaattctttaattgatgttgtttttaaaggttctgttatagaaaatttagatgaagctaaaattggtctttttaaaaataagatagtaaaagaagtcaataatttaattcgaagtaaaggtcttgaaactcttttgaaagaaagcgaaggtgtaatcgttctaccagaatataaagacgagaaaagtggcaaagatatttcaaaaatgattcttaaaagaattagattgaagtcctcaaaatcaaatttgaaagattataaaaaaattagagaaattgatagaaaacaaactgatgataataaattcgatcacaagcacgattattattttgataaagaatcatatactaattatgaggcaagaatatatggagatttggttcctaatgataaaggaaagtttaaaaatagagaatataaagtgattaatcatcataatattgtaaataatatatttgaaaaagagagtaataactccatattgcaattacatcaagatgatatgtttcttgtgtttgatttgaaaccaaatgatgaaattaattggaaagatatttttgatttacaaagcagactttttaaaatagttaagtttgatgaaaatgggataattgttttagtaagacataattatgcggggggaagtgttgattcagctccagcaattaaatcagaaagtgatttatcgaataattctcaagttgttttaaggagaagtccttcaaccttgagaattattcctgtgtgtcttgatactttaggtaagattgatgttggttttagtaaggattttgtggatttgaacagtaagtaaaattttaattcaacttcaaaaatttggtataaatttacaccaattaaacaactagtattatggcacgacaaagtatcactttagccaatcaaaacgatgaatggttaaaacaacaagttgccaacgaagaatttaccagcaaaagtgaagcggtaaattatttaatcaagcaagctcgtgatcgagatgagtatgttgaatttgttcgaatgaagttagatagagctgaaaaaagcggatttagcaccaaaacaaaagaggaattattagcagaaattaagaaaaaactaaatgtttagttataaacttaatatacaagcagggaagatttgactcgaatttttgaatatggaattggtcgtttcggatttcttcaagttaataaatattatgaaatgttttttgattgcttttcaaaaatcgcatcaaatccatatctatttcctgaagctattcgttttcgtcaaggttatagatattgtatttgtggagtggatactatttttataaaattaatgccaatgaaatagaaataatggcaattataggaagacaagatttttaaaggttctttgacatacagtttttcattgtcttaaacagccaaaccacaactgaaaggtatggcatccgcccagcagggatgcagtagctttcagttgtggtttgattaaagattagaaaacacgatattttcaattccgaaattaaagcattggctgatgttgtggtttgattaaagattagaaaacacgatattaccttacaggtatcaaaaaagcatattagggttgtggtttgattaaagattagaaaacacgatattttggcttaggggtttttgcagcattaggcggttgtggtttgattaaagattagaaaacacgatattcaaatggacgctgatgacgattgggaagatgttgtggtttgattaaagattagaaaacacgatattaaactagctgaaatgattgatcagtatccgttgtggtttgattaaagattagaaaacacgatatttttcgcaatgcaattatagttgaagaagccgttgtggtttgattaaagattagaaaacacgatatttgccgcttgtgaagcagttataaaagtgtcgttgtggtttgattaaagattagaaaacacgatattttcaaatatgttatcaaatatattgtggagttgtggtttgattaaagattagaaaacacgatattttcaaatataacatacagtacaacaagtttgttgtggtttgattaaagattagaaaacacgatattaatgtgaacacaatgttcactgaattgtacgttgtggtttgattaaagattagaaaacacgatattggcgttcttttagtacggacgattctatgggttgtggtttgattaaagattagaaaacacgatattttttttgactaattaggaacatattttattgttgtggtttgattaaagattagaaaacacgatattcaaggtgggcgaattggtatcgctaaagcgttgtggtttgattaaagattagaaaacacgatattgatgtttttatattatagggggcaagggggttgtggtttgattaaagattagaaaacacgatattcttacattaccggattgaaaaccgatatcggttgtggtttgattaaagattagaaaacacgatattgatattgtcataggccgtaacgattaccaagttgtggtttgattaaagattagaaaacacgatatttaaccatttcaggaccattctcggccacaagttgtggtttgattaaagattagaaaacacgatattgtttcttctacagctgtagctttaaacgttgttgtggtttgattaaagattagaaaacacgatattgtaaactctttccatcagcttgctaccgttgttgtggtttgattaaagattagaaaacacgatattaaagacacgccgatgtcgaatgccgttcgggttgtggtttgattaaagattagaaaacacgatatttattgaaggcacttcaggtttagatttttcgttgtggtttgattaaagattagaaaacacgatattaatatctcagcgaacgatttattcacatttgttgtggtttgattaaagattagaaaacacgatattctgattccgcatctattttatatactacatgttgtggtttgattaaagattagaaaacacgatattagtcgttatatgttaccagtacacgttctggttgtggtttgattaaagattagaaaacacgatattggctgtcatcataagcgtctgagtattttcgttgtggtttgattaaagattagaaaacacgatattagttggcttgttaccttctaattatcaaaggaatatgggtgaatgtcgtataaaaaaatgcctcttttttggattgatatcccaatattgaggcatttttttatttctatcaataaaaattcgataaatggtagtagaatcatagtaagaggcaagattcaatgattaatttttagtgcaatctgcagggacaggtcgcgacctgtccgtacgttatccaaatgcaataggtattggggattatccgcaaaataatttatatttttttacgatttgtgtgtagggtaggaaatgttgtttagggaatgtgaatagggcaggaatagggcagggacaggtcgcgacctgtccgtacgttagagattagtcgcaaaataatttatatttttttacgatttgtgtgtaggataggaaatgttgtttagggaatgtgaatagggcagggacaggtcgcgacctgtccgtacgttagagattagtcacaaaataatttatatttcgttacgatttgtgtgcaagataggaaatgttgttttgagaatgtgaatagggcaggaatagggcagggacaggtcgcgacctgtccgtacgttagagattagtcacaaaataatttatatttttttacgatttgtgtgtaggataggaaatgttgttttgggaatgtgaatagggcaggaatagggcagggacaggtcgcgacctgtccgtactaattatgaaaaagaaaaaataatgaaaaatagaaagcgaaatagaatgctgggatatgattagtcgcaaaataatttatatttcgttacgatttgtgtgcaagatagaaaatgttgttttgggaatgttaatacggcaggaacaggtcgcgacctgtccgtacacgagccaatgaatccgtatatggaatggaatgaatatggttctattgcacaaaaacaatggaattggttggataatcagtatgcgtatgtttttttacattcttttatagtaatgccgaatcatgtccacgcaattttggaaattgatagtaatttgatatctgattgtgaaataaaaataaaatcagtatcggaactaattggtgcttataaaacgacctcatcaaaacaaattcatttagccggtttgtctgattttgcctggcagcgttcttttcatgatcatataattagaaacgatgggtcttatgaaagaatttataattatatcgaaacaaatcctgagaggtggaatacagatgcgctttttgaaaaataaaattattgtttaaaacaattccaactgtgttggggcattactattttcctgtttggcttttcctaaatagttgataatcattccaaattgtttgtcggtaatacgtaaaacactaacttttcctaacgaaggaacgagtcggttaatgcgtttttcatgaacatcagcactttctccactcgcacaatgcctaatataaactgaaaattgcatcatgctaaagccatcttttaagagatttcctcgaaactgagaggcattccttttgtcttttttagtttcagtaggcaaatcgaaaaatacgaacagccacattattcggtatccgttaagttccataatttaggatatttaattttttttcggtgacctgtaaaacagtgctggagcgaactagccgttttttgcaatcctaccattaaagggcttttttcttctttgaaataaacagtttgtgtcagcatttgtaatagttccgcttttattgcggtgtttagttcttgttcttgataccggttcataatatcaaaaactttttcgtcaacaatgggacgaaaaggttccataatatcatcagcaagtgcaaaagcattgtatttacttttatgatgaataccaagtgtattcaataatccgcttccggaaagtgctctagctgtagcggctcttaaaatagcatacccgtagtttaaaaaattgttgggataatcaccataacgttctctttttatgccattttttgcatgattaggtaacggaaaatttttccaatattgttgtgcagcaacgccttccatatttgtggtgtcaccgcttaatactttgctagccagaaactcaaacgtatttttattttcagttatttttgctaacaattccccttgatttttaattttttcaataatagtttgttgccatagttgttttttcagaggaattgaagcttcgatttgatttttgaatatttcctgctgaatgtgatggctgttgaggttgagtaacattccattgggtaagtggttgctaccacaaataataatagcagtattattttctacaattaagttcatagcaggaatactcagataaatttcagcatgatcgagtaccagaaaaccaatgtcttctattggaatggtactttctcttatttctgattttagtattagctgttggttttttgtcgtgattgaggatttattttcgataagaattgttcttttgatcataatttaagccgttaaattaattgcaaatatttgattatcaatcaaattaacatatttaataatcagttattttacgggaaacctcaatctgccttttaaattgctgatataaaaaaagcgtctcgttttaaaacagtttgatgctgttttaaaacgagacgacctaaagaaattttaatactaattatttagtttaagcgagagttaaaacaataatcttgattacgctcgatttgacaagaaataaacttcttagttatttattccaaatcttccacgctttctctgcttgaaaaataagcatatccaaaccatttttgatttgtgctccttgctgtttggctttttttaggaattgtgtttctgcaggattgtaaatcaagtcaaatgcaatgtgctttcctgtgaaaaactcatacgggatcaatggaaacgcatccacatttggacttgttcctactggagtcgagttgatgatgatttggtaattgtcgaatgttgttgcgttgattcggttatactcaatcgcattttctttagcttctctcgacacaaaagtataaggaatgtccagttcatccaaagcaaaagcgactcctttagaagctcctcctgtgcctaaaatcaaggcttttttgtggtgcggttgcaacaggggttctaatgattttttgaaaccataataatcggtattataccctttcaacgttccttttttggtaattttgatggtatttacagcgccaattaattccgcttttttagataatttatccagaaacggaatgacggtctccttgtatggaatagttatacttaacccttttaaatttaaagtgttttttagtatctctggaagtgctgttatttctggaatatcaaaattttcataggtgcaaccagtaaaattttcattgttaaatttatcggtaaaatatcctttagaaaaagaataactaatattgcgacccagtaacccaaaacgttttctaactgtttctgtcattatttttttttatgttttgcaatgtagttttgcaccatttttttggcccaaactactggaaataaatcttctaaaaggatgtaattatcaaaatttaatcgtaaggcattgcttaaatggaattttgcttttgtattatctgttagcataaaatacaatcctgctaagcggtattcaacttcattttcttccggaaaatattctgaagcttgtaataaggtttgaatggcactttcgaattctcctaaaaattgtagaatatccacccagaataaccaggtgtcaagttcagtatcgccaaattcaactgctttcctgtatccaaattcagcttcttcaaagaagttcatttgcttattgatagtcgcaaagcgtttccaatataagcgattttggttgtcaatcgctaatgctttattgacataaaataatgctttttggtaatttttttgacgtacgtaaaagtccgtgatggcaatccaacctttatctaagagtggatcttcatgcactgtttgattgaaatattttaaggctaaagctttgtttcctaatctttcataacattttcccattcgaagtaacgcatacgaagttgcatcatctaattcaatggttctgctataactttctatggctttctcgtatttttttaatcgttcaaaagcttttgctttttccatgaaagcaccaaggaattcatcatcaattaaagtagcgtaatcaaaggcacgaatcgcattttcatattcttttacaccataatgcaaacggcccagttggtgccaggcaatttcgctgtatggatttttgtcaatgtatttatttaaataagtaatcgcttcttggttttgatctaaaaattcaaaacaatacactacgttatacaaagcggattggtcttccagatcttcttctaaacacttgatgaagctttcttttgccagttcaagattgtccataaaaagatattccatgcctattaaattatagacatcagcataatcatctgtgtattttaacgcggtttgtaataattcaaccgccttttcgtgttggtctcttttggagcagatattggctttttgaatgtaaatttcttcattggttggttcaatggcatacaactcgttcaatagcttttcggctagttcgagtttgtcgtcataaactagcatttccacctgaactaattttagtccggtagattttgggtgctgttctaatgccagtttgagtgctttttttgctaaagcggccttacccatatcgaggtaatgaagaataatttcttcaaattcttcggagtcaaaaaagagtactttgttggttttcaacatggactcaaatttagacaatgataagttatagtcttcttcttcgttgcttaattgcatactgtgtgtttttaatttggcctaaataaatttagggaatcgtgcgtgtactgcgagggaaagttggaattgttgtgaacaatttaattaacaaaaaaagaggtagtttaaacgtatgccctagccctgataagagtggaaatccttttgctttttgctgacaaaaagtaaaagattaaaacggatagcaggaatagctcccaatttttttaattgttttgaataggtatttcaatatgtatccaatagtacaacttctgctatcaaaaatcgttaatcatttttcttcaatcattattccatccattacttctaatatgatgctgcaaccttctcgtatctcttgttcagaaatggtaagcggtggcgtaattcttatggcgcaatcttcaaataataaccagaataaaatgagtcctttgtcttgacatttaagaatcacttcgtttgttatatcggcactttgggtcattgcagccagcatcaatccttttcctcttatatcctgtatcaaaggatgtaccaaaagtgatctgaatagcttttctttctctatcgcctcatccatgagattggtctcggtaatttcctgcaaagtagccaagcaggctgacgcaatgacagggtggcctccaaaagtcgtgatatgacccagttttggattatcgctcaacaaatccatcattgctgatgaagccgtaaaagcacctacaggcatgccacctcccattccttttcccataactacgatatcaggaacaacatcataattttggaatccaaagagttttccggttctcccaaagcctggttggatttcatcgagaatcatcattgcgcccacttctgtgcaacgctcgcgtacttttttgagataatcatcgtttggctgaataaatccggcaccaccttgaatggtttccagaataattccagccgttttagtggttattttttgtaaatcggcttcgttgttgaaggtaataaaatcaacatcaggtatcaatggacgaaaaatttgtttgcgttcttcaaatcccatgacgctcatagcacccattgtattgccatggtatgcgttatgacacgaaatcaattggcttcttccggtagttcttctagctagttttaaagcaccttcaatggcttcggttcctgaattgaccaaataagttttatctaaaggtgcgggcaggagcgaggctaacaatttgcaatactgaaccgccggactttgtgaatattcgccatagaccataacatgagaatatttgtctaactgatcctttatggcttgattgactctaggatgttggtgtcccaatgtgcatgcggaaactcccgccacaaaatccaagtatttcttagcgttcgtatcgtaaatataagaacctatagcatgtgagacttccatgcccaatggatatggtgaggtttgcgcttggtattttaagaaatctggattcacggttatttgtttaatcttttatttgttaaattgacagaacggtgattgaatactgctcccgaagtgtcgggactgctcactgctgacttacttcttcttcttcttcttatcgtaattcagggtttcttttcggattttcataggaatatcctctttggcctctgccgctttagttgctttatctattttatcgttgtcttcattttcttcggcaggaaaaatatcgtccttggattttattcgttcctctcctcgccaaagcagtcctcttagaatacgtgcattttctggcaactctttctctggataaatatcgccatccacttgctggaaaaacgtgatagtttctatcgcattttcttctaaaataaggttgattttgctgcttacattcttattaataccaatgagttcctgagcttcgttgcgcatgtaataaatgacttcggcattctttataatatcaacatcatggagttttccttctttaaatttcccatagagattttgacccttgacttgattgtatccagttcctatcgtgtctttggagactataaacgtgttgttgagtactttgagcgaatctagtttttgggtattgttgtctcctatgagatgcatgacatctcctgtgatttggttttctgcgttccaaagtatcggatttccaatcattttggtcaacgctgttttagaacttgaatgaatcgaatcacattttccgctcatatcagttttgaaaaaccggacattgttaaacgctctgataattcggtttccttcttttccagtaaccattaatttttttccatggatgtaaaccgagtcattttcgacaaaattcacggcaacagctcttttggttacgtacatagaatccagttttttatacacttcagcataatgcccttttataattccgcgattgatggaatccgttatttttacgtttcgcgttgccgatgcaaattcccggtttcgatcatagtacaaactgtcgcctttaatcacccgatcatcgtatttgatgtacgatttattcaggaaatgagccagattttttttggtatcataaaatcctttttcggtatatatataattggctttactggtaattgtggatggtccaaaaagatacgaatgcccggaattactgaaataatccaagtgatttgatttaattacataggttggattagtaatagtaacagctgtaaggaattggaatttcttttgtttcacataatatcttcctgaattgctttttagcgtattgtctttattggtaattgttcctggc

SEQ ID NO: 4441 - DNA, 24569 bp, synthetic construct
  misc_feature 1..24569: note = Synthetic
  source 1..24569: mol_type = other DNA
ataagcgttggtgtcttagtagtttgtagctctttatgtattaagacagaatatactgagccatttacttctacgtcagcaacattaccttcaattttttttatatcaacgtcataatcatgaccttgtatcgtaaatttaaatttcttcataaatattattttccaagattatacacactgtaaagtttagaactccatggagagtatttttttgttatttttttcattgttataatagcgtcttctttatcgtgcatttcgttaaaatgtaaatgcaatgccaaactaattgcagcactcacatctgccggaatatgcaaatcatctgattctgctaattcaatttttccttcttttcttaatctatttctaattggaatattgattaaaatcggaactaaagaaaataaataaaaaaggataatcaatgaagcgaaaacaactcccataccgacaatcgcaattatgacatgttcgcttgttatggctgaataatcaaatttaatttcacacaacatctttttttattttataatggtaaattacaatgttttttaggcggatttgaatctttctttgttgataatgtttgtaaagcccttgtaatcctaaatctagtatttctaggctcaattacatcatcaatgtatccaagttttgcagcttcgtagggatttgcaaatttgtttacatattccgattctttatcggcaataaacttcaacttatcctcaggtttttcaatgctgcttaattctttgaaatacaacacttcaattgctccttttgcacccataactgctatttcagcagttggccatgcataatttatgtcgccacgtaattgttttgaactcattacatcgtgtgctccgccatacgatttacgaagagttatggtaacttttggaacggttgcttcaccatatgcaaacaataattttgctccatttgtaataatcccattatattcttgaccactgccaggtaaaaatcctggaacatcaactagcgttacgattggaatattaaaagcatcgcaaaatcgaacaaaacgagccgcttttttcgacgcatcaatatcgagaactccagccaataccattggttgatttgctaccattccaacaggcattccattaaatttagcaaacccaacaacaatatttcgtgcataatgcttgtgaacttcgaaaaattctccattatctactacagcatcaataacatcaataacattatacggtttgtttgcactgtctggaataatctcgtttaacgaatcttccaatcgattaataggatcagaacattcggttactggaggttcttccaaattattttgcggaacgtaacttattagtttacgaatcatcattattccatcttcttctgattgcgaaacaaaatgacaaaccccagatttcgatgcatgaacatttgctccacccaattcttcgtctgtaatattttcgcccgttacggtttttgtaactttaggtccagtaacgaacatgtaactatttttttccgacatcaaaataaaatcggttaaagctggcgaataaacggctcctccggcacaaggaccgaaaatggctgaaatttgtggaatcacacctgaagccataatatttcgttgaaaaatttcagcatatccagccaaacttgcaacaccttcttgaattcttgctccaccactatcgttaattccaattataggagctccaactttcatggcttgatccattactttacaaattttctttgcatacgattcggaaagagaacctccaaataccgtaaaatcctgcgagaaaacatataccaatctgccatcaattgtgccatatccggtaataacgccatccgataagtatttttgtttatctaaatcaaaattcgtacaacgatgcgttacgaacatatcgaattcctcgaaactaccttcatcaagtagcatttcaattctttcgcgtgcagtaaatttacccttagcgtgttgtgcatcaattcttttttgacctcctccaagctttgcttgaactcttaagtcaattaattgattgattttatcttgattactcatgattatttgataagtatgttaatttattttttgtttttgtcttcgcatatttcaataagaactccaaatgtcgattttggatgtatgaaagcaatatcgagcccctctgctccttttcgtggcgttttatcaataagttgaacccctttttcggctgtttcagtcaacactttttcgatattatcaacagcaaaagcaatatgatgaattccctcgccttttttctcaacaaatttaccaattggtccttccgaatctgttgattcaagaagttcaattttagtttgtccaaccataaaaaaagcagtttttactttttgctctttaacctcttcgacagcataacattttaatccgaaaatattttcataaaatttaatcgattcttccaaattttttacggctattccgatgtgttcaatatgttttggcttcattgtaagtagtttataaaattgtaatgcaaaagtatctataagacgagctttaaatcaatgataaaaaacataaaaagcacgaattgttgaacaacataaaatattagtgtttataggctttagggattcatttcaaatgaaacaatgtgaatatatacatttctataagcacataataaaaaacgagatttcatactatgttgaaaacaaaaaattatgtaggtttgtaagaatttaaaattgaaaaactattttcaacatattatcctttttagcaaaagaattgcatttttgctaatcttattttcgataagcaggctttacttttttgtattgaatttcagttatttcgaaactgtaggtttttggagcatactgaaaagttttttttatgggcttcgatttgatattgcggccataacatttttcaatagtttgttcattgttttgcacactattccaggaaattttaaaagttataaaacttaccagcttgtgctatttattctttttgttttcgttaattctatacttttgggaactaactttattgactctgaatattttagctatacaaacaaaagaatgtcgtctgatattggtcaattgattagtttaggcgacgattttaaaaatcttattcctgcttttttaaaagacttttggtacacagtagtggcatttattgtgttaatattttttagttgtaaattttatcctaaacaaaaggtattcgaaaagtcgagcttgaccattaaaacatttgtattccaatttttaatttttgcgtttgtaatttcaatttcttttgtgggttttagaggcattgagttaagaccattgaataacataagtgcggcaaaatatgttcgaagtcaaaccattcccttggtattaaacacgccctttaccatgcttaaatcgtggagcaaagaaaatttgaattcggtaaatttttattcagaagaaaaattaataaacattttttcaccgataacaactccatcgcaagaaaaaaaattcaaaaggcttaatgtagttatcatcattctcgaaggtttttcttcggaattcattgggtttatttctcaagaaaaatcatttactccatttttagattcgctttttgcgaaatcattggtttttgaacatgctttcgcaaatggcaaacgctctattgaagcactgcctgctatatttgcaggaattccttcgtttgccgataatccatatattacttcaaaatactcaaccaataatataaagggaatcggaacaattttaaaagaaaaaggttacaacacttcattttttcatggcggaataaacggcactatgggatttgacgcatttgctcatttggcagggtttgaaaagtattatggattatacgaatatccaaataaagcccattacgacgaaacgtgggggatttacgacgaagaatatttacaatattttgctaaagaattaaccaattttcagcaaccatttttatcttgtgtatttacgctttcgtcgcaccatccttacaatattccgcagaaatacaaaaacaaattcccgaaaggcaacaataaaattcacgaaagcataggatacgttgattattcattggagcgtttttttgcctcaatttcaaaagcagattggtttaaaaatacactttttgtagttaccgctgatcacacaccttattcgctcaataaatattattcgaataaactaggctcttattcaattccaattgtatattatatgcctggagacagcttattaaagggtaaaaatgccaccattactcaacactgtgatataactcccacaattttgggtttactcaactacaacgaacccatattttcattcggcaaaaatgtgttagattccgcaaattcggcttgtgctttcaattataattcggttttgtatcaactaatcgaagaagactttactttattatttgatggagaaaaaagcaaatcgttgtacaaaatcaaaacggataaacttttaaaagaaaatttaatttcgtataaacacaaaacgagaattaatatggaaaacaaacttaaagctattattcaaacatataacaaccgaatgataaacaatgagttgatttataaacaaccaaacgagaaccccgaaaattagtaattcgtttatttgctcatttgttgataatcgaatcaccaaaaatacaaagagaacaaatatttttaataaatatattaaaacataaaaaaatctgaattaaccttatgctttttatttatcatatacttgatttttaatcatttattgtttattaacaatgagcataaggtcgaaaaagtatttaaattttaagatttttaaaatcaaagagttttaacgttcgtcctttctatttttctgttaataaaaatttaatttattttctgctttattttcttaaatttgagttttataagtgtttccaaaagaacttacagtaaatgtcttgaatatgaatagattgcttttaatttcattaacactgtgtgcgtttttattctccgattttagttttggaatcgaagctaatagaggaaaagatggcgaaaatgactatttccttatcaatatgactcgaggtagagttaaacaaaacgaggaagatttccgtggtgcgttgcgaatttatactgagttgtacaaaacaaatgctgaaaatttgcaattgaattaccgaatgggagagtgctatgtatttataaaagaaatggataaggcaattttacatctcgaaaaagttattgctaacgataccatcgataaaaaaaacgcatatttctatattggtgaagcatatcagtacgaaggcaaaattgacgatgccaaacaagcatttttgaatttcaaatcgagcttgtcagaaaaacaattggaaaaacatcaggttaacgatttgtttgcacaatgtcttacggctcaagaactgattgcaaaacctgtaaatgtaaaaattacaaacttaggcgacaatattaattcaaattttaccgatgcttgcccatcggttagtgcagatggcaaaacgctaattttcacttctcgtcgccctgaaaataccggaggattgatagagccaagtaacgacgaatatttcgacgatatttatatttcatcgtgggacaatgcaagcaaatcttggactaaagccatacaaattccaggtaagataaataccaacgggcatgatgcaaacactagtatttcgcctgatgggaaaaaagtttttgtgtacaaaaatgttacaggcgtaaccaaaagtggcgatatttatgtctcaacaaaagaggacgatgttaattgggcagaacctataccggttgatgaaaaaaacgtaaattcaacctatttcgaaagttctgcctgcatcacagcagatggaaataccatgtattttgttagcgaacgactaaaagacgggtatggtaacggtgatatttatatggcagtgaaggaaggaaccgcttggggaaaaccagtaaatttgggaagtattatcaataccattgaagacgaaatcggagtttttgttcatcccgacggaaaaacacttttctttagctcaaaagggcacaataccatgggcggatacgatatttttatgtccgtttttaaaaatggttcttggtcgtcacctataaacatgggatatccagttaatacaaccaaagacgaaattcattttgtactttcaactgatggtaaaactgcatatttatcaagcacaagaagtgaaggaaaaggaaagaccgacatttattcggttgatatgagtaaatattacgacgagaattcaaaaattgacgaacaaacgacaaccgttttgtcgggtcctgctttatcaattataaaaggctcggtagttgatggcgaaacaagcgaaccaatacaagttgaaattataatattcgatgctgacgaaaataaagaagtaaccaaaataacttcaaatgaaaaaggagaatattttataacacttccagctgagaaaaaatatcagtttgttgtaaatcaatcgaagtacaagcccttggatatcaaattcaaacttccgaaaggagttggagaaacatacactatgacgaaacacttaattctaaacaaaaaatagatagtactatcataattgaaacgatgtgaaattcacatcgtttttttatttaataatgttcattctaatgtttaaatcgatgaaatatttacttgtacttgcatacattgcattgtcgttcaatatgttttctacagaaaaggttgtggtttataaatttgatattaaagatcaaatcgaccctcgtaccagccgaattacattgaaagcatttgccgaagccgaacgacttaaatgcgattacatacttattcacatgaatacttacggcggaatgctcgatgcagcagattctatccgaaccaaaatattaaacagcaaaatacctgtttttgtttttatcgacaacaatgctgcttctgctggagctttaatttctattgcttgcgataaaattttcatgcgaaaaggtgcaaatattggagccgcaactgttgttgaccaagaaggcaaagttttgcccgataaataccaagcctatatgaggtcgatgatgcgttcgactgctgaatcgcacggaaaagatactctaatcaatggaacagataccatttacaaatggaaacgtgacccaatgattgccgaagcaatggttgatatggatatttatatagaaaatattatagattccgggaaggttctaacatttacaaccaacgaagctattgcaaatggatactgcgaaggaaaagccgaaaatatttcagaagttatttcagaattaggcattaaagattacgaaatagttgagtataaaatttcaacgctagaaagcttcattttatttcttataaatcctgttgttcaaggcattattattatgataattgtgggaggaatatatttcgaaatacagtcgcctggcatcggacttccggctttggctgccgttggtgctgcaattctgtattttgctcctttgtatctggaaggacttgccgaaaattgggaaatattaatttttgttgctggcttagtccttgttttgatagaaatttttgctatccctggatttggagttaccgggattagcggaatcgccttagttgtaatagggctttcgctgagcatggtcgatgattttagttacgaatatcgcccgcttaatattgagatagtgtttcgtgcctttttaattgttacagtttcaacagtaatatccttaatattatcgatatacttgagcagtaaaattctcacttcgtcgcgatttagttatttggcattacacgaggttcaaaacacatctgatggcttcataggtgttgaaatgaaacaacatgaactaaagggaaaatcaggcatcgcttacactgtattgcgaccatcaggaaaagtaatgattgatgatgaaacctacgatgcaatttcggttgatggttttatagaaaaaggaaccaagataaaagttataaaatacgaaactggtcaaatacaggttgttaagttgattgagtaaaataagtctcaaaaatgattttaaaaaaacttatttacggcttgttcttaatttccattaatgcattttcgcaaccacaaatttctatcgataatgtaagttttcacattgaatacttagcttccgattctatgcgaggacgctatccaggaacacacgaagatgaagaagccgcaaaatatatagcgaatcagtttaaagcgtctggattaaagctcttggctgataacgggtatcaacatttcgatattaccaccgatttgttttacgaaaagaacaatacactttcaataaaaaaaattaatgttgaactttttttcgattatattccagcagctttctccgcaaacgattcgttgacaagtcaagtcgtattcgtaggttatggtattgatgatgagtattcgggttcaacatggaacgattatgaaaatatttcggcaaaaaataaattacttatcatcattgaaggcagtccacgtagtagtgcaactaatttagatgtaaatatttcaatctacgataagattgaaattgctaagaaaaaagaatgtgcaggaattttattcgtttcgggaaaagagcaaaatccaatagacaagcttcctcctatttacattttgcccggcacccatcaagaaaaaataccaattgtttacattactagaaatatagccgataaacttttgagaaagaataaggaaacgattgaacatcttgaaaaaaaaataaatacagaaaataaagcccattcgtttgaaacaatgtcaaacctatctttagttaccaacattcgttacataaaaaaaagcactcataatgttgttggtctgctcgaaagcaccgatagcattatgaaaaaagaatatattgtagttggagctcattacgatcatcttggaattggagggattctttcaggctctagaatgcccgatacaattgccgttcataatggagctgatgataatgcatcaggagttgccggaataattgaattagcaaaattcttaaatcaaattaaagatacgcttcgtagaagtattgtttttatcgcatttagcggagaggaagaaggcctaatcggatcaaaatattttataacaaatcctttgattccaaaagagaatattaaatcgatgttaaattttgatatgattggtcgatttgacgaggaaaataaatctttcgtgcttggtggagctaaaacggctgtagaatatgaatttttactgaaagggattatgacaaatactccgattaatgtacaattaatacccgaaggaactgccccatctgaccatgtttatttttatttagacaaaattcccgtattattttttcacacaggtttgcataatgattatcacacaccatttgacgatgcatccaaaattaattatgcaggaattgaaaaaattcttgattttgcgtcagaaataattatcaatttatcgagaaccgaaaaaattagatgttctacatactaaattaaaaacatctagtaaaagagcttcatttcagctggaaatgaagctcttttgcttttgttgaaacaacaaataattcggtatagaaaaacccaattatcgtaaaacaaaaagtcccaccgaagcaggactaaaggttttcacctacggcatatagccttattgtggtaagattaaaatggaattataattttgatattatattttttaagactaaattgaacttgtaaataaaaacaacgaacccccagtaaactgagggctctaaattttgtcaccttgcggatcattctacggctttgtcttttggacttcgccttattgtgatttgattatgacaaatgtaaataatatttttgagtaaactacttatggtatgagaaaaattaaactcggtctcgatttaggaactaacagtattggttgggctgtaattgaaaaacaagatggaaaatatgattttcttgaaaaattagataaaaatggagatttaattccaaccaaaggaagttatatttttccaaaaggagtaaatgccgatgaaaattcaaaagcagcagaaagaacaggttttagaggagcaagaagacgattagaaagattaattttaagaaaaattgctactctaaaagtacttaatgaatttggattatgcccaaaatttgaagaaaatgagttgggaaattggaaaaataaaaaaatatatccttgcgaaaatgaaaaatttatagattggcaaagaaccgggaaaaagaatggaaatagagaaaccgaaaaattaaaacaaccatattatttgcgacatttagcagcaacaaaagatggtttaatgaatagtgaacaagggaaattacaacttggcagagctttttatcatttagcacaaagaagaggttatctttcaaacggagaagaagaacaatcagacgataaattagaattattcaaaacagaagttagaaaattgcttgaagaaacaaatgattatacttcttttaaagaaccgtttcaagttttattagataatagaaaaagcgataaagttgtaaatacattaggaaacaaaattattaaattactgaaaactgagattaattttgataaaatcaaagattttataattacagaatttgataaacccgaaaacttgggcaaagtaatgaaatctattggggagctttccgataatattaaaattgctgtgaaaaatggtgaatgtgctccaacaatgggaagttttttctattcaatttatgcaaaagcagataaaaaaacaggtttgattactaaattaagaggaagatacacgcatagaaacgagcattatttagcagagtttaattacatctgtgataagcaaaatatcgaaaaggatttaaaagaaaaacttcatcacgctattttttatcaaagaccgctaaaaagccaaaaaggaatggttgcaatgtgtcctttagaacccaaacgaaaaagaatagctatttcacatccactttttgaagaatttagaatgtgggaaagtataaatagaataaaaataggtagagaaaaaacaaaattagattttttaacgaaagaagaaaaagaattaattaaaccattatttctgcaaaaaacagatttcgattttgttaaaatagcaaataaattaagcggtgaagaaatgtattgctatattaaaaaaccacaagaagttttttataaaggaaatattattgagggtggcgttgcaaacatattttttaattttccattagataaaaagttttctgcttgtcctactatttctgctttatcaaagctattgggtaaagataaatacaatgaaataccgtttttaaatagtggatacaaagatgaaaaaaacaaaacacaaataagtgttgaagatatttggcattgtttgtttttagatgattttggaaaaaaagacagaaatacaatcagaaaagaatttgcagaaaaacatcttaaacttgatgaaaaaggaattgaagattttcagaaaattaaattggtaaaaggttatggaaatttgagtaaatcggctcttaaaaaaattgttccttttctcgaaaaaggagaaatatattctaatgcagtatttttagcgaatatttcagaagtgcttaaccgaaaattgtctgaaaatgaacaaaaaatagtttctgaaaaaataaatgaagcaattaatattcataaccttgaaaaacaaaacattggcattgcaaacaattacataagcaaagtaaaagaaaataaagaaagccttggaaacaatgaaattagtattgacgcacataaaaatggaataaaaaaagaaataattgaatggattggagaaacggaatataacaaattaaaacctgaagaaaaagaccaactttttaaaaattgttgggataaattttcgcttgtttctttagagaaatcttcaaaggaagtaatttacatttcaactaaaacaatacccgaattcattcttgacaaacttacagaagcttttccaaaagataaaattgatgtttcaaaattatatcatccttctgcaatggaagtttataaacaggtggataaaaaattaggaaaccccgaaataagttcaataaaaaaccctgtttttaacaggtcaatgcatcaaataaaaagattgtgtaacgagttaattaaaaaaggaattgttgataaagatacagaagtgaatgttgaagttgcaggcgaaataaatagtgcaagttatagaaaagcaattgctctatggcaaaaagaacaagaaattattagagaatgggctcgaactgaaattattaatacttatcctaaagaatgtcaaaaagagataaatccaacggatacagatattataaaatatattttgtggaaagagcaaaatcatcaatgtttatatactagttataaaccaatatccatttgcgattttcttgatggtaaaacaacttatgatatagaacatacaattccaagaagtaaatatcacgataattcattatcgaacaaaacacttgcaaatgctgattttaaccgaacaattaaaaaagatattcttccaggtcttttaaatacaaactataatggagaattaataaatatagaaactataattagaaatagagataaaaatctaaaatcatattcaatttcaagtcaactacaaaaggttagtattcaatggaatgttagtctttggagtttgaaagaagaatataaaaaatataagaatgcagcaaaagcaattacagacccaatttctcacgatgaagtaatgacaaaagcacattacacaaaaataaagttagattatttgagcaaaaaatataaaaattttgaatgtgtagaaataaccaatcaatttacaaatgccaatcttgttgatactagaataattgcaaaatacgccagagcttatttaaattcatattttaaaaaagtgaacgtagttaatggtaaaataacagaaacattgcgtaaaatgtggggtttagaaaaagaatatgaaataaaaaatagagataatcatatacatcattgcattgatgctgtaactgttgcctgcgttgaaaaaggaactgcaaatttgatttcagaagcttttcacaattacgaaagtgattatttcaagggaaataataatccaaaatacaaaattaaacaaccaatgcaagattttgccaatagaatgcacaatcttcataatgaagttttaatatttcataaacaaattgatagagttaaaccatttttagatgcagttgaaaaaggaaataatacaaaacaaaatttgagaggtaaattaaatagccaaaatccttatgcacacattaaaaagaatgacaagcttatattcgcacaacgaaaaccaattacaaaaataagtggtggagacattgaagatattattgatgatggaataaaaattagattattaaatcttgctgacactaaaggttgggaaaaattaatggaatttactgtaaaagaaaatgaagttgctgcagaaaaggaaatagaacacaaaaaaggtattgcttttaaaatttatgaaaaaattaaaaaagatgataagaaaaaagaaatagtgatagataatattacaaaacaaaatttttcaactgaattttccgactttaaagaacttattgaaatgttgtttaatgcaacaattagatacgatattgatgaaaagaaaagagtaaattacaatgagaaaatcacaaatgaagtggccaatcttactcgaacaaaaggcttggaaatattgttgaaagaaagcgatggcgttataattcttccagagttttacgatgaaaagaaaaataaacagattggaagaatggtaattaaaaatataagattaaaatcagggaaaacagatacaaatattaagccctataaagaatataggaaaatagataagtcagagtatgattggcagcataattattattttgccaaagaacccggaagtaattatgaagcaagaatttttggagatttaattcctgatgaaacaggaaaatttaaaaacagaaattataaattaatcaatcactacaacatcgttaaaggtcgttttagtatagaagattccaaaccaatattaaaattacatcaaaatgatatgtttttagtttttgataaacactttgatgaaattgattggaattgcaaaagtgatatacaaaatagattatttgtgcttgttcaatttgatgaaaatgggataattattttaaaacggcataattgtgctcttggaattacgggtacaccaaaccctattaaaagtgaaagtaacttatcagatttgacagaaattgttttaagaagaagcccttcaacattaagagttataccagcaaaaatagatgctttgggtaaaattgatgtaaatttttctaaagcatttattgaattaaattcataagttttaattcttcgtaaaactttgtcaaagttgaacttgcaaaatgtgctgattttgattattttgcagaattagttttgataaactttgacaaagttggaaacaacacaaaacgttctttgacatataaagatgtcaaatcctaaacaaccaaaccacaacgggaaatcgttgtgcagaaattgattaagttcgatttcccgttgtggtttgcaaacgtattgtttgttttttatggtgtttgcgattgttacgctacgctccacaattgattaaaaaatggaaacataaatatttcattatttttatctgatttaggagtgtttgttgtggtttgattaaaaaatggaaacataaatattaacaccaacaccataaattggagtgatttgttgtggtttgattaaaaaatggaaacataaatattaacttgtcaacatgcctaataacacagccgttgtggtttgattaaaaaatggaaacataaatatttcttaagaatcatataaacaacacccattagttgtggtttgattaaaaaatggaaacataaatattatacaatcagaatcacttttagttgcgatgttgtggtttgattaaaaaatggaaacataaatattaattattagatatagttattaatcaatacggttgtggtttgattaaaaaatggaaacataaatattaaattagtaagtccttcaactgcactcgtagttgtggtttgattaaaaaatggaaacataaatattgtgttacgtcaatccaagttccagatgctagttgtggtttgattaaaaaatggaaacataaatattaaaacaagtattttggaggctgacagcgttgttgtggtttgattaaaaaatggaaacataaatattcgttgaccgattatttcgaagccttagagggttgtggtttgattaaaaaatggaaacataaatattaaaaatttgataatttagtctcaaaggttagttgtggtttgattaaaaaatggaaacataaatatttttttcatcgtaagttatttttatgttagtgttgtggtttgattaaaaaatggaaacataaatatttgattttgtaaacaaattaaaggagttcagttgtggtttgattaaaaaatggaaacataaatatttccgcacttaaacgtgattgttgtgcttcggttgtggtttgattaaaaaatggaaacataaatattgagcattacatcacagcaaaaggcaaagtagttgtggtttgattaaaaaatggaaacataaatattttttttctatattttaagttattaatttgagttgtggtttgattaaaaaatggaaacataaatatttcaagttggttagcgaactcaatcaatgcagttgtggtttgattaaaaaatggaaacataaatatttacgaatttttaaacagttattccgataccggttgtggtttgattaaaaaatggaaacataaatatttgaaataatgctgtactatctttaccacctgttgtggtttgattaaaaaatggaaacataaatattgtgttattctaaatcataatgataatatgagttgtggtttgattaaaaaatggaaacataaatatttttagaaacaatttatactatactgacttagttgtggtttgattaaaaaatggaaacataaatattagttgatttgtaatcttctaatattcaatttgtaaggagtaaatatttttgtaaaaaataacggtggttgagcagatttgtgatttcttctaccgttttttttgttttaaaattagcgaaatcatcggtttagaaatgttgtaatttgataaaatatattttttgaaatacgtgcggttggcgtccacataaggtgtgaacttgagctgaaatagaactacaaattaaaaattgaaattcagaataaaagcgaaagttggcttatgtggtgggtttttggttcttttttgcggtagaaaaaagaacaataaaactcggataatttgatttatgaatcattattatgtaagatgcctgtctgcacaggcatgacagaatatggagtaaatatttttgtaaaaaatagcggtagttgagcagatttgtgagttcttctaccgttttttttgtttcaaaacaaaacttggaaatttttttaaataattcgtatatttgtattgttatcaaaaattaaaaatatgacagtaaccgcaactatagatgtaagtacgcctgctggtcgcaaattggttcgtgaattggaaaaacacaagaaaattgttaaaatttcaaatcctatacctgttggagaagatggtttacccgaaaaattttatactgttgacgaattttttgatgaaatttatgatggtttgtcaaatcgatatggagttgacattcgaaaaatatgaaaaaattttcaattatattttctgaatcagcacgttcagatattaaagatattcttgattttattgaaattgtatgcaaatctccaataactgcaaaacaatatgttgacggcattcgtaaagaagttaacagcttaagcaacaaagctcacatttaccaaattgcaactcgtaaatctattttaaaatatggtcataatgcaagacgagttaactataaaaaaattgccataatttatacaattcacaatgatattgttgttataagaagagttatccctggaggaacaatttctggaatttaaattttttactctacaaattcatcggcatctcgactccgctcgatgacctttgatttcaactttaggaactttaaaaacttgataaacttttaactcaataactatggttcagacatttttccgttgtggtttgtaaacttatttgcttttgatgcaaaagtgatgtaaatttacaccacaaaaagtataattatgataaggcaaagtatttctttcacagagccaaataatgaatggcttcaagctcaaatgaacacacgcgaatattcgagcaaaagtgagcttgtaaacgatttaatcagacaagcccgaaaacaacaaattgaaattgattggttaaaattaaaattagaaaaagccgaaaatagtggctttaccgaagacacaaaagaacaaattttaaaacaatcaaaaaaattacttaatggcgaaatttagattaagtaatgaggcaaaagacgatttaatcagaatacaccattttggagttgaaaaatttggaacaacacaagccgataagttttttaattcatttttcgaatgttttgaaatcattgctaagcaaccttacgcttttgaagcagttgattatttgaaagaaggatacagaaggtgcgtatgtggttctgatacaatttatttcaaaatcaataatgaatttgttgaaataatgtttattgtgggaaaacaagatttaaagaatattctttaaaaaatgatttcaaccttcccataaaaaactttactaactttcaactttctcggacaagaatgtccaagttactcgttttttcaatttcaattttaaatatatctgaaaatatattattctttatttaaaacctttcaacttatcaacctataaactcatcaactatttccccaactttactaactttcaactttataaacttttaactcaaaaaagttccaattgttgcggagccgtttcaagtggagttgtggttttgccccaaaaattggcaatgttaccatattgtttatcggttattcgcaaaatgctaatttgtcctttattcgtaatgttattttcaattcgtttttggtgaacatcggcactttcgctactggcacaatgtcgaatataaaccgaatattgcatcattgtaaaaccatcgtccaataaaaattttctaaacttagaagcttttttgcgttccaatttagtgtttgtcggcaaatcgaaaaatacaaataaccacataattctgtaagcatttaaacgtgtttgcatttcattattagttcataaagttcttaaagtccataaagttgaaagacaattagcaattaacaattttcaattttttctcgttgccttgatacctatttgccttgatgccttttctataattagcatattagcacattcccaaattatcacattttaaatgatttcgggaaaagaaagttttttaatttcacccgcaaaacatttcgataatgatgctgttgtttgcgataaacctaacattagcggacgttttgtgttttcaaactcaacatcaaaagttaaaatttttagaatttctaatttaagttcggttgttaaatcagattcaattttgtgattttgatttagattatagaccaacaaatcaacataagggcggtaaggttccataatatcgtcggctaaacaaaaagcattgtatttgttgtgatgatgaatccccaacgttggcaacaaaccagagccaactaacgcacgagcaaccgcagctctgagaattgcataaccataattcaacgcattatttggcggatgtccaattctttctcgcaaaaaatctttaccaaaaagttcgctccaataaaatcgagcggcttgagcttctcgattggtagaatcgccactttgaacatttttagcgtattcaagcaaattcaaatattgttttcctaaaattttcaaaacattggcttgattgccgatttttgcaactatggtttgtttccataattgttttttcagcggttctgtggcttttatttgattgctaaacatttcgttttgcaaatgattattttctaaattcagcaacatcgcagttggatgaaattttgaattacaaaaaacaacagcaacgttattctctgataataattggattaaatttgttgtgaaagttatttgataattttcaagaatcacaaatccaatgtcttcaacgggaacttgttttatttcaccagtatctttattggtgattaacatttggttatttttcgaagataagtaacatggattactgaaaaaaagtgtgcgttttaacatgttttatttgttgtggtttaaacaaatataaactgttttttttattttgcgaagaaaaatatcattgactgtgagacaaatatcttttatttaaagagtatttgttcactttttgagaataaatgaatataaattaaaaaaatgcaaacagagtaatttttacattttttcaaattcgtcttttattgctccgcatgttgggcaaacccaatcatttggtaaatcttcaaacgctctgttaggctcaattccatggtttttgtctccaattattgggtcgtaaatataaccacatacttggcattcgtattttcccattttcgattctatttttatgtttgagtttagtttcgatttatcgatataggtaggagcattttttggggcaactcctttttttacttctcggtaataggcgtaagttaatggggcttcgtcggaaataagttcgttatcaactatttcgctgataaacatcatgtgtgtgcctaaatcaaactcttgcattactttacactcgaaccaagcgatggtttcgtctaacacaattggagttcctgtttttcctattttgtaatttgcattctcaaatttgttaatgtcttttccgcttttatatccgtacaatcccatggtttccgacgatgtgttttgttgcaatattgatattgaaaatgctttgctttcgcgaattaaacctaaggtaaaattgtttttactgcaacacatggcaatttgtgcaggctcggctgtaacttggaaaacagtgtttccaataaatccgttttttttgtttccgctactcgaacttattatgtaaagtccgtatgatattttaaaaaaagcttcgtaattcataattatttaagataagagtttgtaaagtttatcaagttctaaaagtccataaagtttgtaaagttgaaaggtttaaatcaattagtaattttcaaattagcaaattatcacattaataaatttccccagtttcttgttaagctttcaattcactaagaattttttcaaattccttatttatttccgcatcgtatttttcgtgaaatttatggaaaatagttatgattttttttccttcaggcgttaagcatgagctgcctccatcagttcctcctctgttcgtttgaatcaatggaactcctagcaattcttccatcttttgtaagttattccatgtcttccgatacgttagatttaatttttccatagcttctttcagcgaacctgtttcgtcaatggctttgagtagctcccattttccatcaccgaaagctccttttccgtcaatttcaatccaaattttgtatcgtagttttatgtccgatagtttcgatttcattttcaatagttgtttattcgacactaatgtaaaattaaattctcgcaacagcaagaaaaactacataaagactaactgtaatggttaaataaatgtatcgaacattttctgattttataccaaaagctttgtattttattgaatttgatttacaagttgccaaacagtctccacagtatgtgcaagttaccccgataactttgcgttcaatgttttctttttctaaagcaatataattgcatgaagtcgtacatttcatgcaatttgtgcaagattgatcaatgtacattcgtatagggtttatgaattttagatacgatacgattgttccaattggacaataggctacgcaatgtatcattttgcctttttgtagcgataaaatcaataatatcaataaaccaattgtcccaaatacagaaccgaaaattatggcagtatcgatacttacatcaaaaaatcgtaacaaaatagttccaagtacaaaaatcaacaatatcacgtgtttatatgcccaaatatttttgatggtaaattttgaatatttattttttgatgcagcccaattgtcgaatgctccaaaataacaaagttgactgcaccatgctggtcctgaaataattatattagcaattaataaaattaccataaacgaaatttttaatttaaaaattgcaccaccaataataattgcaggtatcggcaaatgtaaatcaccggtcattaaaaatttatcaaaccccgataatcccagaattaattgaataaaaaagaaaaaaccgaaaataagccagcttattcgtctccaataggcaatttttgtttcgtcaatcattttaaaaacaagaaaacttccaaataagctaaacacaagtacttcaatccaaccaaaattccgataaaatcgttcgagcaataacattggactttcaatgttaagttgaatggcagataggagagagaacgaaatacaaaaagtaagaaagggaaacaatatttttttactcgaaatcatttagccggaatatgtgtgaacgctattttgagccgttggtaaataatttattccaaaccaacagacaagcaaaattacaaaagctaatgataaaatccagattggagccactgtattttgaggattccgaaatcgataatgcatataaattaaatatcccatccaacttataaatgcccaagtttcttttggatcccaagtccaataatgtccccatgcttcttttgcccataaggctccaaataaaagaccaagcgttaaaaatccaaagccgatgtaaaccaaattgtcagctaaatgtagcgtatttcggtcgaattctttgaaataaatagtgtataacccttttacggcaactaatgacgatgctgcaagtaatgcgtatgaaaaaatataaacaactacgtgtggtacaaaccaaatactttgaagtgctggcattaaggttttttcgaaattttcgggcgaaaataaattcacaaggataaaaacatttgccaaaaacaaactgtaaatcataaaccaattgtatttccacctaaaataaaccgcaagaccgattattggaacaaaaagtgaataccaaagtcgagtttctccaagtgttcgcattggtggacggtcaatgtgaatccaaagagcaattgtaaaataagctaatgctccaataccaataataaccagaccgagtggaaatattttttttattttttcagctaatcttttttgaaacaaaaaagctaatattccaatactccaagaaatcaaagctgcgattgcaaaatatttgtacgataaaacttccatatttttattaatgtttgagtttttcgcctcgaataattataaaaaagactccgattatcaaaaatcctattcctatgtaaacaactggaagccatgggtctcgaacaaattgaattattgaataatttgaccactttccttttgtttcgtcgtaactaacttgatataatgtccagccattaattcgtaggggtttgttaacttcgagagttgttttaatcgtttcatcattgtcagaataaacagttatctcagaaaaatatcgtttgggctcaggagcaaccatcacaattgtgtaaagagaatcaatttgtaagtttcgctggcgttgaatgaatgtttcagatgaaatccaaccttctgttataatatttccggctagtttaatttttacaaataccgatgatggatttcctatttccagcattttgtgaaacgaatcattataccatgatgagtatttgtagaatttttcaatagcaatttcataatcatttaaatgaaagatattatttatggtgtcgattaagtatggtttggattctatttctgatgtttgattgttgaaaattaataatttcggattaaattcttcgatgtcgaaatcttttaactcaatggcaataggtagttctataacttggttgtattcatcaacagccctccattcggtttgattttcgttaacagtcatgtttagtttttgcaaatcgcctgttcctaaatttgccgaaataattactaaccataatccgaaatggttaaaaaagaatccgagattttttttattaaatggttttagcctttttatggttacaaatcctaaggaagtaagaaaatatatgagtaaaatggcgtaaggaaaggaagatgttatgcgatttaatccaagatgagaaataaatttattgtcggttgggagctgtggaattagtcccattaatacggttaatccggtaaagaaaacgattgcactgattgccgcattaattcctgaaagccatttaataaaagggttattttttaggaaaattccacaaagaattatgataaaagcaaataccaggatgactataagattcaatggccatgctggagcactaatttcaactcgactaacaatttcaattaaaaatcctgttagtaaaagtccaaacccaaaaaaaaggctttcagaaagtttccaaggaaatttccacacgctacaagtattttaaatattttttacttggtatgtactttctcttttctttgctttttcaagccattcgggaacaaccgttttcaagaattcttgtttgtcggcttttaatttttttacatcaaggccgatatattcttgagctttgtttttcgatgcaatatctggatatggaacttcttgattaaaattgtatgatgccaaaagtctcgaaagtttaattcttgcatcttgtgctattttaattccggtagaaaaaattcgacttgtttcgagtggagcatgaaacgaacctccatgacctgcaacagcatagtcccaacgccattgtgcatgtcgaatatccataagaataggtttcatttgttcttcggaagctccaagttcccacgcttttcctgcttcgacgtgtgctcttaccaataattcttctaatacaatttgattttctcgatttttgcgttgacgttcgtacacattttcgataagcttggtggtttcttctcgatggcaaacctgacaagaatttgctacattattcaatggactttgaatgtggtgatcggtaaatttttgtccaccttcacttttgtaaggcatgtggca

SEQ ID NO: 4442 - DNA, 24560 bp, synthetic construct
  misc_feature 1..24560: note = Synthetic
  source 1..24560: mol_type = other DNA
ctgtgccgttagtgggtactgcgtaagccgaaccattgtttcccccgaaacaagtaattgtatcaatgacaaatgtgttagatgtaatggaattgtttagttgagaaatagttattaccgtgctgtctttacagccatttgcatcggtaaccactactttataaagaccggccgataaattattgatgctagaggtggtttgatttccgggagtccaaagaaaggtatatcctccactgcctccggtaggttcaacaatggccatgccattgttcgcagcacaaatggtattttgagaatttggattaaggtttaaaggcaagggttcagtaacgataatagtatcggtaacggagcatcctgcttggtcggtggtttttacaatgtaagaacccgctttcaggttggtagcggttggggtggtttgcaccggattggtattccacagataaaggtatccgggggttccgccacttggcgtaaccgtagcggttccgttcgaatctccgttgcaaagtaccggagtaaacattttggtggtggttattcctcctgaagtattccacacatttacattatgattggctgtacaccctgcattgtcggtaatagtaacggtgtatgttccctgcgatagattaatagctgtttgtgtagtttgtattgggtttgtattccaagagtaggtatatccgggagttcctccagagggaaatacagtagctgttccgttacctgcaccgcaattctcgggcgtagtgttaaaggtcgctgtaatttgtaccccctgagaaatggtaacaaaggcggtgtcttcgcagccgtttacatcggtaagcgtaaccttaaacgttccggcaggtagattaaccgcaacacctccaaactgcggaggaatggtgttccaaagataagagtagggtggagtgcctccggaagcagaagtagtggctgtaccattatttccaccaaaacaaatattattggttttggaaacaatagaaacattgggttgatttccgggggcagttagtgttacggtagccgaatccatacagttgttttgatcggtaacgtacactttccatgttcccgggcctacgttaaaagccgtatcgtttatttgaatcggatttgtgttccatgtaaaggtataatttcctgtacctccatttgctcctgctacggcttgcccattaaataaacccatagcacattgagggttagagctacttataataaaagcactaatgggagcgggttggtttacagtggcattgattgaatctacacaaccttttgcatcggttatggtgcaggtgtaagttcctccgggtaagttggtagcagtttgtgtatattgtggcggaatacttgtccaagaataactgtagggagccgttcctcccgaaggaattacagtagttgttccgtttgttcctcctgcacacgaaattggggtagatgaggctgaaagagagatagcacttggttgtgaaatgcttacaattgcgattttggtgcacccattgttattatcggtaacggttaccgaataagagccggcacttaaacccgtagcggtttgtgtggtttgcaaaggattggtattccaaagataggagtagttgccagaaccacccgatacattaacggttgcggtgccattgtttccgccaaaacagctaacacttgtagtggtaaatgtagtagaaagcaggtttgaaaaattagacacaaatacactatctaatttattgcacccattttggtcggtaatggtaacaaggtaagtggtatttccatttaggttggtagccgtttgagtagtttgagtaggaaaagtgttccagttgtacaggtagccgggtacacctccgctggggtttgcggttgctgttccatcatttccgggtgtgcaggaagaagtggtggaactaaaagaaaccgaaatagcggagggttcatttacggtggcacttagctgagaagagcagccattgtttccggttactgttacggtataggctccgcccgataggttaaaggctgtatcgttggtttgtacggggtttgtattccagctataggtgtaatttccacctgctccggtagccgaaacagatacaaatcctgtgttcgctccattacataaaacgtgacctagtccgctcagagagagttgtgggttatcatttacggtaatggaaatgctatcgatgtgttgtgaatggcaaacgccttttgccgtaaggaaggttttccatgtcccggaagaggtatagtttactacctgatttgtatttgaggaagtagaaggatttccggctgcaaactgccactcgtaattttgtgcgttctgcgaagcactggcagaaaagaaaacattttgcccctgacaaatagaaagaggatttgctgtaatacttgcatgagccggaatattcgtcatatagggagaaatgaataacgataaggtggaaatactataggcggtagaaaaactttgccacacattattgcttccttctgtccatgccgagttttgaaaagaattgcccgggctgtttgaaacaatacctagagtatcgccattaccaaaatttagcatggttataccaaaataaaaggtaggagtaatagccaccgaggaaggaaaaatcacttcaaagaaaccacctcccgaaggataaggattgttcggaatattagcatctaaatcggctaagggaacactaataacggctaatacatttccgggtttacctccactaccggtattatcccatattttaaactgtacggtagcattattacccccctctttaatgtgaccaaaataaattctaccaccggtaacatgtgtaagagatccaaatgaagagaaacgctcggccatcgatttatttcctgtactattatttccggccatgtagcccgaatttggaatttgaagactaacaagagataatgaaccaaaagggggattattcagagtgtcacaaacggcaaaaacagtatggttgtaaaaaagtaggagaagccctgtgagtaatgaagaaatagtaaatttcatgatacttaatggtttaaaagaggcatgaaattacaaaaaacattgtaaagaagaactcttactttttgtttaacaaacacaaagatatttcattgtttcttaaagtattaataaataatcagttattaacttttcaacatacacaatgaaaagtattaacaaattgttaatcgtgactttccactccttttttacaacaatcaggcagtttatcatgggccttttcatcggctttcacatcatcggcatcgtatcctgttttagcaattttctgttttagtatttccgtatttgtttttttagggttgtagtaaatcgtaaacacttttgtgtctttgtttaaagtggcttttcttacccctttggtaaagccaatttctttttcaagtctttctttacacataccgcaaacagctgatgttttgatttctattttttcggttcccttaggagtatcttggcactttgtatttagttgaaaagcgaaaagaaaaacggaggcaatgattagttttttcatagttagtatatttaatggttattttattttaaatcgaattcctccataaaccattcggccgtttacaggtgcccacatcatagaggcatcaaaataatttccgaaaggatcattgggagctattatagcattaggttgtataaagtttaataggttttctccacctaaataggtttctatgtgtttaaaaattttggtaatctgcaggtgagccaaggtgtaaggaatagaataatggtttcgtttatatacatcagggtttgtgcttgtattgggcaatctgctttttccgaagtagttggccgaagcatcgaatttccatttttcgttaaaggttgtatacgaaaatcccagtaagattctgtgcttaggtacgagtggttttgcctgcaaaatgccattgtaggtactttgcacatcataaaatttataggccatttttatttcaaatttttcgaaagcaaaaaagtttacttcggtttgtgtgctgtgcgaataggatgctccgtttaaattataaaaccaaacttgttgcggatgataatctaaatctaccactacctgatttaaaaaggtagtataaaaatagtcggccacaaacgatgcttctcttcctaaaaaggtaaacttgtgtagcagagaacctcctgtatttatagcatcttcaggcataatgggtgtttttataattacatttcttgcactagcaaaaacagagctgttttcaataaaaaggtttgcaactctgaatcctctacctatgctgactcgcaaaacagtttcttgcaaaatattgtatttaaggtgtaaacggggagtaaatctaaacccgaaaagattatgccagtcggctcttatgccggccactaccgaaaattttaattcatcgttataggtatattcggcaaaagttccaggtactatttcggtacggttaaatagggagtcgttgtaattttcattgtattcatcaaaaacaaaacttcctcctagttttagggtatgaaaggtatttcccaacatagattggtgaataatatttgcgtttacgttttgctcagtaccgctatactttcggtttccaaaaaacatttcttgacggtgtatttttccatttacaatggtgccaatgcttttattgggtttgtttggaaataaaaaaccatttttggtaaaagcttctgccagttggttatttactcctatgccataagctttttggtatttttgttctacgtttttgttaaaatgggtttggccggaaatacggtcgtcccacattacttttatacccgatttcgattcccatttttcggtatttatattccatcggttaaacacgtttatttgattgctgaaaggcatatcataaaaaccatcttggttcatatcggttttagattgtaccgtattggcatgtaaaaaaagcagattacttatttttttcgaaattttttgtgccagatgaacatttgcctcgtaacgagattggtggttggcgtaaaggtttacaaatattttttcatgttcttcgggctttaaaaattcaatattgatttgtccggccatcgattcgtacccgtttacaacagaacccgaacctttggtaatttgcatagattctacccaagtgccaggcacaaaatttaatccgtacgatgaagataaacctcttaaaaacggcatattttcaaaaagaatttgagtgtaaacaccatctaatccaagcatctgaattttttttcctcccgaaacagcatcggtaacagccacgtctaccgaggcattggtttcaaaactttcggaaaggttacaacaggcagctttttttaattctttcgaagtaatatgctcaatgggaattgcaggtctcatgctcatgaaagttgaggattgctctgcacttacttctacttcttttagtaaaatactttcttccaaataaaaaataatatccttgatttggtcatcatcaatacgaagtgtatcgtttctaaaacccacaaaactggcaattaattgggcaggtaactttatggcttccaattcgaattgtccgttggcattggtactggtacctttgttttcgtttttccagtaaacattagctccgggtaagggagtaaggcttgtcttcgacaatacttttcctcgaataacttgagccttaataatagaaacagagagtagaaaaataattaaataacaaacaactttcattttgggtgtttttaaagtgaatactttaacaatcaagggctacgtccctaaacaccaaaaatcaaataagaagagaaagaaagagtatgtggagagagtgatatttttttgtgagaagcgggggaggataaataattttactttcagaaaaaaggtcgaatgtgaaatcgttagcctttgtattagaggtgtataaaaaggctaaaaaagaaaaagagggttgaagtgaaaaatgatttagaattacattaaaattatctttgatggaaatacgcacactttcgtttttgcagcaatccggaaccttttcggcatcgcagcaactttcgggggtagaaaaaaaagatattttttcaagagtatcgccacaataatgcttacctatatttactcctgccagcagaaataaaaaataaacacagagtactatggagccaattcccttcatgtcagcaaagttaatatttttttaaacagaaatagagtatcattcacattttgcttactttagttttctaaaaaaaaataaaatatgaaaagagttttacttatggcacttgtaataataagtgcaacatttgtgaatagtgcctattcgcaaacaaaccccatgtatcaagaaggtaaattatggtttaaacttaaagaccaatacctcttttcaaaacatcaaaaaaggaacgaaaacacacaaaaggtagaaataagtgaattgccttttattcaggatatttctgcaaaatatggcatagaaagaatttatcgtccgttttttgcagccgatttacctgcattacaaaatacatttatgctcgaattttctatgagccagaaaactgaagcattgttgaaagaacttctgcagttaaacgtgttagaatacgcagagcgagtgcctttagacgaggttgcttctacaccaaacgatccgaattataatattacataccaatggggattaatgaaaattaatgctgctcaagcttgggatatttccacaggaagccccaatgccgttgtagctatagttgataatgcctttgatgtaaaccatccggaagtctccattatggtgtataacaatgtaggagagtcgcctaccaatcaaatagacgatgattggaatggatacgttgatgaccgaaaggggtttgatgtagccgacatggataataacctcatagggccaagcaatacatggaaccatggtacacataactttggcgttattgcagcaagaaccaataataacggaggaatagcgtctattggctatggcataagagtaattcctgtaaaagctactaaaaataccagcagtccaaatgctattactcacggatacgaaggcattgtttatgctgtaatagccggagcaagagtaattaattgcccatggggaagtactctaaatagtgttacggctcagaacataattaactgggcaaaatctaaaaatgttttaattatagcggctgccggaaatgcaaacacttctaataatttttatcctgcggcatatacaggtgtgctaggagttggatctaccgctgcttccgataaaaaatcttctttttctaatttcggctcttatatagatgtgatggcgcccggctcggatatttatagctgtgttcccaccaatcaatatacgtttatgtctggcacttcgcaagcaagtgctttagttacgggcttagccggattaatgctttctttaaacaccaacatgccagtttcggaattagaaaactgcattaaaggttcatgtgataatatagactatatgaataccgggtatattggtcaaattggtgcaggaagaattaatgcatactcgtctatgcaatgtttacaaactcttgccaatacagctccaacagctaatttcacagcaaccgatacggtaatttttgctggtaccagtatcaagtttttcgatcaaagcactaatattccgagttcttggcaatggacattttcgggcggtacaccagcctcttccacttcgcaaaacccttcggttacgtacaatacccccggaaattataccgtctctttgcaagctaccaataccggtggacaaggtgtaaaaactaaaaacttttatattaccgttttacccactaccggttgcagtaaaattacaaacactaaacccggagaccagtttgctacttacactattgggtccggagggtatttgggtgggcataataagttaagtccccaaattaccaaatggtccgatttttacgacaattatgcaccttacacctatgttaccggagccgaaattcatttttcgaaattgtttgttaacaatccgaatagctttgttacggttaccatgtgggatgccactggtccaagcaatgctccgggcaatgtattggcaaccaaaaatgttacattgcaagaaataaaagcatacgtgggaaccaattataaacctatgactgttttatttgatagtgctataaccatacccggaaactttcatgtaggtattcaaattacccatactcccggagataccgttgctattgcgtatacacagaacttaagcggaatacctcagcgtcccaacactgcttggtcctatggtttttatacttcagcatggtatcagttaactactatttttggaggagctcctgaatttaatatgcatatttatccattggttaccgacacttttgttaaagcaaaagcgagtcctctgctcagtaccgtttgcgtaggagattctttacaactcagttcggccggaagtactaacgcaacttctttttcgtggaaatttcatggagcatttcctgctgtttcaaccaatccaaatccaaaggtggcctttacggttccgggtaagcactaccagtatttaagtgcttacaacgtatgcggaacccccgcaggagctactattgtagtgaatgtaaaaggagtaaaagagttgaatgtaacttctgcagcacaagaaatttgtgtgggtggttctaccactattgaagccacaagcactaacgcctctacctatatatggaataacggattacccgcaacacctggaccacataccgtttctccatcggtaaccacagtatacaccgtaactgccgatagtggagggtgtaaacaaagtgccgacattactattaaggtaaaagatgtgcctgtggccagtgccatgtattttcctaatatgggtaagatttgtaaaggagagcaagcttggttcgaccctactaattctatagatgccaatacttatttatggacatttacgaatggcaatccggctaactctacagctaaatttccaaccgtaacttatgctgcggccggaaaccatgcttattctttgttggctaccaactcctgcggaaacagcacatttaacggtacggtggtaattagtgattgtactcccaccgatgtaaatgaattagaccaaaaagaaaatgtaagtgcattttttaccgatgattataacctaaaggtagctttaagaaattacagcggtaatactacattgagtttgtataatgcgttgggtcaaatcatttacacatcgaatttacttataaataatacttccgaaaatgtaattattccggtaaacagaacacatggaatttattttttgaatatttctaacaaagaaaatatccgtactcttaaggtgggtaaataacctttttctattcaataaaaccaacaatgggctttcctttagaaagcccattgttttgtctgttcgagtagcaaggaacgagcgtatcgaaaactaaaaacagtacttctcgatacacctcctttgtcggcactcgaagtgacagtttttttgtgatttcgtttttttttgtccgttcgagtagcgaagcgtatcgagaacaccaaaaaaactcaacagatttttttcacaaaaaaaaagtcccaccgaagcaggactaaagattttcatctacggcatatagccttattgtgataagattaaagattaggattctttttagaaaagaactatctttatagcctaaaacaacgaacctctagtaaaactagaggctctgatttaggtacttcatgaattgcttcaatcagataattccaacggctttcgccttattgtgatttgattaagacaaaagtaataaatattttgaataaaaacatttgatatgagtaaaattaaacttggacttgatttaggaactaatagtattggttgggctgtactagaaaaacatgatggaaaatatgactttttagagaaaaaagataaaaaaggaaatttaattccaactaaaggaagttatatttttccaaaagacgtaaatgctgacgaaaattctaaagcagctgaaagaagaggttttagaggggcaagaagaagattagaaagaataattctaagaaaaataagtacgctaaaagttcttaatgaatttgggttatgtccactatttgaagaaggcgaattaagtgattggaaaaataaaaaaatatacccatgtaaaaatgaaaagtttattgagtggcaaagaactggaaaaaagaatggaaatgctgagattgaacgattaaaacaaccttattacttacgtcatttggcagctacaaaagaaggtttaatggattttgaacagggtaaattacaacttggtagggctttttatcatttagcacaacgtagaggttatctttctaatggagaagatgagcaaagtgatgataaattagaattattcaaaaatgaattgacaaaattattagaagaagtaaacacaataaatgagtttagagagccttataaagtaatttttgaaaacagaaatacagataaaaaagtaaaaacaattgataaaaaaattaatgcatggattaaaaaggaaaaggaatacaataacttgaaagatagcattattgaagaaataaataagcctgataatgaaggaaaggttatgacctctattaatgagttaagtgaaaaaataaaagaagcccatgaaaaaggaaattgtgcaccaacattaggtagctattttaattggatttatacaaaatcaaacaatcaaggaatcgtcaataaaataagaggtcaatatacacacagagacaatcattatatagcagagtttaattatatatgcaagaaacaaaacattaaaagtgagttaagagaaaaacttcatcaagctattttttatcaaagaccactaaaaagtcaaaaaggtttggttgctatgtgtcctttagaaccaaaacgaaaaagaatagctgtttcacatcctctttttgaagaatttagaatgtgggagtcgataaatagaataaaaataggatatggagaaggttcaaaactagattttcttactaaagaacaaaaagaattaataaagcctttgtttttacagaaaacagattttgaatttagaaaaatagccgaaaaacttagtggagataaaacttattgttatgtcaaaacacctgaaaaagtgttttttaagaaagatgatgaacctatagaaggaggtgtagctgaactatttttcaactttccgttagataaaaaaatttcagcttgccccactacttctgctatatcaaagctgttgggtaaagataaatataaagaaaaaccctttctaaatacaggatataaagaagaaaagaataaaacaaatattagtattgaggatatttggcattgcttgtttttagatgatttagaaaagaaagacagaaaaacaattagaaaagaatttgcagaaaagcatcttgcgttagatgaaaaggggattgaagattttcaaaaaataaaactggcaaagggatatggtaatttgagtaaagcggcacttaaaaagatagttccttttctcgaaaagggagaaatatattctcatgcagtatttttagccaatatttcagcggtacttaatcgaaaaataaatgatgaggaacaaaaaataattgcaaaaaaaataaatgaagctctcagtaatcacaaaattgaaaagcaaaatagtggcattgcaaacaattacatcagtaaagtaaaagacaacaaagaaggtcttggagataatgcaattagtattgaagcacataaaaatggtttgaagaaagaactgattgattggataggggaatcggaatataataaattaaaagaggaagaaagggacaaacttttaagggattgttggaataaattttctgatgccagtttaaataaatcttcaaaagaaatagtctatatttctactaaaacgatacctgaatttatttttgacaaactaacagaaacctttccaaacgatgctattaatgtttctaaattgtatcatccctcagcaatggaagtttataaacctgctgacaaaaaattaggaaatccagaaattagctctataaagaaccctgtatttaacaggtcaatgcatcaaataaaaagattgtgtaacaaacttattaaagaaggtgtagttgataaagataccgaagtgaatgtggaagttgctggagaaataaatagtgctagttatcgtaaagcaattgctcgatggcaaaaagaacaagaggttatcagagattgggcaaaaaatgaaattattaatacatatccaaaagaatgtcatcacgaaatacaacctacggatacagatatcataaagtatattttgtggaaagaacaaaatcatcaatgtttatacacagaatcacaaatttcagtatgtgattttttaggaggaaaaacaacttacgatattgaacatactatacctagaagtaaatttaatgacaattcattagccaataaaacacttgctgatgctgaatttaaccgaacaattaaaaaagatattctaccaggtcttttaaatgaaaacttcaaaggaaaaacaatcaacaaagaatcaattattacaaatagaaactccaaccttaaatcatattcattaaaaaacaatgtgccaacttggagtgtaggcttaaaatctttgaaagatgaacataaaaagtataaagtagctgcaagaagtattaccgactcaatttcacatgataaagtaatgaccaaggttcattacactaaaattaagttagattatttaagcaagaaatataaaaattttgaatgtgaagaaataaccaatcaattttcaaacgccaatttagttgataccagaataattgcaaaatatgctcgagcatatttaaactcttattttaataaagtgaatgtagttaacggaaaagttactgaaacattgcgtaagatgtggggcttagaacctgaatatgcggtaaaagatagaagtaatcatattcatcattgcattgatgcagttaccgttgcttgtgttgaaagagctactgttaactggatttcggaagcatttcataaatacgaaaaagattatttcaagggaaatgacaatccaaaataccaattaaaaccacctatgaatgattttgccaatagaatgcataatcttcataaggaagtatttatttatcatagacaaatagatagaataaaaccattgttggacgccattgaaaaaggaaataacataaaacaaaacctaagaggaaaattaaacagccaaaatccttatgctcatattaagaaaaatggaaaattaatttttgctaaacgaaaaccgattacaaaaataagtgaaggagatattgaaaatataattgatgaaggaataaaaaatagattattagctcttgccgatattaaaggctgggagaagttgatggaatttcaagttaaagagaatgaagatgttgtagaaaagcaaaaagaacataaaaatagtattgcttttaaaatttttgaaaaaataaaaaaagatgacaagaaaaaagatgtagtagtacaatccttttcaaaacaaaatcttacagccgaatttttagatattaatgagcttattacaatgttatataatactataattagattagatattgacgaaaagaaaagagaaaattataaagaaaaaattgcaaaagaagttactaaccttactagaactaaaggattggaattattattaaaagaaagtgaaggggttattgttcttcctgaatattatgatgaaaagaagaaaaaacagattggtagaatggtaataaaaaatatacggttaaaagcatataagcagaatcaatatccgctgaaaaattatagagttatagataaatccatttttgattataaaactgacttttattttattaaaaaaaaaggaagtaattataaattaaaaatttacggagatttaatgcctgataaacctgatgggcgtcaaaagtttacaaaaagagatgacgaattaataaactcctataatatagttaaaaatatttttgataaacccaaaactttaccattattatttgagatttatgttggtagttttttcatcgtttttgacaaaaatattgatgaaataaactggaatgatttctctgatttaaataaaagattatttaaaactaaaaaatttgatgatgataaaaatattatattggaaagacataatcattcacattccaatgaagataaatacataggaagtgagtcggatttgacaggtaatcagttttttttattaaaaagaacaacatcaacattaagagtaatccctgcaaaaattgatactttgggtaatttagatgttgagttttctaagaaatttattgagttaaattcataattttaaaaagtaaaaatcacccccacaggtaaaatagaaaagtgttaatgtataacccaacggcttagagattgtttaataaaagcatgctttataaatcaaaataggatagaacagcaccaaaaaactatatttacaaagtaaatctgcttttgctatgagtaatattgaaatttataaatctgctgataataacattgagatacaggtaaactttgagaacgaaacattttggcttacgctcaatcaaattgccgcattatttcagagggataagtctgtagtatctaggtacttatctaatatttataaagaaggagagctggataaagattcaactgttgcaaaaaatgcaacagttcaaaaggaagccgagagagaaatagttagagatatagaatattataatttggatgcaattctgtcggtaggttatcgtgtaaaatctcaaagaggtattcaatttcgacagtgggcaacccaacgcttaaacgtaaaaatgacaatataaatatgaacgaagtgattctataccaaaccaagaataatcaaactcaagttgaagtgcgttttgaaggagactccgtttggttaaaccagtatcaattggttgaattgtttgaaagcagtcggtctaatattgttgaacatatcaaaaatatttacaacaccgaagagttagataagaaatcaacttgtcggaatttccgacaagttcgaaaagaaggtaaacgtatggtagaaagagaaattgaacattataacttagatgtgattatttcagtaggataccgtgttaattccaaacgagggactcaatttcgccagtgggcaacccaacggctaaaagattatttggtaaagggttataccatcaatcaaaaacggttagacgaattacaacaaaccgtacagttgattcaaaaatccatttcaaacgaaaccaatttaaccgaagccaaaggtttgctcgaaataattaccaactatacccaaagctttgtgttgctcaatcagtacgacagcaataccattaaaacaactgggctaaataaggaaattacttacgaaatacaataccaagaagccaaacaagccatagttgaactaaaaaaacaattgatggcaaaaaaagaagccaccaatttgtttggcaacgaaaaagaccaaagtttttcgggcattttgcaaagcgtagtacaaacttttgatggtgtatatttataccacagcatagaagagcaagccgcccatttgttgtatttttgcatcaaaaaccatccgtttagcgatggcaacaaacgcatcggggcgtttttatttatttggtttctcgaaaaaaacaaacaccgttttaagaaaaacggagaattgaaaataaacgacaacgggttaacggctttggcactgctagtggcacaaagccaccctgacgaaaaagagttgatggtaaaactggtggtgaatttaattgcaaatgcataaccttgcaacaatcacttaccaataaaaagttctttgacatattaatacagcacaaccaatgtgaatgttgactcgaaaatttgtcagttcgagtagcccacatggagcgatagcggaatgtgggcgtatcgagaactaaaaacagtacttctcgatacactccgcaaaagcttcgttactcgaagtgacagtttttttgttatttcgattctttcttttttttgtcagttcgagtagtgaggaacgagcgtatcgagaagcgacaaattttcgaaaaaccactcttatcagaccaaaatcaaaccacaacgcgagcgaagctcgcgttgtggtttgattaaagattaggaagtacgatattttttcgctaagtctttccatccttgcccccgttgtggtttgattaaagattaggaagtacgatattgacgaagaaacatttatgaacttaaccaatgttgtggtttgattaaagattaggaagtacgatattcaaaagaacttggttttgtagatggcatctgttgtggtttgattaaagattaggaagtacgatattctgaaaagttaccttatgaatgcgaacattgttgtggtttgattaaagattaggaagtacgatatttgaaatataaaactgttcgcttcgcccacgttgtggtttgattaaagattaggaagtacgatattaaacctgtacaaagtgttttcacgaaagcagttgtggtttgattaaagattaggaagtacgatatttgaaaaatcaaaagtatttgcaaaaataagttgtggtttgattaaagattaggaagtacgatatttcaacttagttaagtcgtttttcagcgaagttgtggtttgattaaagattaggaagtacgatattaaatttgactcaaacaacggtcaagaaattgttgtggtttgattaaagattaggaagtacgatattcataaactaaagtagattgacgaggtaatgttgtggtttgattaaagattaggaagtacgatattaaaatgcaaaatggcacccaaaaacaactgttgtggtttgattaaagattaggaagtacgatattagtgtgtccagtttgtaaatccttgtagtagttgtggtttgattaaagattaggaagtacgatattagttgctctgaaagcttctaatacttaaaaacttaaaagaaaatatcgtaaacaaaaatgcttctttcttggttgaaattgcctagattgaagcatttttttttaattcataacaacattgtccgttcgagtagcgaggtacgagcatatcgagaaccgacaagagcaggattaaaaatgtgcacttctcggtacgtttttcgtacctcaaaacactcgaagtgacatgttttttttgtccgttcgagtagcgaggtacgagcatatcgagaacaataaaaaacatctaattttggtttcttatgaaaacacaccattatttcgtttatattttaaggtgtaacgatggtacttattatacaggagtaacaaataatttagaaagacgattttcagaacatcaaagtggagaagataccagtgcttatacttttaaaagaagacctgtacaattagtattttatgccgaattttcgaatattgattttgcgattgaaaaagaaaaacagctcaaaaaatggtctagggctaaaaaagaagccttgatagaaggaaagtatgagttattatctgaattgagtaaaaagaagtttagataaaaacttctacttctcgatatgctcgtaccttgctactcgaagtgacagtttttatttcgatttgtttgtccgttcgagtagcgaagcgtatcaagaaccgacaagagcaggattaaaaatgttcacttctcgatacgcttttcgtacctcaaaacactcgaagtaacagttttattaagattctgaacttgatgcgagagtggcaagcacacgtttaaaataattctaactgattaggagaatgtaacgattctattttttttgctccccaaaaattaataatgctcccgaattgtttatcggtaatacgtaaaatactaatcttacccaagggaggcacaatctggtttattcttttttcgtgcacatcggcactttctccactggcacagtgcctaatgtaaaccgaaaactgcatcattgcaaagccattttttaataagttttttctaaataaagaggcattttttctatcctttttagtttcagtgggtaaatcaaaaaaaacaaacagccacataattcgataggcgtttagttccataatttggggtaaattatctttttattttttcctgaaaagcactgttgcaaagagtttgtggtggtgcttaaccccaccattaaggggctttccttattatcgaaataaacagtatgagttaaaatactcagcagttcggcttttattttagtagttaaataatcttcggcatatcggttaataatgtcaatcactttggcatctactaagggtctgtatggttccataatatcatcggccaggcaaaacgcattgtatttatttctgtggtgtatacctaaggtatttagcaatccgctgccggagagagcacgggctaaggccgccctaagtaagatgtatccgtagtttaaaaaaagattgggaaaagcaccgtttctttctcgtttaaaatcaaattcaaaaatatgtttccaataatatgcagcggcagccccttctctattatcgctgtcgccacttagtactttagaagcataatactccagcggagagttgtgcttatttaatttatttaaaaggtgtgcctgatttaaaatcttcgctttgatggtttgttgccaaagttgcttttttaatggctccgaagcatttatttgatttctgaataattcctgctgcaaatgatgcccctctaaattaaataacatggaagccggcatgtgtttatcatcgcaaaaaataaccgatgcattgtggtagattaacttatttagtgcaggaatagaaataaaactttcctgattttctattaccacaaaaccaatatcttctatgggaacagtagcctctcttgtatctgttttaatgtgcagttgctcgtgtttagtagtaagagtgcatttattttcgaaaaacaaggtgcgttttaacataaaaaaggagttggtaaaccaatgcttatacttattttatttttgttatgttacatatctttcaattacaaggtattcaatgtaaggatgagatgttgggaaattcagtacaacgcactataaatagaatattcctaacttcgcaataaaaaagagtaatgagtttaaccgataaaataaacaatgatatcaaagcagccatgttggctaaagaaaaggaaaagttggaagccttgcgtgccatcaaatcggctttgcttttgttaagcacagaaaaaggagcttcggaaaatacgaacgaggaagccgaactgaaaatgttgcaaaaattagtaaagcaacgcaaagaagcagcagagatttttcgcacacaaggcagggcagacctagccgatgtagaagaatttcaatcaaaaataattgaagcctatctgcctgctcaattaagcgaagaagaaataaaaaatgcagtacaacaaattattatgcaaacaggagcagcgtctgctgccgattttggaaaagtaatgggtatagctgcaaaacaactcggtggaaaagccgatggaaaaatgatttctgccgtagtaaaacaactcttagcctaatggtacacattagccaatcggtagccatattggtagacggaaacaatatagaaaaaggcctgcatacccttaccggaaaagcaaatgccatgcttaatttcgatagcatcatttctaaattaatagccagccgatcattaaaccgcttggtttatttcagagaaggagaaaacatttcatcgaaattagccgaccgtttgcacgaaaattattacggaacggtagtgccctgctataagtcggccgatataccacttaccatacatgctacccaaatttccgataaggttgataccatcattatattatcgggtgattcggattatgttgaattggtgaggcacttacgctctcgaggggtaagagttgaaattgctgcagtgcaaaactgcacagcctctgtacttatagaagaagcagaccattacacccctattaccattgatgattgctttatatttacttcccctcttcagaaatcatttaaaaagaagaaactcaaaaaataatttatcttttgtttttacgataatctcttcctgcccaaataagcataattagaggcagtaagggtacaaaaatatagggtgtaaacttatcgtttaaaagcaatattacattcagtacagaaagtagtaaaatgcccacaaatcctattttttctaatgtgctgtacttttccattggttttattttagcgtataaaagtaattttttaaattcgttttttttctcaatttagccacaaatcataaagcaaaaataatatgagtacaaatggtgtgcactacagcgattatttacaattagataaaatattaaatgcccaacaaaccgaaagtgataaaaagggaatagaggcacatgatgaaatgttattcatcattatccaccaagcctacgaattgtggtttaaacaagtaatttatgaaatagattccataggaaccattatgtctaagccggttaatgataacagtccggccatgcaaatggtagtacaccgactggaaagaataaataccattttaaaattattagtacagcaaatagaagtattgggcactatgacgcccatggattttttagacttccgcgatttgcttcgcccggcttccggttttcaaagttggcagtttaaaattacagaagctaaactgggtttaaaatacgaacaaagacatgggcaggaatattacatctctcaactacgcgaagagcatcgtaacatgattaaagaggtagaaaatagccactctttattggaactattaaataactggctggagcgtatgcccttttttgatgatgcagaaaattggaaaaattttaaaacaaaatttccggtaaaaaatgatgtacctattttttggagcgaatacatgcaaagatactcgcagagtttatccgaaaatgaaaaaacgaacctgcagggcttttgcgaaactttttttgccgaaaataaagaacgttcgctaagtgccaaagcctctcgttcggctttatttattatgctttacagagcttaccctatgctgtatttaccctaccgaattttagatagcctactggaggtagatgaattactttctacctggcgtttcagacatgtaaatatggttcatcgcatgattggtactcgtaccggaacaggcggtagtaccggaaaagattatttgaaaggagcattagataaacattatatttttaaggatattgccggtttaaccagctttttaatggaacggaacaatttgccggacttaagtccggaattggtaaaaaaactcggttactaaaaaaaattagatgccggtatggtataataccaatcctgcaatgggtttttctattatttttccaatatgtacgttatttttttctgctacgtactgtaatgtttcgtggtggtaaaaagcaatagaacccacaaaatgcaaaggaaatgtgtggtagttagtgtatttgcaaatgtagcgggtaaaaaaaagttgaaaagcatcttctaccaataacctgatgtgagagtgatttttgtgctgtaacagaaaaggggcaaaacttgccaaatatctggaaggcatggattgtttatatacgctgtctaatagttgttctaaagagaaagggtagttttttttgaatgcctccattaaattgttgggtagttcgtgctgaaggtactgtaccaacagcatccttcccatgtaggcaccacttccttcatcgcccagtaaataacctaaagaaggaatattttctattatttcttttccgttaaataaacaagaattggctcctgttccgagtatcgcagccattcctttttgattaagacaggtggcacgggcggcagccaataaatcatgctctacctctatgtgggcatttacaaagtttttttgtaaagcattttttacatgttgctttttagtttcggtagaacaaccggcaccataaaaaaataaggcagaaattttagtagcatcaatttttttagtgagaacaaatacttcgtctgaaatctgattttcgcttaaatgataagggtttaatcctttggtaatgtgttgtgaaatttctacagaattgctaattaatctccaatcggttttagtagaaccactgtctgcaattaaaatcattcggtttgttagtttttaatgagtttaaatgttttgaaaagattattttttttgttttgaagaaaaatgaaataaactccccaatgtagatgtggtagtgaaagaattattttttcagaatgaaacggttcggaaaaaactacttttcctgttacatcggttattattatttcgtttgccaaagcagcctctacagtaacattatgagtaaaagggttgggatacaccttccagtgttgagttagatttatttccgataaatcatttgtagaaccaatgtataccaataaagaatcggtacacccgtacattaaatccgttacaattactttatatgtaccggtggtaagattggttatatcttgcgaggtgtgagcattgctccatacatagctgtaattcccacttcctcccagtacattcaaatcgatagaaccattatttaatccaggagattcgttttgtataaatgcggttagaaacagggagcaagaatcaccaaggcaaaataaaaaagtgtcggaggctgcattaaaactagtatcgaatgagagcgtatcaaaaggaatagtgttggtaatgtaaaacgagccgtttccgaaagcacagcaatagccatctccatagctatcttttagcacaaacttaaagcagccctcataaaggcaaatggagtggttgtatgtttcgcctccgttcacatcagggtatggtcctccggtaataatagaattattttgcatatctaaaacttcccataaagtttcggatccgtagctatcggtggttatttctaaatcaataaagtgagaagtattatttataaaaaaagttttccttatggtatcattcggaaaatataagtcggttcctccatttggtttttttagggcaatggcaagtttgtgcaggccttttgcaggagcagaaagaggtaatcctatttgtgccacctgataagggggtaagtttcccgcccaatttatgtttgatgttgttcctccatcatagttaaattcaacttctaaagaagtgagagttgtaatgccgttgtttctgaaataaacgatgggttttatggtatcaccacatattttagaatttattctgccaatgtaaatagcagccgcatctaattgattcgtggccgggcttggactaaacccatcaaggtgtgtgacgcccgtattattggggtctaaccaatgtttaagttgtttgagtgtgtctgaattggtattccacgagtaagaaaactttccgtaataatccatttcgttattattacaagaggcgtttcctccgtgtaactgaccaacaatacgatgcaactgattaaatagcggagaaccggaagaacccccttcggtagtacccgaattccaattggcaaccatccagtggttatttccggtagtgtaatatccggagttgaaggccgaatctttatcgtgcgatattttcattacatcaccgctggggtggtgtattcctttcgattccataggggtttcatctttggcttcccatccggcataaaacacattatattgcgggggaggtgtttgcagcatttctaacaaacgaaaatcggagggagaatcaaaggctctgataaaacaaccttgcaaggttttgttggttggcccatcttgggaattgctgcacgatgaagaccagtagccaaacataacaatatgattggtacttgtaccgcaatggttggcggttaagatgtacggctttccgttttgttttgtattgtttaccaatgctccgctgcagtatcggctgttgcccgcagtaagtaacattactaccgaacgcatttcgggtttccataaaatactatcgcaaatagcatttacattgcaaggttccgaatcgaggtaaccttttgctttatcgtgtaaactacggtatccgtaaactacttcagaaagtgtaatgtttccttcaaaagcagcatttgcaggttcgtagtattctaaaataacactttgcccttgtgtaagagaagttgcaaattgcccatcggggttatgatttaatgaggtaaaggctccaagtatttgttttttgtctgtggaatataa

SEQ ID NO: 4443 - DNA, 24314 bp, synthetic construct
  misc_feature 1..24314: note = Synthetic
  source 1..24314: mol_type = other DNA
ttattaacgctaaacccgctgggggtcatggcgctactgggtatgttttcaatggcatcgcaatcaacctcaacaccaaaaggggtaccgttcatgtgttttagggcgcgctgtaattcttgtttaaattttagttctttgcccacttccaaatcttcaaacaaggtgtacttaactaatttgaattttttcagcgatttaaacaatttatccgacgtatagtttttgtgcaccccaaaaacaaaataatttttcaagaatccttccgcgtatgcgtaactaaaaccgttgccattatgccgtccttcttcaggataaaaatctggttgggcatcaaaattaataacatttatgggtttttttaaggctaaactggtgcctttaatgcaaccgtaggcgttattatggccacctccaattacaatgggtatttttcccgccgaaacaatttgttcaactatgtaagtaacgtgtttgtcaattttgccaacaatttttcgggcttttttgatgctttttggttcgtttttgtctaattctgaaaccatctgcatttcttcgctaaaatccagatggcctaaaaccaacaccttgtttgcccttgtaaattcgttattctgtatgttcaatagtaccttcagcgtagcttcccatgcctttgaggtgccttgtgttccgtagttggcatacacgcccacatcttcaggcaagccaattataacgtgcgtaacatccaaattaataagttggtcgtatatatgtgaaatgctggttaatattttaatatgttcaccaaatttggattcgcctgggcgtttgtttaatagtgcatttagcgtagtgttgttaaataaaaccagtttatccataaagagtacataaattttgaatattaaaaatacatcattatttatttatggcattaaaaataataaagtattacacaaaacattaaacatttaaaaaagattaaaaacaagtaactatggaaaacaacaaaaacagtatgggcctaaaagtggcattgggaattgcattggttctatttttaggcactgcattttacaccatgaatttgtacaaaagcagtgaaaaagtgcaaaacgacctaacagaacaaaaacaattggtaatgaacgatttgaacgcgatggcaaaacaatacgatattgccataagcgaaaatgacgttgccaataaggatttaatcgaggccagagcccgtattcaggacttgatagattcattaaaaatttctgaaaccaatgtaaaaagcttatggagctacaagcaaaaatttatttcgctacaaaaagaaatggatgttttgctagctgaaaatgataagctgaaagtagagaactcatacttggcaacctcgttggacagtacacgggtacgtttggaagagcgcaccatttttaccgattcgttattaatacaaaacaatgcactggccgaagtggtttcaaatgctgcggtactgggtgctgtaaacatgaaaggttttggggttattgaaagaacctcgggtaaatttattccaacagaaagggcaggacgtaccgataaaattcgggtttgctttacggttcctaaaaataaattggttaaatcgggcgaccaagaattatatgtacaggttatagacccaaaaaacaataccctaggcatgaacgaacaggttcgatttggcgataaaaccttaaattatagcattgtaagtaagtttaattatgaaaatgcaagtttggatatttgtgagtttgttagccataaaggaaaagccgattttcaaaaaggacgttatattgtaaacgtttttaacgccaaagatttggttgctacctccgagttcactttaaagtaaactatataacacttattgctaggcctcaggttgttacctggggctttttttttgctgtatttaaggtttttagtggctttttttttgtgcttcgggtaaattgcttggtatttctggacttattgctgctttttattgcaactaaacaaatttatctgcaaatgatggataatttaattgccaaaagtgaagaagccgtagttttggttgctaaaccagttgttattttatgaccgaaaccgagtaccacgcccattttttgaacggtataagcacgattccagaagatgccttttcagagattttaaaaatcgcgaaattaaaggattataaagccaacacccaaatagtaaaattaaatgaaacgccctcaaaggtgtatatgttggtttctggtattgttagatgctatttgagcaccgaatcgggcaaagagtttaataaaaatttttttctgccaattagttttttcggttccttaacggccttgttaaaaaaacaaccgtctttatttgtttttgaagcgctttctgactgtcgggtgtatgaagttcattatgacaagcttatgcttttaagcaagaaacataaatcggtcaatatgctgtactccaaggttttagaatctgtatatgtagcttatgaaaaacgcctcatagagctaatttccttagatgccaccgaacgttatttggaaatgcgaaaacaaatagcacaaattgacgaccttattccgcagtaccatatagcttcctatttagggattactccggtacaattaagtaggattagaaaaaaaatagatgggtgttaacaaatgttaatatcaaaaaaaaacataaattatatatttgaccgatttcctgtaaatcttaactaaactaagaaggattgatagctaactaaccaaaaaaaaaacaggtaaatatttttacctgtttttttatttatggttttttgttagatttattttaaactaccaaccatatcctcgggttttacccaagcatcataatcttccgcagttacatagcctaaatttacggcctcttctttcagggtagtgccgtttctatgtgcggtattagcaatttcggcagacttataatatcctattttagtgtttagggccgttaccaacattaaggagttgttcaataattttttaataacctcatggttgggttctatgccaacggcacaatgttcatcaaaactagcgcaggcatcgcctataagttgcgcagattgcaaaatgttggcggccataacgggtttaaatacattgagttcataatggccttgcaaaccgcccaccgaaatggcaacatcgtttccaataacctgggcacaaaccatggttaacgcctcacattgggttggatttacttttccgggcatgatggaactaccgggttcgttggcaggaatgataatttcaccaatgccgcttcgtgggcccgatgccatcattctaacgtcgttggctattttatttaaagaaaccgccagttgttttaaagcaccgtgtgtttcaaccagggcatcatgtgctgccaaggcttcaaatttgttgggtgccgacacaaaaggaagtcctgtaaattcggcaatatattccgctacccgtttgctatagcctttgggagtgtttaaaccggtacctacggcggttccgcccaatgccaactcgcttaagtggggcaaggtgttgtttaacgcttttaatccataatccaattgcgccacataaccagacagctcctgtccgagcgttagtggtgtggcatccattaagtgtgtgcgtccaattttaacaaccgatttgaaggcttccgattttttcttcaaggtatcgcgtaattgcttgacccctggaatggttgtttctacaattttcttatataccgctatatgcatgccggtaggaaaggtatcgttggacgattgcgatttgttaacatcatcattggccttaattacttcttcaccttcgcccacttttttgcccgcaagctgttgcgctcggttggctataacctcattggcattcatgttactttgcgtgccagagcccgtttgccaaataaccaacggaaactggtcgtcgtgtttgcccgctaaaatttcgtcgcaaacggcagctattaaatcgcgtttttcaataggtaaaacgcccaattcgcaattggtataagcggccgccttttttaaataggcaaaaccatagataatttccaaaggcatagaggctgaaggccctattttaaaattgtttcttgagcgttctgtttgtgcgccccaaagtttatcggcaggtaccttaacctcgcccattgtgtccttttctattctaaattccatatattcttattgtttttattgtttattgtggcttgtactgcatgtactttttgttataatcttgagattttattggcctattttttaaagttacaaagttagttgttttgatatgtttattattatgatatatgttagtttttataagttttttaacagctatatgttttaataacctccaaaaaatggttaacttagcacttattgaaaatcaattatttaacactttaattacatcactatggcaacaattagattaggggacacggcaccaaattttacggcaatgtccaccgaaggaattattaattttcacgaatggttaggagatagttgggggatattgttttcgcatccagcggattacaccccagtatgtaccacagaattgggaacggtagcaaaatataaacctgaatttgataaaaggaacgtaaaggttgttgcgttaagtgtagatggggttgattcgcaccacggatgggttaaggatattaatgaaacacagcatacaacggttaatttcccgataattgccgatgaagataaaaaggtttccgaactttatgatatgattcatccaaacgccagcgataaatttaccgttcgctctgtttttgtaattggtgatgataaaaaagtaaagctaataattacctatcccgcttcaacaggcaggaattttgatgaactattgcgggttatcgattctttacagcttacggcctaccacaaggtagcaactcccgcaaactggaaaaacggtgacgatgttgtgatcgctcctgcggttaccaacgagcaaatcccatcgttattcccaaaagggcataaagaaataaaaccctatttacgaatgacgccacaacctaattaaataggtttatatttaagacaattaaaagcatggtagcagttattgctatgatgcttttttttatgcagataaaaatttgtttctgtaatcgacaggtgtcatatcggttacttttttgaaaacatccctaaacgatttcgtgtcgttgtaaccaacatcatacattacttcgtttacggtttttctgccatgttccaatgcttttttggccgcttcaatttttacgcgctgaatgtactctaaaatagtgtttgatgttgcttttttaaagcgacgttcaaacgtgcgtcgtgcaaggttgcacttttcacaaagcgcatcaacggttatttttgtattaaaatgtttttcaatgtagttttgggcctcaagaatttctaaatcctcgtgtgctttttgtcctttaaacatcataaaaggcgattggctttctctatcaatatcaatcataaaccctttcgatgccataatggcggtttccctacccgcatatttttcaattaaatacaccattaaattggtaaatgaataggcgccaccactggtatagataccgttagattcggttataatcttatcgtccatcaatagtacttccggaaacattgccctaaattcattcgcatactgccaatgtgtcgagcaaggttttccgttaagtaaaccagatgcggctaaataaaacgtaccaatgcaaaaactaaccagttcggtacctttgttgtagtggtttattagccacggcaatagttcggcgtttgtttttaaattcgcttccaaatcgccatgaatagcaggaataataattaaatgggtatgttcaacatctttaattaaacgttgcggctttatactaaacagtccgtttgtttgggtggaagtttgttcaatgcccacaagttctacatcaaatagcggtgttttgcccaattgctggtaataactgtttacccagttgaacatttggtaggcgccttcaatatttaccatactataatgtcctttaggaacataaattgaaatatgtttcataatagcgatttgttttttatcaaaactaatctttttaattgtcgcaatcaaccctttatattgtcgcatttacacattcggtctaaaaggtatattgctaactttgtgtaagtaagcagttggtgaagacgtttcattgaaaaacatctcgccttttttcaggttagaacaataaattaaaatagttacaacaaaaaataaatcattatggcacgacaattttggttcaaccttccagtaaaggatattaaccgttccaagcaattttatagaggtattggttttaaggaaaacgagatgcacaaagatgcaaaccatttggctagtttttatgtagatgataacaaaaccgtaatgatgttgtttcctgaagccgatatacagcattacgcagcaaaccccgttaccgataccaccaaaagcactgaagtattgcttaacattgatgcacaaaccaaagaagaagtagatgccatggtaaaaaccgtagaaagcgcaggcggaacggtttatacccaacccaacgaggttgatggctggatgtacggtttaggatttatggatccagatggacaccgttgggtcatgctgcacatggatataacaaaaatgccaaaacaataaaccttaaaactttaaaactatgttatttatcaatccgtaccttatctttaatggaaattgcgaaaccgcatttcttttctacaaatctgtttttgggggcgattttacccatatcgggcgttttagcgagatgccaaaagaagacggttgcgctgaaccaatgccagacgaatttggaaaccgcattatgcatgtatctctgccaatagggaaaaatagtcttatgggaagcgacagcaacccaagtatgggtgaagccattgttggacaaaacgtaaatatttccattacaaccgataccaaggcagaagccgataggttgtttgcgggcctttctgaaaaaggaaaagtaaccatgcccatgcaagataccttttggggagattactttggtatgaccgaagaccaatttggaattgagtggatgataagctacaataaagactatcaaataccagcgtaataaccttatatacgaggaattacaataaagaattaaaaccttcagcagatgttaaaaaaaatccacttcaaagtaagtattaaggcttcagcagaaaaaacatggaatattctttgggacgatgcgacctatcgtgcttggaccagtgcttttagcgaaggttcacatgcggtttcaaattggaaagaaggaagcaaagtattgtttttagatggtaacggtagtgggatgttcagtaaaatccacaaactcataccacatgcctttatggggtttgagcacctgggaattattaaaaataacgaagaacaaccacaagatgaattcaccaaaacctgggctggagctcgggaagattatacgctaaccgaaaaggacggtgttaccattcttgaggttcttttggattcggatgaagaatttgaacactattttagtaacaccttcccgaaagcccttcaattggttaaacaattagcagaacaataacataaaactaagaaaatggtacaccaactttttgttaatcttggggttgaagatttagacggccaccaatgtgaagttttttttatggatgaacgtaaatttccaagcgaataacatgctatggttgaggtttttaaaactaatattgataacgaattattggccaatgcagtgttatatgagttaacattgtatatgccccactcgaaaatcaattttgatttagaagattgcgatagtattttgcgcattgaaaataacaaggtaaacctcgatttggtgataggtatagttaacaataaaggatgttattgcgagcccttgccctaataaatcttaaaaactatgttaataaattttaatttgatattgtgtaacaagaagctttgcattatatttgcttaatatttttaacagatacttacaacaatgtttgattttgaccaatatttaggattcttagcttttttaaccatcttgaccattgggttttggttaatgatttttttaataacctttgtaataccttattggattggaggtgctttgatggagcgtttaaaagagattagggcagaaaaaaaggccaaacgtcaaaattcataaagaaaataaatagatatttaaaaaagggaagctaaaatttagtttccctttttttttatggtaatctggttgaaaatggttgccggtttttttcaaaaacattttataattcatcgttggcaactggaatcccaggattatggaaagaacagtttttactttggggcatcaaaccattaacgaattagaaacagaaatgtgtagctaaattccagccgcttaaatctcgcatttaattgtccaacttttttgttgctaacacactatttatttaacgccctattggtagggataatttaccatcgctgtatgtatttgttaaccatattataaccatggtacatacatgttataaccacgctataaccttatcaattttttatatattagcaagtatcttaaagcgagttacggttgtagtcatgcatgatgttaaacaggtataaaattatttattatggcaaagcaaaaaggcattttaccattggtgggaacccttggaggcattaatttctattatttgaatggaaaacctgttgccagaaaatcaggaggtggctttagtggtaaggccataaaaacaaaagccagtatgcaacgtgtacgcgaaaacgggcgtgagtttggacattgttctggagtcaataaggtttttagacaggctttaagacctttttatataggatatacctttacacatttccatagtaggctgatgggcttgtttaccacattaaaggatttggaccttatacatgaacgtggaaaccgtgtggtagcgatggggctaaacactgctgagggtgcgatcgtgttaaaacagtttcattatacgcccgattgcgatgtgcgccaggttttgccttttaattttgccgtagccgcaaatacctttgctttaagcatttctgaatttgatggtaagcgcgttaaatttattgcaggcgctacccatataaaactcatgtatggtgttttggactttaatttcgacacactagcttttgatttgcatttggctacaccggtggtacttgataaagacgccaatattagcaatgtattattaacacccaacagcttgccccttggtattgggacgcctcttagcgttttgggcgtgcgcttttatcaagccattgatggggttttgtatgatttacaagctaaaaatgccctagggtttgtggtggtgtaggcttctctaaattttttaaccagtccgtatccattttttactgctgttgggtttataaagttatccaaacaaaaatgatgatgatctactgctcattttctggtttctgagttatataaaatgaaaagtcccaccgaagcaggactaaagattttcatctacggcatatagccttattgtgataagattaaagattagaataaaattttcacaaaacaaatataataaaatttgaataaatacaacaaaaaagtaagaaaataatttgcttttttgtaagtttatgtctgttgaaaaattgacaaaattgacaaggatttaaggttaaaccattccttaaaacaacgaacctccaataaaattggaggctctaattaggtcacctttcggttcaatcccacggttcacttgataacaaggaccttattgtgatttgattaaagcaaatgtaaaaaaataattgatacaaatataaaaatgaatagaataaaacttggtttagatttaggaaccaatagtattggttggtcagttttagaaaaacaagaaggagtatatgatttttttaaaaaagaagacgaaaatggagaattaatcccatctaaaggcagttatattttttcaaaaagcgttgacgcaaatgaaaactcaaaagcctctgaaaggcgaggattcagaggtgcaagacgaagaattgatagaattcgtttgaggaaaattgccactttgaaagttcttgacgaatttggtttgtgtccaaaatttaagtctggtgaattaaatagatggaaaaataagaaaatttatccttgtgaaaatggtgattttattgattggcaacgaactggaaaaaagaatggaaacagccaaacagagaaactaagacaaccttattatttaaggtatttagctgctactaaaccaggaatgatggatacaaatgatggaaaatcgcaacttggcagagctttttatcatttatctcaaagaagaggttatttatccaattcagaagaagaacaatctgacgataaaattgatttgtttaaatcaggtgttttaaacttacttgaaaaagttgctaattctgtatcatttaaagaagagttagaagttatatttgaccaatataagaatgataaaaaagtaaagagtttaaacaacgttattaataaagaactaaaaaaagaaattgtttttgaaaatataaaatcatttgtcaaatcagaatttgaaaaacctgaaaatttaggaaaagtaatggcaggaattggagaactttcaaaagagatgaaaggatttccaacaatggggtgttatttttattcaatttacaatagaataaataaagatacgggattaataaatagaattagaggaagatatacacatagagaagatcattacgaagcagaatttaattatatatgtgaaattcaaaaaattataggagatttaaaagataaattacataatgctattttttatcaaagaccattaaaaagtcaaaaaggattagtagcaaaatgtacactagaacccaaacgaaaaagaattgctttatcgcatccattattcgaagagtttagaatgtgggaatccattaatagaatcaagattaaaagagaatttgatgataaattagattttctaaataaagaagaaaaagaactaataaaaaatgagttttcacaaataaccgattttgagtttggtaaaattgcaaataaattaagcaatggactgccttataattatattaaacgaccagaagaagtttttataaaaggaaaaaccgacaaagattcagaaatagaagctgttataagttttaattttccgatggataagaaattttctgcttgtccaactatttcagctttaaagaaaattattggtgccgaaaaatatagcacaatgccacttttaaattctggacataaagatgaaaaaggaaagaagcaaataagtattgaagatgtttggcattgtttacaaatggatagttttggttcaaaagataagaaaactgttagagaagagtttgcaaaaaatcatttgcaacttgatgaaaaaggaattgaaaatcttgtaaagataaaattagtcaaaggttatggaagtttaagcaaatctgctataaagaaaataattccttttttggaaaaaggtgaaatttatacaaatgcggttttcttggctaatattacagaagttttaggaagaaaaatttcagaagttgaacaaaatcaagtttctgaaatcattaaaaaatcattagagaatttcagaatagaaaaacaaaataaaggaattgtaaataattacatttccaaatttaaagataatcgagaaaattcattaggaaacaatgaattaagcattaatgcttttaaaaaggaattagattatgaaattgctaattggattggagaagttcaattaggttcaatgaaaaaagaagaagtttcaaaaattacggaaacttgttggaacttgttttttgaagctgcatgcgataaattacctaaagatgtaaactatctcacagcgaaaacaattccaatttttattgaagaaggattaagacgagtttttccaaacgataaaattgatgttactaaattatatcatccatcagcaatggaagcatatccaaaagcagaaaaaaaattaggtaatcctgaaataacctcaataaaaaatcctgtttttgatagagcaatgcatcaagttaagcgactatgcaatgaattaatcagaaaaggtttggtagataaagaaaccgaagttaatcttgaagttgcaggagaaattaatagtgcaagttacagaagagctttgactatttggcaaaaagaacaagaagaaataagaacttgggctagagaaaaaattattgaatgttatccagaagaagatagaaaaaataaaataccaacagatactgaagtagctaaatatattttatatagtgagcaaaatggaagatgtttatatacttctgaaacaattacaccaagagattttttgaataaacaaaccatttatgatattgagcacacaattccaagaagcaaaaacaatgataattctttaaaaaataaaaccttagcaaattatgatttcaacaggaattataaaaaagcaattcttccaggtttgataaatgtaaattataaaggtgagcaaatttataaagaaactattttattaaacagaaacgagcatttaaaatcatattcttttgttgggaaaaaaccaaacatgaatattgtatggaatgtttcattaagtgatttaaaatttgaatataaaaaattcaaaaatgcagcaaaagctataactgatgcagttgctcatgatgaggtaatgaaaatggctcattacaccaaaatgaaattagattatttacgagaaaaatatagaaattttgaaattgaagaaatcaataatcaatttacaaatgcgaaccttgttgatacaagaataatcacaaaatactctagagcatatttgaactcctatttcaataaagtaaatgtagttaatggaaaaataacagacactctgcgaaaaatttggggacttcaaggagaagaagatgttaaagataggagtaatcatatccatcattgtattgacgcaattgtggtagcttgtgtagagaaagggacttcaaatagaatttctgaattatatcacaaatatgaaaatgattattttaggggaaattctaatcccagaattagctcaaaggaaccaatgaaaaattttgttgagcgaatgaagaatttgcacaaagaagttttggtttatcacaaacaaaccgatagaattaaaccactcttaataaacgctcaaaaagaaaatacaaaaaaattaaatttaagaggaagactcaatagtcaaaacccatatgcacatattaagaaggatggtgagttaatttttgcacaaagagaaaaggtttcaaatataacagttaaagatattcaagaaaatatagttgatgaaggaataaaaaaacgaatcttgaattttacaaaagattttaatatagaggaatttgttaaagaaagtaataagttgggttatataattcttccaaagtattatgatgaagaaaagaataaagatattagtgaaatgattattaaaagattgagattaaaatcatcaaaatcaaatttaaaaaattataaagaagtaaggaaaatagatagaaatcaaactatagataaatatggtaagttgaaatatggtcataaatttgacttttatttcgacaaggattcttatacaaattatgaagcaagaatttatggtgatttaattcctgataagcccggaaaaaagacaccatttacaaatagaaattcaaatcttataaataactataatattgtaaaaaatgatttcccagtagaattaaataagccaattttcacattgcatcaaggtgatatgtttatagtttttaataataatcctgaagaaattgaatggaataataatatagatttacaacataggctatttaaagttgttaagtttacagaagacaaagaaaaaggagaaataaaacaaataattttttcaagacataattatgcattaggtgatgtagattctgcaatttctacatctgaaaatgagttgtataacttatcaggtgttgtattaagaaaaagtgtatcttctttacgagttatacctgcaaaaatcgatgccttaggtaaattagatgtaacttttagtaaagattttataaattcaagaaataattaaaaaacttacatttgtaaattatgaatgaatcaaaactggcaaaaggacaaatataaaaaatcctaacaaaattggataaggttgagaaaattggttttagtactaaaactaaagagtaacttttaattgagataaaaagaaaattaggattgaaataaattttgaaaaagttctttgacataaaattttcataatcttaaacaaccaaaccacaacggaaaatcttccgattttctgacaacggattttccgttgtggtttgattaaagattagaaaacacgatattataccgtccatggtactgtattaatgtcctgttgtggtttgattaaagattagaaaacacgatattcatcttaaaacaaaaaaatcaataataatcgttgtggtttgattaaagattagaaaacacgatattaactatggactacacaaccagcagaaaggcgttgtggtttgattaaagattagaaaacacgatattagttggtgtgttaccttctgatatttaggtgtttattgtcaaaatatcgtgataaaaatgcttcttttttgcaatgataaggcaagattgaggcattttttatttttaaattattttaatattaaattttttcgttaatttttgtgtttgtagggacaggtcgcgacctgtccgtacgtggatattagatgttttgtttttgtgattcgggtaggtggacaggtcgcgacctgtccgtacaggattgattgatgttttgtttatgtgattcgggtgggtggacaggtcgcgatctgtccgtacagaatcaatcattataattttttgaataaataatgaaaaacaggaaaagaaatcgaatggcaggttttgattataccagcaatcatgtttatttcgttacggtttgtgttcagaacaggttatgttgttttggttccgtaatttccgaaggggcaggtcgcgacctgtccgtacaaaatccccatgataaaaatccccatgatttgccacaaaattataaaatgcaattaaatcaattcggattaattgttgaagaaaaaataaattggttagaacagcactatctgtacgttgaaatccataattatgttgttatgccaaatcatattcacattctattggaaattaacagcacaaaaattagtggtttagatgtgaaaattaaatcgctatcaagcataattggcgcattaaaaaccacttcttcaaaggaaattcatttgaagggtttaaatgatttcagctggcagcgttcctttcacgatcatattgtaaaaaacgaaccatcctacttaaatatagataattacataagcctaaacgccaaaaactggtataaagatgttttttttaatcaaaattgaatttattaaaacaattccaattgggttggtggcgcttctttgggcacttctgcacgaccccaaaaattcatgatgtgtccaaattgtttgtcggttatgcgcaaaacgctcacttttcccagaggaggcaataattttttaatgcgcttttcatgtacatcggcactttcgccacttgcacaatgccgtatgtaaacagaatattgcatcatggcaaaaccatcctttaacaggttttttctaaagcctgaagccgtttttctatctttggcggtatcggttggcaagtcaaaaaaaacaaataaccacataatcctatacccatttagttccatagttttggatacttgatttttttgcgctcgccactgtagcattgttgcagtgaactagccgttttttgtagcgctaccatcaacggacttttttctgttttaaaatatacggttctggtaagtacttccaacaacatagattttatttcggttgttaattcttgttcgtcataatgctgcatgatggtataaaccgcttcatcaaccaggggcctaaagggttccataatgtcgtcggccaaggcaaaggcattatatttgcttttatggtgaatgcccaaggtgtttaacaaaccactgcccgatagggcacgggcggttgcagcccttaatatggcatagccgtagtttaggaaattatttggataatcgccaaggcgctctcttttgaagtctgtttcaaaaaacgatttccaataaaaactggcagcaaccccttccatatttgaggaatcgccacttaatactttactggccagatactcaaatttattttcggtacctgtaatggttttaagaagcaagccttgatttgttattttttctataaccgtttgttgccataattgtttttttaaaggaacactggcatcaatttggtacttaaaaatttcctgttggatgtggtggctgtttaaatttaataacatgccattgggaaggtgtttttcatcgcaaaaaatacaagcgcaattattattgattaatttgttgagtgccggcatgcttatataaacctcgtgatggtcgattataacatatccaatatcttctatggggatggttctgtttttggtttcagaagaaattacaagttgctcgttggaagtggttatagcgcacttattcgtgaaaaagagtgtctttttgatcatggttaattcttaaatttaggtatggatttcccaatgaatataaatgcagcaggaacacttaaatataataaaattcttgctatataagttgaaaaatgaaatgtttttaatataaagtaatcagaagcacctacatttttacctcaatttgtatttaaaatgcgtgtaatatggcaattgaatgggttttgcacacaattaagaaggataacaaacgggttttttattgaaaaaatgaacagtttaccataaaaaatggactgagtatttactaaatccttaaatttggaacttcgttggtaaataatatttttacttcaaaagaaccacctaccaacgaacattttaaatagcaaaccaatgacaaataacgcacttattgaaaatcaatatagaagaaccagcttgttcgaaaaagaaaacgttaattatttagtgcgtgttttaaaacgattcaatacggttcctaaggtaaacaacatcaatattattacgtcaaccagcgagcctaatgtgtttaaaatcgtgccaaataaatcgattgtaattggttcgttatttttggcgcaaccggtattggccttggtttatcttcggtatggtatagaatggcaactgtggtacaaagctttaaacaacgaaaaacagcatacggttttatgcgatttggctgcccttgaggtaacccgtattttttatagattgttgcctaaaaccgataaagaaaagctggaaaacctccattattttttaattgatttaataaaaaataacaacgattttactgcggaatatgtattaaagcacaacgacctgcaggctttccatgggttaaacagtgcccacaatgtgtttaacgacgcttggaaacccattattgaaaatttggcaaaaccaaccgaatacttacttatgtctgggggcgatttgaggttgaatattgatgaaattgaactgttgaacaaatatggatgcaggccgttccctaggcccgatgcttttaccttcgcctcatcaacagccaccagcgtgtccaatttcgcgttcgataaaactgataaagtaagaagcatattaattagaaacagcctaaaaaacggttttaaaaatgctactatcgaattttcggagttactaaaagataccctaaaaaaaatattgaggttgaatgatgagtgtgaaattatcttttcaccatccggcaccgattcttcccttcaaattgcggccattacccaaataatttcaaaaaaggacattacgcacgttttagttgcttccgatgaaacgggtagcggtgtgcccgcagcattaaaaggctgtcattttgaaaacacaacggctttaaattatccggttaaaaagggcgataaaattgagggctttcgggatatcgatttgataaaaattccttttagggatgaaaacggtgctttaaaaaccacccgtcaattggatgatgaggtttttaatgccatttcaaaaacgtatgccttgggtaggcacgtggtgctgcataccatggatcaatcgaagttaggctatcaatctcccagcgaacaattgatgcaaactttaggcaaacaaaaaaacgcatccatacaagttattgttgatgccgcacaacttagactggacccggccgacatacaaaagtatttgaacaaaggctatattgtaagcattacgggaagcaaatattttacagggcctccatattcgggagcattaattttgcccaaaagtgttagtaaattaatccgttcggcaaaaaataccttgccagaaggtttaacccaatattacaatcattccgattggccaacctcgtggtgctgttcaaataatttatccgaaggctataattttggctcctatatgcgttggaacgcggccattgttgaaatggaacggtattttagaacacctattttatatagaaacatgggcattgaaatgttctgtaattttgttgaggattccataaacgatgccacttttttagaacctatttatgctgatgaagcaaaaacggataactatcatagtaaagaatttggattaaggaacatccgtaccattttccctttttttatcctaaagaacaacaaagtactttcggttgacgaagtaaaaaagctctatacactgttaaattccgatttatccgaacattttcaggatgctcctttagaaatcgtgaggcttgctgcccaaaaatgccatattggtcaggcggtaaacgtaaaatacaataatgctgttgaaagtgctattttaagaataagtttgggtgcgagggttatttccgaaagttgggtaaaccgcgatataagcctgttttttagaaatattgaaactcaaatgaaccaaattaccatcatcattaaaaagatagaattgattctcggtcatcccaaattattgaataactaagcgattttccgaaagccagttcctaattaaaaacaatacgcagtacaaaatactgaagcacatgaaacccctgatttatatggaaattttcaggatgcctgcaaaaaccgcttaaatttggagcatcatcaatcaataccttaacacctatttagtaaaaatgatagaacaacttttacagtacgacacaaaattgtttttgtttttaaacaacttgggttcgcccacctgggatgctttttggttggtggtaacgtaccggtttacgtttattccgctatatgtttttttattgtacttgctatacaaaaaatatggcctaaaaagcttgcttatttttgtagtggttattgcggttatgattacgtttaccgaccaaataaccaatgtttttaagcgtgcttttgaaagaacccgcccttgcggcgttaacgagttggccgataacatacggtttgtggttgggcattgtggaaagtacggattcttttccgggcatgcttcaaactctatggctacggctgtttttgcgggtttaatgttgcgcccttactataagaacctgatatttatcttgcttttttggagtgctatggtagcatacagcagaatttatgtaggggtgcattatccgttggatattttatgcggttttatgttcggggcattatcgggctatttgttttacagagtggccaactattttaatgggcgttatgctagggcttaaatggccgctaaacagattaccgataaggctttttctaataccgaaatatcaataattttattttttataattaaaaattcaccgtcaatctgaacttggaatacaggtttgtcttttgatattttcacatggtttgattgataggttttaacctcttttaagaaggtatggcgttttataaacattaacaatgtgaatagcacaattttaagactgcttagtttcggcacgattagaatgtccagtttaccatcatccagtagtgcttttggcgttaaacttacatggtagcccatttcatttgaatttgaaataaaaattaaaaaaggcttgtgtataaaggttttaccgtttaggttggtttccacttcagtaagtttgctatttgcgtttttaagtgattttattgtggctttaatatagcttgcaatgtttcgttcgttggaagcttcatagttttttattacctgggcatcaaaaccaatgccggtattgctgaaaaaatagtgctggtttaacttacctacatcaatttgtttggtgtcctgtttttttattaattcgatggctttatcgatgtttttagggatgttcaaattggatgccagtccgtttccagaaccaatggggataatccctaaaggaatcgtactatttaccaaacaagatgccacttcgtttatggtaccatcgccaccacaggccacaataacatcggccttttcaagaatggactcttttgtgagtacaatagcgtgttttttatagcaggttggtttaataacaaaagtgtaatcttctttgttaaaatacttgtttagtatggataaatcgaggctattattgcctttaccagcaataggatttaaaatgaaatgtatttgtttcaatagttatctttttaatttaagtcctccgtttcgatacatataatcggccacttggtaaaaagaaatggtttcttcaagcatttttgtatcgatgtctttggatattaagttgtcgttatctgtttcccacacaaaataattggcaataaactggtcgctaagtaccattaattttttatcctttaagagtcccagatttctgtaattgccaataaaggcgcgttcgtcttctttttgcatttgcataatatccttgccaaacaaattagaggtataatcccaatttaaaaggccaaaaagagtggggaacatgtctatttgcgaacttagcttttctattttttgtggtgccacattttgtaggttcacgatcatggcaggaatacggtatttatcaatgttcaggctccatcgccctgcgctactggcacagtggtcggccatgatcacaaaaacggtattgttgtaccaaggttttgttttggcttgctttaaaaagttgccaatggcgtaatcggtatatttaatgccaccgtttctgcccgagcccgatggaatgtcaattttgccttcggggtaggtaaaaggtcggtggtttgaagtggtcataataaagttgaaaaacggcgcttcgttaagagcggccttatcggcttctttcagcactttattgtaaatatcttcatcgcaaacgccccaagcgttttcaaaggttacttcatcatcattgatattggtacgtttcgttttaattctggaatccaataaaaaacctctgcctctatcgattatattaaagccgttgccgccaaaataggtattcatattgtcaaaataaccatcgcccccataaaaaaagttgcgttcgtagccttgttccttgaatatttcgccaatggtaaataaattggtgttgttgtcgcgttttacaatgcttcttcccggggttggtggaatggaaagggttatggcttccatgccccgtacggtgcgtgtgcccgttgcgtacaaattggtgaaaaacagacttttattggacaaggaatcgagtgtgggcgttacattcaaatcgccccccaacgaattaagaaaagaggcacttaaactttcaatgcaaataaaaataacattgggtttttttgtggggcgcaaaatgctatcggaatgggtgatggttctaaaaagatccttgttttcaggatttataaattcgctatttggggtttccagtttttgtttaactagggtaaaggccttgttggtatcgatggttttataaaattcggtgtacgatagttggttgcttctaaaagccgcaaaaaaagaataaatgcccgtttttgcaatttcgtcgttgtatcggtttttaaactgttcggcatcttcgttttttacaaatagggcaaaaatggcagcaataacaataatgaaggctgaagggattagtttttccttgaaaacagtttcattattgaacgtgtccttaaaaatatgttgtttgtgggtaataaagagcaataatgaaagcaccaccaaaatagcgcttaacaataaaggaatggggtacgattcattaatgtttttaaccacttcaaaggtatagattaaataatcgactgctataaagttgaagcgtctttggaattcgtcccaaaaggtaatttcggcaaagaacgaaaacaagaaaataagcaaccccagcgcataaccaaaataggtgatgagcctatcgaaaagagacccataaagtttttttggaacgagcaataaataaataacgtagggcagtgcaaaaaaagaaaccgtacctaaatcgaacaagagcccaatgatgaaggtgtttgccaaaacgaacaaggaattgtctgtttcgtggaagcttgattgtaaaaagtatatcctgattatgaatgaaaacaggagaaatgttaaaataaaggccctgagtaatttgaaacgcttagggaaaattttgttccgcatggtcgtgggtttagtgttgttgggtttttatgagcacatcacaaatttactaggcttccttgttaaaacttgtaaatttagtgtgaaaattatttaaggggtacagcaatttttacgttgtcccaagccatggttaattttaaactgtcggttgaattatcaaaagctatggtaaactgttccacatgggtatccaatttttttacaggaacatcaatgtctatcacgtcgtagttggggtcccacatgggcttcatttccgaatttaccccccacggatattgttttgaattgaagattacggtccatacgctgtctttgggcactgtccataaggtgtattttccagcgggcagggggttgccttctatggaaagcggtttgttggtctcaaaagtggtggcttcgttggcaccggtacgccatacctggttgtaaggcactaaaccaccaaaaattacgcgtccttttttgaagggccggttatagaacaccttcatttttaaatcgttaagttcaaattttacggtgtcttttggacttaaccgtgtttcaaaaatattttcaacaaacgtagagtataaaaacaagcctaaagcaaaaatggacaaaagaattaaggtacgttttaaaaaggtgttcataaattcgaggttattagggtataaagatactttaaaagtaataatttctaaaaatgcaaacgaacatttgcatcgttttgttttattggctcaaaataaatatattttttgcaacatctttctttatataacgctttttttgcatttattaaatttaatgccaatgggttaattaatgttaggctgtgtttatttcttccgtaatcgcttcaattatttggtttaggggcgtttcataatcaaaccaaagtgtgttttcatctcttttaaaccaggtgagttggcgttttgcaaagcgcctcgaattcttttttatttctgaaattgcaaaatcgagagtccattcaccttctaaataattgaataattctttgtaaccaacggtatttaaggcatttaggtttttgtggggtaataattttttgacttcatccagcaaacctgcttccatcatcaaatcaacacgttggttgatgcgcttgtaaatggtttccctttcggcggttaatcctacggtaatggttttaaaatttcgtgatgtactttttttgtttaaaaaggatgaatacggttttcccgttcctaagcaaatttccaaagcacggataacccgatgcggattcgcaatttcgatgtttttaaacgaggttttatctaaaatcttcaattggttttgtaggtgaagaaggccttcggtttctaattgcgtgtttaaattttcacgaatggatgcat

SEQ ID NO: 4444 - DNA, 24293 bp, synthetic construct
  misc_feature 1..24293: note = Synthetic
  variation 14659..15234: note = note, n is a, c, g, or t
  source 1..24293: mol_type = other DNA
tgaatttagtgttttttgaattcctaatctggataaaattccttcaatataacctttgaataaaaagaaatcggaaggtttttgaggattagtccagttttcctgatttttgttccccgttaaaaacaaacttaaatgtttgtgttcttcgtatcctgaaaggaatttatggtaggttttaccaaattcaaataattttaaatcggcatttttacgattgatattgtaagcaatggcttctaatcctgaaaacaataaagattgacgcatagttgccaaatcgttactcaatggattcaacatcgttacattgtgttcttcttttagcatttctgaaagctgaacataagaagatgttgttaaggaattggccatcatttcgtggaatccttgtgaattcaattggtttccaacgatgttttgcaacttgtaatcttcgtttcttggggcgttaaatacagtcgcgtttaacttattcgaaaaatcaattttgttatatccatagactctaaggatttcttcaataacatcaatttctctttgtacatccacacgataagccggaatagtcaaacctaatcctgcttctgaaacactgtttactttgatgtctaaagaaactaaaatttgtttgatagtatcttttgggattttttgtccaatgattttagttaccttatcaaaattcaaaaacactgagaaatcttcgattttcttggtgttgatgtcaacaatttccgaagtgatatttccgccggctacttcctgaattaataaagcggcacgttttaaagcataagctgtaatggatgggtcaattcctctttcaaatctaaaagaagcatcggtactgatttgatgtcttttagctgtttttctaacgctaaccggattaaaataagcgctttctaagaaaatagcagtagtgtgattgcttactccggaatgttgtccgcctaaaactccggcaatacacaaagatcctttttcatcacaaatcattaagtcttcttcgtgtaaagttctttctacttcgtccagagtagtaaatttagttccggcttccactgtttttacatggattttaccgttgattttagcagcatcaaaagcatgtaatggttgtcctaaatcatgtaaaacataattcgttacatccacaatattgtttttaggattgattccaatagctttcaaacggtcttgtaaccaggccggagatggttttacagtaactcccgaaatagtaactccgcaataacgtggagccaaaagtggtgcttcgacattgacatcaatttttaaagtgcgcatatccactctgaaattactcacagatggcgtaatcaattcaacgctaactccgttttgaagtaaaccagctcttaaatcacgggcagtccccaagtgactcattgcatcggcacggtttggcgttaagccaatttcgaaaacttcgtcattttctattttgaaaactttagcagctggagttccaggagctaaatcgttatccaggaccataattccgtcatgactttctccaagacctaattcgtcttcggcgcaaatcattccgtgactttcctgtccgcggatttttcctttttttatggtaaatgaatttccttctttatcgtataaaacggttccaatagtcgctacaggtactttttgtcctgcggcaacattgcttgcaccacaaacaacttgtattggtgctccatttcctaaatcaacggtagttacttttaatttgtcggcatcgggatgtttttcacatgtaagtacatggccaactacaataccttctaatcctcctttcacagattgatatttttcaacaacctctacttcaagtcctaaatcagtcagtaaagctgctgtttgttctgaattccaatcggttttaatgaattgttttaaccagttgtaagatattttcatttgaatattttaataaggttgcaaatataaggattgtcaaccgagcttcaaagggattaaactttgttttctgtttattattaataatattttttgctgaagtataattaatgtttcgaaacaaaagtcagatgatttcttcaatgtgttttttgatgttttcggcaatttttgaagttggtaaatcgttgtcgtcatgtccaaaaggttcttcaatttcttcagcaattaattctaaacttgccaagacatagaaaataaaaataaccacaggaattacaaaataaccgaggttaaaaacataaccaaaaggaagtgtcatgacatagaagaagatgaattttttcaaaaaagcactataagaataggggataggagtatttttaatacgttcgcaggcgccacaaatatcggttaaagactggatttcactatttaaaataatcagttggtctcctgtgattttttgacttttgtacagctcatttaccttcagaaataacattttagctacctgattcgggcgatgtgaatggtggtcgtacaatataatatcttcagcgagttgtttggctgtttcttcgtctttgagatgtttattcaggatagaagcgtaaacgggaataatttttctaaaaaatgcccggtctttttcgtcttcaatgatagcgtttagtttaatggccagatttcggctgttgtttaccaatgcaccccacatttttcgaccttcccaccagcgatcataagcggtgttggttctgaaaacaagcaaaagcgaaatcacaaatcccagcattccatgcatcatcgaaatgttttttacatggctctcatccggcaaatcccaatattccagttctaaataagcaactgctgtggagtaaattccaattaagatgattaaaggaaataattgtcggaaagtgtcggctttgtgaaaacgaaaaataaaagtaagccagtcttttgggttgtatgaaatcatcagggttgtttttttagtcgaaaactgtttttttagtttgcaaaaggaacgctttggtaagcacctaaatcgggcggtaaagttcggctttttccgttaatgtccagtggaattaaataagcaggatttccttttgcgaaagcggcagaagtattgttgatgttgagtttgttattggcaatgtctaaaaatcgcggattttgattcaaaataacattgttgtaatgactgttgtctttgaaattgtataaagaactggaattgttggattcggattttaataagcaattgttgaattggaattcaaaaagagcagcctcatttttatccaaaaacaattcgtcagcataggctccgtaaataatgcaattgttaaaagtggcctgggttaaatctttagctgttggcgttttgtttgttttgtaattgtttaaaagtaaagccttttgttgcgaaccgttccaatagttgttaatggtgcaatgcgtaaattgataatttccgccatagatgcagcctaaagtggctattccggcagtattaatgaccagattttcgccggtaattttggcgttttgagctaaaattccatagttggacgaattgtaaatttggctgtttttaatactaattgtggtgttgtcctgactgtcaattcgtaaaccaattgttgcattttttatcgtaagatgattgatgttgtgattagtgcttccgtcacgaagccaaaccgttgcccattgtccgggaatattggagtaatcagcttccaggcggtcgctttcaaaaatgatttcgttttctgattggctcgtttcagaaaccgttccgttacattgcaaagaagccgattgcggtacaattaaaccggaattagtatgaaaataaacccgtgctccggcgtcaaaaacgactgtttttccttcgggaacggtggcgtaaccgtaaattacataagctttttgattggtaaaatgtaattcgtttccattagtcgggtcattttcatctaaataaaaaccattaaattcggtatcgtcaaaagtgacggtttcggtagtgttattgtttactctttttgggtataaaaatacagcatctttgactaatgtgagcagttttactttttgcaaattattaccgttgtcaaattcaatttcgtcggtatataaaaaatcatccggattggcatcagcgatggtcggcgtagtttcgataaaaatataaagactgtctttggctaataaaacgacgtctgagaaaattttgttgttttgtccctgcatgccatcaacggttatgcggtatttcgaagcaagtcctttgcctaattttatggttggaatactaatatctttcttgctgtggttgtacacttttaaaagataagtactcgaactaattgttgaaaaaacagtgtctaaaaaaacggtatctctcgaaaaaactaatttcccgttgctgggaacagtcgaaaaatctgttcggcaggaacaaatagtaaggagaattccgaaaataaaaagtagcgaaaaaggacgcatgtgttttgtttttttgtaaaaatagaaaaaaactcattcgttgacactttatttaatcggtttgaagtgaatatagcagctattttcgagcggaatatttattcttttctttatttttacaagcaattaaattaaaagcatgacattcgataaagaaaaaattctggaatactgtaatcgtatttcaaaaaataccttaatggaaaccttaaatattcaatatgtagatgcaggtgaaggttttttaactgctacaatgcctgttaatccgagtgttcatcaaccgatggggctgttgcacggaggtgctacagtagctttagccgagagtgtaggaagcgcagcctcttttatttttattaatccagaagtaagcgaagtgcgcggaatagaaatttcggccaatcatttaaaatccaaaagagaaggaatggttacggccacggctaaaattattcatcagggtgccagcattcatttgtgggaaataaaggttgtggatgaaaggaataatttggtttccttgtgcaaactcaccaatatggttttgcctaaaagaaagaaaacacactaaacactatacaactaacttttaataaaacaatatatgattgatttttttataaaagtgaagcagcaggaagcccaaaaacttccttttgtgatttacagtaaaccttacaaaacagaagtgagaggtttttttcaaaaaaatgatcatttgtattttgccgaaaccttagatgaaaccggttttgtctttgctccttttgatggcaatcagatgatattgattccaaaaaatcagtcggtaatttgggaatcagatattgttacatttgatgaaaatcattcgcatatttacgtttcagaggaatatattgaggagaaatctcattttgaaaatttgattcaaaaagcaattacaacgattaaaaatggcgaattgactaaggtggtgctttcccgaaaagaaattctggaggttccggattttgacttggttactgtttttaccaaattaattcaacgttttccaacggcattttgctattgctggtaccatccaaaaataggtttgtggatgggagccacgccggagcgtttgttaaaagcgagtaagaaaaagttttgtacgatggccttagccggaacacaaaattttgaaggaaaaaccgatgtgatttgggaacaaaaagaagtcgaagaacaacaatatgtcaccgattatattttggaaaatctcaagggcttaacttctgaggtggcaatttccagtccgtacactgtgcaggcgggaaatgtgttgcatattaaaaccgatattgaaggggttattaataaagaatccaggttaaatcaggtggtttcggttttgcatcctacacctgccatttgtggtttaccgaaagaagcggcaaaggcatttattttggaaaatgaagattacaatcgggaatattatacgggatttttaggcgaattgaataaaaaagattttgccgagaaaaaacaaaaatccgacttgtatgtgaatttgcgttgtatgcaaattaagtccaggcaggcacatttgtacatcggatgcggaattaccaaagaaagtattccggagaaagaatggagtgaaagtgtgaataaatcgatgacgatgaaaagtgtgctttgaagttagaagacagaaaacagaaagcagaaaaaagagaaaagagaaacaaaataatgaaattagatatattagcgtttggagcgcatccggatgatgtagaattaggatgtgcggggactattttaaaagaagtttctttagggaaaaaagttggaattattgatttgacccgtggcgaattaggaacccgcggatcagctgaaatcagagatgaggaagcagccgcagcggctaaaatattaggcgtttcggtaagggaaaatttgaatatgcgggatggtttttttatgaatgatgaaaaacaccaactggaaatcatcaaaatgattcgtaaatatcagcctgaaattgtgttgtgcaacgctattgacgatcgtcacattgatcacggaaaaggaagcaagttagtttccgatgcctgttttttatccggattgatgaaaatagaaacggagtcaggaggggagtctcaaaaagcctggcgtcccaaagtggtgtaccattatattcagtggaaaaatatcgaacctgattttgtagtggacatcaccggattcaccgaaaaaaaaatagaagctattttggcttatcgttcacaattttatgacccgaattctaatgaaccggagtcgccaattacctccaaaaacttttttgagagcttaaattatcgttccagagaccttgggcgcttggtaggtttggaatttgcggaaggatttaccgttgaaagattattggcggtcaatagtttagcagatttgcgataattttttttaatttttattaaaaaaatgtttggagaactcgatttctgttgtatctttgccaccgcaaacaagcaaacaataaatggtggttgtagctcagctggttagagcatcggtttgtggtgccgagggtcgtgggttcgaaccccatcatccacccaaaaatcaaaagcctcttcgaaagaagaggctttttttgtgctttataattctgttttttatttccaactcgtttgaatttcgtttagcatagtttgcgaacctccattataaaaaattccaaaaccgccccaaattgaaggtttgataagagcactaagaattgtttcctgttgattgtttgcagtaagtgaatctgtcggtttgttgctcaaagctgctgtcaaatgattgttttttacttccagactgatattgcagcgaccgttaaaagcgtgggtagttacggcattgctgatttcgcttgaaattccgttttggtattccaataaaatacaatctacagcatcatggtgtttagtggttcggataaggcgtaaagcatagcctgaattagttttggcatcccatttaatgaggatgtccatgtacatatgtgcaacactaaatccctgaccggcagttttaaatggagttagctgaagattaaatgttatgtcggtgtaatttccttttacgggagtgtagagcaggcgggcacttcggcctgtaggtaaaaggccaaactggttggcagcaccatcaaatccttcgccaaaataccaggcgtcttttaggtttgaattattgatatcttctttgtcaaaaggagaaaaagtccagaatccgggaataatttccaattgatctttggttgaactgtttttgaaattagttatcagggtatttttgtttgctgtaatttctttggctgaaatagctttttgagtcactatttttatagtttttccggcatcactacgattgttttttggggcaagcgtcgccataatgtaataagacgaatcggcgatggttaagggatattctgttaaagggatattatctcttgaaaccgcaatttcaatcggatttccgcctttgttatcggtgcatcggtagtagtttatgattgtttggtctttgaaatcggtatttattttatactgaacgttaagaattccgttgttgatttttgcaaaatgaggagcttctgtaaaaaccggactttctaattttggcggactaattttaattactacagccgcttctaagcctgatgcggttttggctgtaatgataacatttctggagtctccgtttaaaagattcggaatgatttcgcactcattgctgtttgcagaaggttttaattcaataatagctttgtcctgagcggctactgaccagtttattttttcgggttgtacttcataatttccaaaacgaaaggctgaggcttttaacaaagctttgtctttttgggtttctaaagtttttagagaggtttcaattaataattgtgtgggtaaaaaacggaatttttgctgttgttctttttcagcggctaaaacgatatttttgatattcatcggatcccaatcgtcatttccggctaaaagattgtaggtgttgtaaatagtttttcctttaaaattgaaccgataagcatttaaaacttccaaattgctcatatcgatagtcgattcgggatttttgttttcaattaacacaggattgttatttaaactaacccaatattgataattgcgggttgtgagtggtagattatcattccagcccaaataaatcggattttcgccagtgaattttgtatctataactgccagttgtccatttgctttagtgaaaaattgattccctttggtaaaggaatgtattttacaatttaaaaaagcagcaccagtaccttttgtccaataaaatggtttggaattgtaaaagtctaaggtagaattgagataaacagctgttccgcaaagcgcatcatcagttgattcaaagtggcagcggtcaaaaagaacccttttgcctcccgtaaaaggacaaagattcagccggctgataaatcggcagttcctggccagaattttgtcgccatcgcaatggatgagctgtgcctgtacaattgccgttgctctttttactctgttaagttcaggttttaaaggaaagtttaaatctacattacaataatttccaaaagtgatattttcggcattagttccttcgccagatattttaaaaagcgtaaaattacccacagcgcctatagtttgcccgcgattagccgcaatgactacgttttcgggattgttggttaaaccaaaaaagcgcaaccaatcgcatttaatatttaaggcataaggtacagttccatttccttccggttttctaatttcggggtcatcaggattgtcaatccaatagacatttggagcaatgtacaaactcataggtgctgtttccgttccgttgctaagttgttttaccgcatcattgatagagttaaatacataaggatatttagcaagttgttctttactgaattgagcatctataaaaaaggcttttggtcctaatgtgatggtttttccctgataactgatggttttccctgtaaaagtaattggattttttggatctaaagattgataggacgattttgtttgtgcatttaaaaaaaaggcaattaataaaaacagactgcaaaaaagtggtttattcataatcaacggtttggttgatagtaaatatacagtaatttttgtaaaatatttgaggtagaaaatggaagagaaagaaaaagtcccaccgaagcgggactaaagattttcatctacggcatatagccttattgtgataagattaaagattttttgtaaaaaaaatatgaaataaaatactttttcagtagttttatgacctaggttttttatttataaacaacgaacctccaaataaattggaggctctaattaggtcacctttcggttcaatcccacggttcacttgaaaaacaaggaccttattgtgatttgattagggcaaatgtaatcaattaattgaaaaaaaaataaaaatgagtaaaataaaacttggtttagatttaggtacgaatagcattggttggactgttttagaaaagacaaatggagtttatgattttttaaagattgaagatgaaaaaggagatttaattccgtcaaaagggagttacattttttctaaaagtgttgatgctaatgaaaattcaaaagcttctgaacgaagaggttttagaggtgcaagacgtagaattgatagaattagattaagaaaaattgcaaccttgaaagtacttgaggagttcagtttgtgtccaaaatttgaagttggtgaattaaatcgatggaaaaataagaaaatttatccatgcgaaaatgttgattttattgattggcaacgaacaggaaaaaagaatggtaatagtcaaacagagaaattaaagcaaccttattatttgaggtatttagcagctacaacatctggaatgatggaaacagtagaaggcagattacaacttggaagagctttttatcatttatctcaaagaagaggttatttatctaattcagaagaagaacaatcagatgataaaattgatttgtttaaaacagatgtaaaaaaactacttgaaaattgtagtggttctggtgattttaaagagccgtatgaagttatttttaatttatataaatcagatgataaagttaaaagactgaattcaaaaatagcgaaagtattaaaaattgagcaactaatagaaaacataaaatcttttattaaaactgagtttgataaaccagaaaatttaggaaaagtaatggctgggattggagaactttctaaggaaatgaaaggttttccaacgatgggatgttatttttattcaatttataatactgtaaataaaaattcgggattgatcaataggataagaggtagatatacacatagagaagaacattacgaagctgaatttaattatatctgtaaaattcaaaatattgcaggtgagttgaaagataaattgcataatgccattttttatcaacgaccattaaaaagtcaaaaaggattagttgcaaaatgtacactagaacctaaacgaaaaagaattgcattatctcatccattatttgaggaattcagaatgtgggaatctataaataggattaaaataaaaagagaatttgaagatagattagattttttaaattatggagagaaagaacttatcaaaaacgagtttttacagattactgattttgagtttaataaaatcgcaaataaattaagtaatggccttccgtataattatatcaagcgaccagaagaagtttatattaagggaaagttcgataaagagtttgaaacaaaagcagttattagtttcaattttccaatggataagaagttttctgcttgtccaacaacttcatctttgaagaaaataattggtaatgagaattacaatgctatgcaacttttaaattctggttataaagatgaaaaaggaaagaaacagttaagtattgaagatgtttggcattgtttacagttagattcttttggttcaaaagacaagaaaactgttagacaagaatttgcaaaaaagcatttactacttgatgaaaaaggaattgaaaactttgtaaaattaaagttagtaaaaggatatggcagtttaagtaaatcagccatcaaaaaaataattccgtttttagaaaaaggagaaatttatacaaatgcagttttcctggctaatgttactgaagttttagggcgtaaaatttcagataacgaacaaaagcaaataggagaaataattaaagttgcattagagaattttaggttagaaaaacaaaataaaggaattgtaaataattatatcagtaaatttaaatcagacaaagagaattctttgggtaataatcaatttagtattgaagtacataaaaaagagttagattatgaaattgctaattggattggcgaaattcaattggcagcgatgaaaaaagaagaagttttagaaattactgaaacttgttgggaattgttttatgaagttgcgtgtgatagattaccaaaagatgtaaactatcaatcaactaaaacgattcctgaattcatttacgaaggattacatatattttttcctgatgacaaaattgacgtttcaaaattatatcatccttcagcaattgaggcataccctaaagcggataaaaaccttggtaatccagaaattacatcaataaaaaatcctgtttttgatagagcaatgcaccaagtaaaaagattgtgtaatgaattaatcagaaaaggattggttgataaagaaactgaagttaatcttgaagtagcaggagaaatcaatagtgcaagttatagaagagcattatctcaatggcaaaaagagcaagaagaaataagaacttgggcaaaagaaaaaattattgattgttacacaaaagaatttagcgataataaaatacctaccgaaacggaaatttcaaagtttattttatatagtgaacaaaacggaagatgtttatatacctctgaaacaataactccaagaaatttcttgaacaaacaaaccatctatgatattgagcatacaattcccagaagtaaaaacaatgacaattctttaaaaaataaaacattagctagttatgattttaatagaaattataaaaaagctattctgcccggtttactaaatgtaaatttcaatggaaatcagattaacaaagaaattattttacttaatagagataagcatttaaaatcgtattcatttgtaggtaaaaaacctaatatgaatattgtgtggaatgtttcattgagtgatttaaaatttgaatacaaaaaattcaaaaatgcagcaaaagcaattacagatgcaacggctcatgacgaagtgatgacaaaagctcattacacaaaaatgaaattagattatttgcgtgaaaaatatagaaattttgaaatagaagaaataaataatcaatttacaaatgccaatctagttgacactcgaataattacaaaatatgcacgagcttatttgaattcatacttcaacaaggtgaatgttgttaatggaaagataacagatactttacgaaaaatttggggtttgcaaggagatgaagatgtaaaagatagaagtaatcatatccatcattgcattgatgcaattgttgttgcttgtgtagaaaaaggaacagcaaataggggttctgagttatatcacaaatatgaaaatgattatttcagaggtaattctaacccaagaattagtgcaaaagaaccgatggaaaactttgtagtgcgaatgaaaaatttgcacaaagaagttttggttttccataaacaaactgatagaataaaaccattattaataaaagctcaaaaagaaaatgctaaaaaattaaacttaagaggaagactcaatagccaaaatccttatgcacatattaagaaagatggtgagttgatttttgcacaaagagaaaagatagcaaatttaacagttaaagacgttgaagaaaatataattgatgaaggcatcaaaaagcgtattttaaattttgcaaaagaagttggtttagaagcatttgttaaagaaagtaataaaacgggttatatgattcttccaaaatattatgatgatgaaaaaggtaaagatattagtgaaatgataattaaaagattgagattaaaatcgtcaaaatcgaaccttaaagattataaagagattagaaaattggacagaaatcaggctaaagataaagatggtaagttgaaatttggtcataaatttgacttttattttaataaggattcatacactaattatgaagcaagaatctatggagatttaataccaaatgaaaaagggaagtttataaacagagaatataaagttattaatcatcataatattgttaagaatatttttgaaaaagaggaaagcagttcaattttacaattacaccaagacgatatgtttttagtttttaatattaatccaaatgatgaaattgattggaaaaatattcaagatttacaaaatagattgtttaaaatagtaaagttcgatgaaaacggaattattgttttagtaagacataattttgctggaggaaatgttggctatgcttcaccaattaaatcagaaaacgatttgactgacatttcgcaagtagttttaagaagaagtccgtcaactttaagaataattcctgctaaattaaatgcgttaggtaaattagacatcaactatagtaaagattttttaacttctcgaagccattaataaatgttcaaattagataaaagattaaataaattatgaatcaatcaaaattaacaaaagatcaaatagaaaaaaatcaagcaaaattagatagggcttcaaaaagtggttatgctaaaaagcaaactagagaggaaatattgttagaatttaaaaagagattaggttttgtgtagttttgtttaaaagttcattgacataagattttcaaagtcttaaacatctcaaaccacaacggaaaatcttatgattttttatgaacagattttccgttgtggtttgattaaagattagaaaacacgatattactagacaaagaccatccaaattatgaaccgttgtggtttgattaaagattagaaaacnnnnnnnnnnnnnnnnnnnnnnnnnnnnnnnnnnnnnnnnnnnnnnnnnnnnnnnnnnnnnnnnnnnnnnnnnnnnnnnnnnnnnnnnnnnnnnnnnnnnnnnnnnnnnnnnnnnnnnnnnnnnnnnnnnnnnnnnnnnnnnnnnnnnnnnnnnnnnnnnnnnnnnnnnnnnnnnnnnnnnnnnnnnnnnnnnnnnnnnnnnnnnnnnnnnnnnnnnnnnnnnnnnnnnnnnnnnnnnnnnnnnnnnnnnnnnnnnnnnnnnnnnnnnnnnnnnnnnnnnnnnnnnnnnnnnnnnnnnnnnnnnnnnnnnnnnnnnnnnnnnnnnnnnnnnnnnnnnnnnnnnnnnnnnnnnnnnnnnnnnnnnnnnnnnnnnnnnnnnnnnnnnnnnnnnnnnnnnnnnnnnnnnnnnnnnnnnnnnnnnnnnnnnnnnnnnnnnnnnnnnnnnnnnnnnnnnnnnnnnnnnnnnnnnnnnnnnnnnnnnnnnnnnnnnnnnnnnnnnnnnnnnnnnnnnnnnnnnnnnnnnnnnnnnnnnnnnnnnnnnnnnnnnnnnnnnnnnnnnnnnnnnnnnnnnnnnnnaagtagttgtggtttgattaaagattagaaaacacgatattagttggtgtgttaccttctgataatcataaaattagaaaagaatatcgtttgataaaatgcttcttttttggattgataacccaggattgaagcatttttttatttgtaagattaaaataattctaattgtgtgggttgtggctgtttggggacttccgctttaccccaaaagtttgaaatatttccaaattgtttatcggtaattcttaaaaggcttacttttcctaaggggggtaaaagttggtgaattcttttttcatgtacatcggcactttcgctgctggcgcagtggcgtacataaaccgagtattgcatcatcgagaaaccatcttttaagagattgtttctaaaaccggaagcattctttcggtcttttttggtctcggttggtaagtcaaaaaatacaaataaccacataattctataaccatttagttccataatttggggtatttgatttttttgcgttcaccggtataacattgttgcagggaactggcggttttttgaagagccaccatcaacggacttttttcgtctttaaagtacacggttcgtgtaagtagttgcagcagttccgattttatagtggtgttcagctcctgattgtcgaaattttgcatgatttcggcaactttttcatctacaattggtcgaaaaggttccataatatcatctgctagcgcaaaagcgttgtatttgcttttatgatgaattcccaaagtattgagtaaaccacttcctgatagggctctggctgtggcagctctgagaatagcatagccgtaattcaaaaaattattaggataatctccaaaacgttctcttttgaaatcctgttcaaagaaaactttccaatagaaattagctgcaacgccttccatatttgaactatcaccacttaaaactttggacgctaaaaagtcaaaattatttttcttagaggtgattttttgtaaaaggatcccctgattagtaattttctcagttatagtttgttgccataattgtttttttaaaggtaagctggcgttgatttgatttttaaaaatttcctgttggatatgatggctgttgaggtttaaaaacataccatttgggagatggtttttgttgcaaataatgacagaagtattgttttcaaccagcaaattcatcgaaggaatactgatataaatttccggatgatctaagaccagaaatccaatatcttcaataggaattgttttttcttttaactccgtttttaaaactaattgttggttttttgtagaaagtgaagttttattctcaatcaaaattgtttttttcaacataatagtagtaatttaaaggttaagtttaaaatttacagttgttttaagaacttgatttagggagaatcttttttagacttttctaaagttactataaaattttaagaaaatcactataaaatgtattctttgttgggtactcagaaataaaattactttttgttgaaaaaaaaatcccattttgaagtcctgttcaaaatgggattttttagtttgttgaaaatattttaaaaaagctttttccagggattgtcacttctaaaaggaaccgcaggcaagccttctttattgataaaattagactgagcggcttcattccatccaaagcgaacatgataagggtgttgtatttcgggagaagaaacaattacggtgttgccttttatttcagctttggcgggtacatattctccgttggctccggcaatgctaaaccaacttaatgattttccgtcacggctggctaaaccgctgccagtatttgaaaaacggatttcaatagtattgtttacaattttcattttttggaataccggtccggaacaaactacatttttttgttcatacgctttgttagcagcaatcagactcaatcttcggccaacttcccatttgtatcccggatgcaattcggttatcgtatcggttaaatcagtgatagtagtaagggcggtattttttaatttcaaattcaaagcctgggcttcccagaattttggaagtgtttctgtagtaagcggtttgtctttggatgccgaataattgtaaggggcaatttgtacaaaatagaaaggtagttttttgtctttccagtcgttacgccaactttcaattaaagtttttaatttgtaagcataacttatattttcacccaaaaaacaattggattcgccctgataccataaaaatcctttaagagtataagggatcaatggttgaatcattgtgtcgtaaaattttccgctgtcgccaccgtcattactgagtttgtccagcagctttccattttttaatttgggttcaaaatctaattttggagtttgaatccagggctcgatacggcttcccggtacagctgcagaaatcattccgataggaacatgaagtttgttgtacaaatctttggcaaaataataacccacagccgaaaaatcgactaaagagcgtcccatggcggcgtcccaacctaaatgttccggatccggatccatatattttctccggtcaagaaagatgcggatattggtattatttgctttggttaaatcgtcttccggcggatgatatcctttggttttggtttcataattgctgtatttacgcatcgcatattccatgttggattgtccggaacacagccatacttcacccaccaaaatattttttaaaacaatagtattttgtccttttatagtcatttcccgagcttcgaatgaggccttcaacggattgaggtttatcatccaattcccggatttgtcggtaattgtgcttttgttttgtccggcaaaagcaaccgaaattttctcacctgctgctgcttttccccaaattgccacttttttcttttgttgtaacaccatattgtgccctaaaattttaggtagtgttatttcggcaaaaattgtggaagtaaataagaagaaagtacttaacagaaatagtgatttttttaaacgcataagttattgtaaatgatttttagtcttttttcgactcacaaataatgccaaatcgggtacaatcaggatttttttaatgttaaattcccgattgtacccgaatttgataataataaattgttgtctttttattttttatttattccagatttcccaggctttctccgcctgaaaaataagcatatccaaaccgtttttaatttgtgtgccacgttctttggcattttttaaaaattgggtttcagccggattgtaaatcaaatcgtaagcgatatgtttgtcagtaaagaattcatacggaatttcaggacaggcttcaatgttagggcttgttcctattggtgtcgaattgataatgatttggtattcctgaaaagtatcggcattcagctgactgtaatcgatggctttttcagatgcttttcgggaaacaaaggtgtattcaattcctaattcttccaaagcaaaagcaactccttttgaagcgcctccggttcccagaattaaggcttttttatgatacggttgtaataaaggctttaaggattttaagaatccaaaataatcggtgttgtaaccttttaattttccttttttagtgaatttaatggtatttacagcaccaattttagtggcttttttagataatttatctaaaaaaggaattacttcttctttgtatggaatggtaacgtttaaaccgcttagattttcggtgtttttaatgatatcaggaaatgcaccgatttcctgaatatcaaaattttcgtaggtgtagccctgatatttttcgttttcgaatttttttgtaaaatgtcctttagaaaaggaataactgatattgcgccccagtagcccgaagcgctttttagaattttgggtcattattgtttattgtgtttttcgatataattttgcaccattttttgctcccaaactaccggaaataaatcttcaatcaggacatagttgtcaaaattcagacgaagcgcattgcttaagtgaattttagcttttcgatcatcattaatcataaaatatagtccggacaaacggtattcgatttcgctttcttccggaaaataatcggtggcttctaataaggtgtgaatggccgtttcaaattcgcctaaaaattgtaaaatatcaacccaaaacaaccaggtgtcaatttcggtgtctccaaattctactgcttttcgatagccaaattcagcttcttcaaaaaagttcatctgtttgttgatagtcgcatatcttttccagtacaagcgattttgattgtcgatagccaaggctttattgacatagaacaaagctttttggaagttttgctcacgcaaataaaaatcggtaattgcaatccaacctttgtccaatagtggatcttcgtgaacggtttgattgtaaaatttcaaagcctcagctttgtttcccagtttttcatggcattttcctattcgaagcaatgcataagaagtagcgtcttctaattcgatagttctgttataactttcgatggcttcttctaatttgcctaaacgctccagcgctttggctttttccataaaagcacctaaaaattcatcatcaattaaagtggcgtagtcaaaagcgcgaatggcattttcgtaatcttttagtccgtaatgtaaacggcctttttggtgccaggcaatttcgctgtacggatttttttcaatatactcatctaagaattttatggcttcttcattttggtctaaaaattcaaagcaatacacgacattgtacaaggcagactgatcttcgatgtcttcttccaggcatttgataaaactttccttggccatttccagattgtccataaagaggtattccatcccgattaaattatacacatcggcataatcatcggtgtattgtaaagcaatttttaacaattcaacggctttttcatgttggtctcttttagaacagatatttgccttttgaatgtaaatttcttcattgtgtggctcaatggcatatagttcgttaagtaatttctcggctatatccaatttgtcatcataaaccagcatttctacctgaaccagttttaaacctgtagatttagggtgttggtctaatgctaatttaagtgcttttttcgctaaagcggccttaccgctgtcgagataatgaagtatgatttcttcaaattcttcagagtcaaaaaagagtactttgttggttttcaacatcgactcaaatttggatagcgataagttataatcttcttcttcgttgcttagttgcatactgtctgtttttagaatttgacctagcttaaagttaggcatccttagggttatttttgaagaaaaaaatgatttattgtgaacaatttaattaacaaaatggggaagtatggtgttatttttttagggaagccaatacttcatccatcacttcgagcattatagcgcatccttcacgtatttcttctttagaaatggttaaaggaggagtaattctgatggcgcatccttcaaaaaggagccagaataatataagtcctttgtcctgacattttaaaatcacttcattcgtgattgagacgtctgcggtcattgcagccagcatcaatccttttcctctaatttcctttatcaaagggtgtaccaaaagtgatctgaagagcttttctttttctaaagcttcttccattaaattggtttcagttaattctttcaaagtagctaaacaggctgccgcaatgacaggatgtccgccaaaggtggtgatatgacccagttttggattttcagttaacaaatccatcatggttgatgaagctgtaaaagcgcccaccggcattccgccacccattccttttcccatggcaacaatatcagggacaatatcataattttggaaaccaaataattttccggttcttccaaagcctggttggatttcgtccaaaattaacaaagcaccgacttcagtacaacgggagcgcacttttttcaggaaatcgttgtgtggttcaataaatccggcacctccctgaatggtttccagtaaaactccggcggttttggttgtgattttttctaaatcggcttcgttattgaaggtgataaaatccacatcgggaattaaagggcgaaaggcttgtttgcgttcttcaaatcccatgacgctcatcgaacccatagtgttaccgtggtaagcattatagcaggaaatccattggcttctgccggttactcttcgggctaattttaaggaaccttcaattgcttccgttcccgaattgactaaataagttttgtccaaaggagcaggcaggagcgaagccatcaatttgcaatattctactgccggactttgcgaatattctccataaaccataacgtgcgaatatttgtccaattgatctttaatcgcctgattgacccgtggcggctgatgtcctaaagtacaagccgaaacgccggcaacaaaatcaaggtattttttattattggtgtcgtagatataagatcctatagcatgagaaacttccataccaagtggatatggagaagtttgcgcctgatattttaaaaaatctgaattcatttttttgttttttagatccttagtcactagtccttaggttttaagtttgaaaatttactaaaattaaaacagaaaagactaataactaagttttgaaaactaaggactaaggactaacagttacttttttttcttctttttgtcgtaattgagtgtttcttttctaatttccattgggacgtttggtttggcttcgtcctttttagtttcctcaatcattttttcattgtattgattctcttcttccggaaaaatatcatctttggatttaattcgttcatcagcgcgccatttaaaccctctgaattttcggtcgtgttcgtccaattcttcttcgggaaatatatcgccatccacctgttggaaaaaagtaatggtttctatggcgtttttgtcaaaaagaatattgattttactgcttacatttttattaattccaatgagttctttgtcatcattacgcatataataaataacttcggcgtttttgatgatgtccacatcgtggagttttccttcttcaaattttccaaagagattcatccctttgatttgattatagcccgttccgagtgtgtctttggaaataataaatgtgttgttgaggactttgagcgagtctagtttttgtgttttttgattgccaatgagatgcattatatctccggttatctggctttcgccattccaaagaatcggatttccgatgagttttgtcaaagcggttttagtactggaatgaatggagtcgcattttccgctcatatcggttttataaaaacggacattgttgaaagcacgaataattcggtcgccttctttcccggtaaccattagtttttttccgtgaatgtaaacggagtcgttttcaacaaaattaatagcaacggctcttttggtaacaaacatcgaatcttttttctggaaaacttcggcataatgtccttttacgatgcctttgttgattgaatctgtgatttttacatttcgcgtagccgaggcaaattctttgtttcggtcgtaatataaactgtcgccttctatgagtcggtcgtcgtatttgatataggattttcgaagaaaatgagacaggtttttcttggtgtcataaaaacctttttcggtataaatgtagttgtttttgctggtgattgttgaaggaccaaagagataggagtgccccgaattactgtaataatccaaatgattggatttgataacgtattttggattggtaatcgttaccgcggttaaaaactggaattttctttcggcaacataatattttccggagttactttccagtgtgttttcgttgttggtaatgactcctttggtattgtaaaaagcttcctgagtgttgcggtcaaaattaatagtgtccgtttttaaggttgcattaggcgaactcaaaacggcatctccggtggcgaatgctttttttacattaccattgtattcggcatatttactgttcagatagagggtgtcaccctgaaccaattgaacatttccaaaagctttgatgtaattttctttttgaaaataataggctttgttacaagttagtactgctccgtcatgattgaccactacattcccggtaagtaaaaaggcatcgggcatttcggtctgattaacatcggcaaaatcagaatgctcaacaattatttttttaggagcttgtgcttttacttgtagcgaagtaattaaaaacaagctaaaacagatgaaaaatagcgatttattcaagggtgtatatttttgtcaaatttatgaaaaaggaaacaaacccaataaatattactatttatttatgattttggaaacagcaacttttatgaaagtttatgagataatagcataaaaaaaccaatgcatactaagttttgtgtgtgttggtttttttaatttatttcgaaaaaggaattaatatttccttaaaaaggcattgcggtaattttcatctactttttcccaattgattacgttaaaaaaggaatcgatgtaagttcttcttcggtattggtagcctaaataataggcgtgttcccaaaggtctaaggctaaaataggcgttcccggtacggccgcatttctcattagcggattatcctgattttgtgaactggtaattttgagtttaccggctttatctacaatcagccaaacccaggcagagccaaattgttgggtagcttcctgaataaaagctgttttaaaatctttaaaagaaccaaaatctctgttgattgcggcagcgatagtgtctttaggggttcctccggcattaggtgccatggatttccaatacaatgaatggttgtaaaaacctccggcattgtttcttaactccatatcgttgacatccagtttagccagaatttcttcgatagacatgttttcgtattcagtacctgcaatagct

SEQ ID NO: 4445 - DNA, 24227 bp, synthetic construct
  misc_feature 1..24227: note = Synthetic
  source 1..24227: mol_type = other DNA
tcggatgattccggatgatttttcgtcaatatttatagatttctttaacttataacttattctaaggagaatattataagcttcttctgactgaatgtaatcgagagataaaggagttgaaaatcgaatttcattctggaattggagactattatcttttgaaatcacatcaataaaattgcttttctctgctaataaaagctggtcttttaaaagtttaaccttttgaatgtgcttgaatatttgggaatcttgcctgattcgatttataaaatcgagaattttctgagtaatatcaatcagattctgtctggcaataataatatctctatcgagtctcaaaataatttggtttaattcatcatcttgcaccatcttaatgaagtattcccatgtgctttctcgaaaaaatgcatcaatctgttctaataattcatcgagattttttcttttattatcatattcctgtagtttactttttttgatactgaaaactttctctgtcgcaaaaacatcttcaacacttccccgcaatgttgttatatttcttaaaacatctttgccaacatttccaatatttcgtttggttttaagaagatattcattctgtttgtttggtcttttttcaagttcccaattttgaatattttcttttaagatgcggattaatccactggtatattcgtaattaatttcctcaatggaatcagtgaatttttcaagaaaatccaaaatgtcttggtttaaatcaacggtactaccaaattgaactaaaatattcttttcaattagagaagtcagtttttcttcttcaaaattcacaaactccaaaaggttgtcatatttgacgctgttctttcttttggagaaaaggaagtcaattatttccctctctttatagagagtgcttattaaatcttttattgaattaaatgcaaacattttttacggtttctgtgtgtcagcaaagaaatagctcttttggtttttcttgtgagggtttttgtgtcggcaaaacaccaaatgtgctatttgtgcgttggcttgtcattatattttagtttgtttctcttctttttcactgtgaatggtaacggtttaggctatgatttcgttgcggaaaaatccacaggattctttccgccgtagccgaaagataataaatttgcgtggaatttccggcattgttttgccacgcaccacctcgaacagggcaccaacattctggtcatacagcgcctgatggggcattccgatttaagcaacacgctcaaatacctccacgtgcagcaactcaacacaagccaggtggtaaatccgctggacacgctggaaggactggaggggctatgcaggaacaaataactgtaggaagtttactgcgtgaatacgggggaaactacatcagccaaaacaaggtaacaaaaggacagcagggcttaatccacctgctgtcgacgtacccgtacagcagggcttgggagccattttgaaaaatgcgaccattgcagttatgtgggcaaggcaaacaacagttgccgcaaccgccactgccctgtgtgccagcaaaaagaaaaactggaatggctggacaaacggatgaaagaacttctcccggtggggtattaccatttggtgttcaccctgccgcatgagttaaacccgctttgcctgcaaaacaggaaagtgatgtatggcttgttgttcaaagctgtttcacaaaccctgctcgaacttacccgtgacgtaaagcacctgggcgctgatattggcctggttaccgtactccatacctggggtcaaaacatgaaggaacacccgcacctgcattgcatcatgcccgcagggggcctgggcttcgaccgcgaacactgggtacatgtaccggacaaaaacaacttttttatcgccgggaaagtgttggccaaaaagttcaggggcaagtttttggatatgctaaagcagtcgaaggaaaagggggggctcgattttcacggaaagctgacaggcataaaagggccggagcaattcgtgcgttttcttgcgcccctgtaccaaaaaagctgggtggtaaatgtacagaaacccatgggcaatcctgaaaaaatactggaatacctttcgcgttacgtattccgtattgccattaccgaccggcgtattattgaagtgaaagatggcaaagtccgtttttcatggaaagattaccgtacaggcaggttccgggaaatgaaactggatatcaatgagtttatccgccggtttttgttgcacattttgccaaagggcttttttaaggtgcggtactacggtatcttttccagtcgttaccggaaacaaaacatcgaaacggcaaaacaactgctggcacaggaaactgaaaaccaaaaagaagaagccttggaagatggaatccgtattttagagaaacaggatacggtgtgggctgaaatcctggaatgtatccaaaacttccggcagcctaactgcccggtatgcaaaaaagggaggttgcggtttggtgaaagatgttccgtggaaacccggatagtgcctaccctgcaaatcgttctttgaaaaattgcacaaccggtttaccagctaaaaacttttggtttttggctgaacgggaaaagtatgcccggtggaaaacgaaaaacgtgcccaatacccgggttccggccttaaaacaggtaaaatagcaaaaccggccgcagaaaaacaacggaaaggatgcaggaaaaccattcaatccccatagtgtatagctttgaacagcaacggttaagcccaacacgaattaaaacacaattgggcgtgcattttgagcgcagttaccctaaaaaaaggcagcaggtaaatcaacctactggcttttttcagggcccaactgtgccttaattcctaatttgttggcgtttcgtgcattttagttcaaagttgtttctcttaatattttataaaactggttgtcaacttcagaatcggatattgatttcaagcaatttgatgtccgtctgatattatttttcttaaaatctatcgtccaaccactgcgctttcttattttacttaattcaaactggtcatcattatgctgacctgaccataaatcatcatcaactctagtccaatcaatagcgaaggataatttctccaaagcttgtctaaatgctgtgcagctttgaaatcgagttttactatttttatgaattgatttttttaaaatttttataatcttgtcaggtatatgtggttgaaattggcggggcggaaataaatcttttttaacagctttcatccattcctccttagttttaaaattaaaaaccaatttattagtattatttagaagtctgtagaaggtaattcccattgcataaatatcacttaatttatccattggattgccttgaattacttcaagaggttgatggggtttgtagcccataacatcacttggctccacatggtaatctatcgctaatccaaaatctgaaagcttagcttctccattctcaccaaacattatattacctggttttatatcgcgatgaagaacattttgattatgcgcatgctctagtcctaataaactgttttgtataattcggcttgcctccttagtagagataaatcttttttcaatatgtttttgaatagaaccatgtgaaaggtattccattactatcatcactactggttcaccttcaaaaagtgtagcccgaacctctttaacatcaacaatatgtttatgtctacaaatatcaagggtttgcccttccttaactgcggtcacaaatctaggtgggtcaggtacctttattattttaatcgctctttccctttttaaaaatgggtcaaaacataaaaatacatgtccaaagaaaccgctacctaaatggtcaataatttgaaatttatctattgaattaggctctttgtaaatacaatagaaatgtctactttagggggaaatattataaaaatggagaacaaattcagaagccttactatttttgagtttcaggaacgtttccctgacgaagattcttgttatcaatatttgactgaactaaaatgggggactggctttgtttgccccaattgtggacacaccaattattgtaacggaaagcgcctattcgacagacagtgtaccagttgccaccgaatctcctccccaacgagcgggacattgtttcaccagttaaagttctcggtattaaaggccttttacattgtttattatgtaagtacgagtaaaaaagggatcagcagtacggaactaagcagaaagcttgggttaagacaaaagacctgctggaagttcaaaggcaaggtaatgaaagccatggaaagcagtggcaaccataaaatcgatggcaaggccgaagttgatgaaacagttgtcggcggccaggaagaaggggttgtggggagaaaaaacggcaaaaagaagttggttgtatttgccattgagagaaacggcaaaggagttagccgtatgtacggaaaggtcatcaagcagagcagttcgaaggaacttggtgggtttatgaaaatgaccattgagacaagtgcacaaataaagacagataaatggcgaggatattcccctttggtaaaagacttcagtaatcttgtgcaggttgattcagggaaaaagggcggcaacttccctgacttgcacaggtgtattatgggcttcaaaggctggctccggggcatgcaccaccaagtcgaaaatttgcaagcctatattgatgaatactgctaccggtttaaccgaagtaatatgaaggaaagaatcttcgatagccttttaaccagaatggttaatgcagagcccttcccttataaacaaagtattatttaaatgcctaattcaaatattttaaataattataaggaaaattgggaaaagggattgattgaaagtggtaaggatttattgacaaaattgaaaataattgaataaagcccagccgttgccggcaaggctaatgaccccggatgcggagaaaaacgcctttaaataacgcaaacaatgcggagaaagtttcaaaatgcagagaaaacccactatatttaccgtaaaatttgcggaataaaatgaaggtttacatttacgaaaacgaattttggccgaactttacttggaatgaccaagaactaatagagttacttggaaaggtgagaaacctgcaaggaaggattgttggcaagatggaatctttaggatttaatctaaaacaacaagctgaattagaaacattaaaaactgaaatattacgttcatctgaaatcgaaggagaaatactaaacccggaacaggttcgctcatcaattgctcgcaaattgggtatggacatttccggattaataccatcagacagaaatgttgaaggtatcgtagacatgatgcttgatgctacgcagaattttagccaacctttgacaaaggaaagagtttttgattggcactatgcgttatttccaacagggagaagtggaatgtataaagtcatcgtcggtaattggcgtaatgattctacgggtcccatgcaagtgatttccgggccaatgggaaaagaaaaagttcattttcaagccccggctgcaacactaatagatgaagaaatgaattcttttcttgattggttcaataattatgaaaaaattgatttagtattgaaagcaggaattgctcatttatggtttgtcacaatccatccatttgaagacggaaatggaagaattgccagaacaataagtgatatgctattagcacgggcagatggaatatcacagcggttttacagtatgtctgcccaaattagacaagaaagaaaggaatattatgaaattcttgaaaaaacccaaaaaggagatttaaatataacaaaatggctcacctggttcttaaattgtttactaaatgctctaaatgaatctaatataattttagaaaaagtaattaacaaacacaatttctggatagaaaatgcattaaaaatccaaaatggaaggcaaaaattaatgcttaacaaaattctggatggagatttttttgggaaattaacttcatctaaatgggcaaaaataacaaaatgttcaccagatactgcattaagagatatacaagacttgattgataaagggattctcaaaaaagcagaagaaggaggaagaagtacaaattacgaattaattgaataaagaattaaagcccagccggcaacatagctgtaatacgccagccggggctccacagtatattgagggtttcgttttaccccctttaatgcgttcaagctgataaaatcacaactggtctgaaagccacgcccaggcgcatatagccaggacgttatgcttcatgctgggagagttccctgcaatcaattaaacagaattttatcatcagaatcaaaaagtgtacatttggaataatttgattatgagtaaagtaagtaaaataagtaaagtaagtacaataagtacaattgatataaaaaatgcaataatctcaattacgaaaattgaggaagaggattacatctgtttgactgatatggcaaaggcaaaggaaggagataatagagcagcaaattccgaaaacatccggacggccattctggtataatccggacactaaattaggcctgtttatcttgctttttcaaataaaggaaaagcgatgaagcaaatagacatgaaaaaagtaagtgaattattgcaattagttatttcgcaagggcaaagctcccgacaggctggcaagataattggcatcatcaagtaatgcccaggtgggtaccttttcctcccgcgccttcaaaaagataatgctgtggcttgtactttttgtaataatcccttaaaacagaaagtaaaaccggcgatagcggcactttacgttgtttcagccctttgccttcctggatgttgacctgcatccgcttactgtcaatgtcggtaagtttgatgtttacactctctgataccctggccccggtggaataaatgagcatgatgatagcgcggtgcttgaagttgtcaatagccccaagtacatcgctcacttcgtcttttgataaaaccagcgggagtgttttggcaacctttggcgttggaaggtattcttttgcccactctttatggtaaatatttgtaaagaggaaccgaagggcgtagtagcccatttttacactgcccggcttgtggttcccgtcggtgggcatactttgaaaataggccctgagttcttctactcccgtgtgttccgggtcttttttgcaaaagttactgtaatcggcaatgtgccaccagtaacttttacgggtcctttcacttagattgcgtaaaaccgcttcctgttcaaatctttttttaaatttgtcataatacgttattttaaatgattaaatgcctcaaagatactggttttcggtggcctgtaaaaccaccgaacgccagtgaggttaagttcaacaaattgcaaattgcattgcggggttcgtgcggtgcgttgtctccgctcctttcttgaccgtcatgtcctaccggacactgacgctcttcgaaatccgcaacgacaacttgcaagtgaccgttgtgcctaattgcaagaaacatcctacacgatgataaacgattaaaatttaatgacatgaaaaacttaaaattcaaaaaatctcgattgattccaaacttgactgacaatgagaataagaaattatttcgtgcgatgaatattgccttgataattggaggactaagccttatcctgacatttctctatctgattgtaaatttggataaagcagatagattggttatattttgtctgccaggatttgtacttggattggttctaatgattctttatgcgattggacaccaaaaactgactaaggctaaaaaacaacggagatttgagaaatcaatttcttttggacaatagtcattatatttgtataaaattaaaagtgtaagatatgttgactaaaaatactgtaaggcaatcgattgacaatcttcctgattcatttacaattgatgagcttattgaacaattaatatttatagaaaaagttgaagaaggcattaaacaatcggatgaaggtaaaactgtttcaaacgatgatgtaaaaaatatgattgagaaatggtcaagttagtttggactgaactatcaacagatgatttaaaagaaatctttgattacatagcaaaggattctgttcgatatgcgtcaatcacagtaaataaaatctacaatcgagcacaagatattattgacaatccttacgttggacgggtagttccagagataaatatgaaattcatcagagaagtgatttcaggaaattatcggattgtgtacaaaataattaatgaatttcaagttgatattttacgagtttatcattcagcaagattattaaaagctgacagattggaataagcaacataggcaaacaaattaggaattaaggcacagttgggccctgaaaaaaggcagtaggtttgcatacttactgccttttttcagggcaactgcgctcaaaatgcacgcccaattgtgttttaattcgtgttgggcttaaccgttgctgttcaaagctataccctatggggattgaatggttttcctgcatcctttccgttgtttttctgctgccggttgtgctattttacctgttttagtgctgggacccggatattgggcacgtttttcgttttcctccggacatacttttcctgttcagccaaaaaccaaaagtttttagccggtaaaccggttgtgcaatttttcaaagaacgatttcagggtaggcactatccgggtttccacggaacatctttcaccaaaccggcaaaacgcaacctcccttttttgcataccgggcagttaggctgccggaagttttggatacattccaggattttagtccacattaagcgatgatatcggcgattttaccgcatttgattcaactatgacacccgattatgtaacaacggttcagggagctgttggccgggtgaaggaaatcaagccggacgccgttatcatcgacgagatgagtgaatggacacagaaggtggatgctgccatgaaaaagtgcagcgatgcctacaataacgtggcctattttattcgaaaggcttacaatggtaacacggctgttcagaaccagtttggtttgaacgactatatgaaagtccgcgacagtcaggctaaaatggtgttgttcatggaaacgctgggcgacatgggcacagcgcatcacgacgagttggtggccgcaggatgcggcgaaagtgtgcttacttccattcctgaagtagccaccgaactgcgcgaggccaatatcaaccaggagaagtacaaaaaggagcggggcgtattgacccaggaacgggtacaacgcctgaacgaggtgtaccagttgctggttcccctcagcgaagccgcgcaaatcatctatcgtgacgatccggcacgcctgaacaagtataccctgaccagcgcaaaaccggcaggcggcgcgggcagttcgactgacgacctttaaactttcattctccgccggcctggtaccactggcggggaattgaaaaatacaaaggcctcatttgtgaaacaacattttattgataaattagaaactcctaacgcttggttttttacctaaacataatttggcatactttttttgccggaaaatacgtttagtaatgaaactaactgaaccatttacatgaaatcagtgtgcattttttttaagacggagaaaatttgttggacggatgggagagacaaacagtttccgcaaaaaagaagtagtcgaaaggacctttatagcatatctataaaaacaacgaacctcaacattactgttgaggctctaaattttttccttcggcatatagccttattgtgatttgatgcagttcaaatgtaataaatattctaagaaatacaactatgacaaaagtaaaacttggtttagatattggtaccaacagcatcggatgggctgttttggaaaaagaagatagactccatcactttcttaaaaagcaggtggaaaatggaaatgatattccaacaaaaggaagttatattttcccaaagggagttgatggacaggaaaagtcaaaagcagcaacaaggcgtggctttcgaagtgccaggcgacgtattgacagaacaagacgaagaaaagtaaccaccttgcaagtcttgtcagattatggattatgtccaaaattgtcgaaagaagaaataagcaattggcgatataagaaaaactacccgtgcaacaatgttgaattcatcaaatggcaacgtactggcaccaaaggtggtgatatagaaactgaaaaatataagcagccgtattacctccgttatttggcagctacaaaagagggattgatggattctcaaattgggcgcttccaattagggcgtgcattttaccatttagcccagcgcaggggatacctttcgcaagaggaggaacaggctgatgatgcgattgaacaattcaaaattgccattagcaaattactggaagaacatacaaacgctccatctttttctgaaccgtttgaagccgtcgctgaaatgtacaaaaatgataaaaaggccaaatcattggctgctaaaatcagacggcaactaaagaaagaatcctcttttcccataataattgagtttattgagaaggagtttaataaaaaggagaacctagggaaagtggcaactgaaatcaatgagttgtcacagcagattgcaaatagtggacaaccaacgttaggttgctatttctactctatctatggatggaagcatgatgatggaacgactcaacgaattagggggaaatacatcgatcgggaaaaacattatttgcacgagtttaattatatctgcgacaaacaaaagattgatgcagaattaagagaaaaacttcgattcgccattttttaccaacgtccgctgaagagtcaaaaagatttagttgcaaaatgtcctctggaaccagagcggaaacgaattgcaatttctcatcccctgtttgaagagttccgaaaatgggaatcgattaaccggattaaaataaagaccgattcagatgaaagacttagaccactaaataaagaagaaaagaagtcaattgtcagtcaatttgactatgtgaaggatgtggaatttgagaagttagcagaacggttatgtggtgaaaaggattatcggtatataagagacaaagagaaattgactgccgaagttgaattcaattttccaatgacaaccactttcccaggatgtccaaccattgctaaaattaaaaaggtcttaggaaaggatgagaaaggaaaatattattacagcacgttgccgttgctcaatacagggtataaggatgaaaagaacaaaaagcaaatcagcattgaagacatttggcattgtttgtttaccgattcttttggagagaaaaccaagcaacaagccagaatggaatttgcagaaaagcatttaaactgggttgatgctgaagctttcgcgaaaattaaattggtgaaaggctatgggagtctgagtaaatcagccatcaaaaagattctgccttatttaaaggaaggaatgttgtattctcatgcagtttttacagccaatattgaaaaagtacttggtcggaaaacctctccaatggagactgaagaaattaccgattgcattaaagaagcaatggtaaaacatgcgtttgaaaaaagggtgaatgccgttgttaacaactatattgataaatataaaagtgaagaagccggttttggtgatgatcccaacagccagcgggcacatcaaaacggcatatcgaatgaaattaactcttggttttcaggttccgaactggaatcgatgactgaaaaagaacgaagtagtttagagcaacaatgctggaacaaatttgtaaagcaagcaacaaacaagcggcctcagaatgttgaatatctctcgacgaaaaccgttcccgattttataaaagatgttttagcgaagcaatttccaaatgacattatagacgtcagtaagctttaccatccgtcggctatagaggtttacccggaagcagaaatgcgcttgggtaatcccgaaatcagttctattaagaatccggttttcaataaagccatgcatcaaataaaacatttggtcaataagttgattgaagaagggttggttgataaaaatacggaagtgaatgtagaactggcccgcgaaataaacagtgccagttatcgacgagcattaacgcaatatcagaaagaccagaaggcaatccgggattgggcaaggcgaaaaattattgaatgttatgatgagaatgttcgtgaaaacattcatccaaccgctacacaaattaccaagtacattctttatgcagaacaaaacgggcattgtctttataccggtgataccattacaccgcaaaagttttttaccgagcaaaagtatgatattgaacatactattccccgtagtaaatggaatgacaattcgttaatcaataaaacactggctaatgcagatttcaatcggaattacaaacaggatgtgctgcctgctattcttgatttaacatataacggacagcaagttgatgcggataccatagttcaaaaccgagacaggtggttgaagtcatataatatttcaagtaacgaaatacaattcaatgtctctttagtgtcattaaaagcagaacataaaaaatataagttggcagcaaaggccgcggcaggagatgctttagctcacgatgaattgatgtataaagcacattatgcccggttacgtttggactatttggctcagaaatacaagacctttgagcgggaagaaattccggctaaatttaataatgccaatcttgttgatacacgaataattaccaaatatgcccgtgcttatctgaactcatactttaaaaaggtaaatgtgattaacgggcaggtgaccgatacgcttcgcaaaatatggggggtgcaggggcaatatgaagaaaaagaccgaagtaatcacattcaccactgtattgatgccgtcactgtcgcttgtgtggagaaaggaacagtcaaccgaatgtcggaagcatttcatcgttatgagcgggattactttagcggagattcatctgcaaaagtgtatttgcaggagcctatggaaaactttgttgataccatgaaaaaactaaaagacgaagtttttatctatcaaaagcaagtcgaccgaataaaaccattactcgaggaattagggaaagaaaatcctcagaaattgaatttaagaggagcactgaataaaccaaatccatatggattaataaaaagagaagggcaagatgtttttgtccagcgctcgttaataaaagattttggagataaagacatcccttcaattatcgacgaaatgattaaggaacgcctttacgatcttaagcgtcaaagaggagatgtgaaaattgataaacttaaaaaggatggagttattattttgccggagtacagctatgtcgatagaaatgggaagacaaaggtattaaaagagatggttttgcgtaaaatcagattaaaggcttacaaacaaagccaatatccattgaaagaaattcgaaaaatcgatctatcggagaaggagtataagcgtgatgtgtatgtactaaaagaaaaagactcaaactatgaagcccgattgtttggcgatttaattccagacaaccctgaagggagaacaaaatttaaaaagagagaatattttctaatcaattcaattgatttggtgaaaaacaaagtattgatacgtcccaaatatccttttttgttctccattcacacaggcgatcaatttttgatatttgataaacatcccgatgaaataaattggaatgctcagaaagacttaaatatgaggctttttaaaatcaaaaaatttgatgaggaccaaaatattattttgcagaggaatagtcattcttcttcagagaaggatgtttatgcatctgagagtaaaattgacgatatggatgcatttttattgaaaaaagtgccgtcatcttttcgcgcagtaccaacaaaagttgatgagttagggcgaatagatatccagtattcgaaagcttttatcgaaaaacatactaggtaagaggtaaacgttaaactacacctgatgctaaaacgaaccctgtttttctcgaatccttattacctgagcctgaagaataaccagctggtcattcagtcaaaagatgaactgagcacgaaaacggttccggtggaagatatcggctttgtggtgctcgaccatccgcaaattggctttagtatgaaactactggagattttgaatgccaacaatgtggcggttgtattttgcgacagcaagcacatgccttcgtctatgttgctgaacctggatagtcacagtttgcagaacgaactgttccgggcacagcttagtgcgaccgaacccttgcggaagaatttgtggaaacaaacgattgaggcgaaaatcaacaaccaggcaaccatgttggagaaatcggggcataaggcttttgagttgcggagttatgccaaaagtgtgaaaagtggcgatgtggaaaaccgggaaggactggctgcccgtatttactggaaccggttgctgggaaatgatttttaccgcgaccggtatggagcagcgcccaaccatctgctgaattatgggtatatcctgttgcgttcagctgtagcccgtgccttatccggttccggattgctgcctaccctggggattcaccatcacaaccggtacaatgccttttgcctggccgacgatatcatggaaccgtaccggccctatgtcgataggcttgccctgcttgtgtacagcgaatttcccgatgaaacgatgctgaataaggagatgaaggcggccatgctgaacctgatgagcattgatgtagtgattaacgataacaagcggccgctgatggtggctttgtcgcagacaacggcttcgctgggccgttgctttagcggtgagagtaggaaaatcgtttatccggtttttaattagaaaacttttccaaagtttcgaactttggaaaagttaaaagaaacgcaagcattcaaaaaacaatggaacaaacccgcctaaacgcttatcacattatgtggctatttgtctttttcgacctgcccgttaccacgaaaaaggaccggcggcaggcgacccgttttcgtcaggatttgctgaaagacgggttttccatgatgcagttttcggtatataaccggcattgtgccagtaaagagagtgcggaggtgcacatgaagcgggtgaaaagttttgttccggagaagggacaggtcagcattctgacggtcaccgataagcagtatggcaacatcagcaactattggggaaaacgtagttcacccatgccggaaggccctaaacaactggaaatgttttaaatttgaacggaaacttttccaaagttccaaactttggaaaagttggaaacggaatatcgctctttgacatgctgatttatcaaaagcatcattatatttcgaatcgaaaaaatgaggcattgaaccacttctttggagtacaaacgcgattttagggattgaataaatcgccataagccctgtaaaacggggcagaagaagccctaggttgtggtttgatgcaaaattgaaaagacttacaaccaactctaccttctggtattggcatatcttgttgtggtttgatgcaaaattgaaaagacttacaacttgccgtttcgtatggaattatatcgtcaggttgtggtttgatgcaaaattgaaaagacttacaaccaaagacgaatacatgttgctaaccccagcgttgtggtttgatgcaaaattgaaaagacttacaacatgctgaggatggtcgtgatgcagtgaagagttgtggtttgatgcaaaattgaaaagacttacaactcttcaacagccttggaacatgccatgtcagttgtggtttgatgcaaaattgaaaagacttacaacatagcagttattaaagatttagcaaaaactgttgtggtttgatgcaaaattgaaaagacttacaacctatctgcgttgagggacctaccgatgtatgttgtggtttgatgcaaaattgaaaagacttacaacaataaactaagggtctatcttcgatctaccgttgtggtttgatgcaaaattgaaaagacttacaactggatacgcggagtaaataacttttttataggttgtggtttgatgcaaaattgaaaagacttacaacttttcaatgaattgtagaatacccattagtgttgtggtttgatgcaaaattgaaaagacttacaacaaggaaatattttttaaattttataccagggttgtggtttgatgcaaaattgaaaagacttacaacattcgtgttgggcttaaccgttgctgttcagttgtggtttgatgcaaaattgaaaagacttacaaccagcatcattctgttgacaatacttttcaagttgtggtttgatgcaaaattgaaaagacttacaacagtattaggatatgcatcaatgctaactaggttgtggtttgatgcaaaattgaaaagacttacaacgcaatagcatatataatgaatggcttgcaggttgtggtttgatgcaaaattgaaaagacttacaactaaatcgggagctaaggcggctcttgatgtgttgtggtttgatgcaaaattgaaaagacttacaacgaaatgctctgcatttctactctttaattggttgtggtttgatgcaaaattgaaaagacttacaacgcaatctcacaaattgaatcaaataatggtgttgtggtttgatgcaaaattgaaaagacttacaactaattgcacgaggttcgttctgccaattttgttgtggtttgatgcaaaattgaaaagacttacaacctcagtatctgcaattatagagacttcgaagttgtggtttgatgcaaaattgaaaagacttacaactgaaaaacatgcaggtacaaagcaaattttggttgtggtttgatgcaaaattgaaaagacttacaactatctcaggcagtaaaaaagctaatgatgttgttgtggtttgatgcaaaattgaaaagacttacaaccattaggagcagattatgtgatgatcggttgttgtggtttgatgcaaaattgaaaagacttacaactttaaaacaagaatgtcgtattactatatggttgtggtttgatgcaaaattgaaaagacttacaaccattataaattatatgttactattgtagcgttgtggtttgatgcaaaattgaaaagacttacaactctatcaaatccatttgctgatcgaatgcggttgtggtttgatgcaaaattgaaaagacttacaacgtatcgatgatgtacaacaactgggcgctcgttgtggtttgatgcaaaattgaaaagacttacaactatgtagaacgagtccctttaaaatatgatgttgtggtttgatgcaaaattgaaaagacttacaacctattttagtattttcatctatcaaaatatgttgtggtttgatgcaaaattgaaaagacttacaacatctttctctctgccaggattaccatatttgttgtggtttgatgcaaaattgaaaagacttacaacaaggaggcaaaataatacaactcattagacgttgtggtttgatgcaaaattgaaaagacttacaacaacattctttttgctcaggaaaatgaattggttgtggtttgatgcaaaattgaaaagacttacaacttttttatgaatgattgaatacccatcaatgttgtggtttgatgcaaaattgaaaagacttacaacatcttctcaacagtatcatagccttcgtcagttgtggtttgatgcaaaattgaaaagacttacaacgttggggcgcggttcaaggacttctccggggttgtggtttgatgcaaaattgaaaagacttacaacctcagcagaagcaacctgtgataaatctccgttgtggtttgatgcaaaattgaaaagacttacaacaggaggtttagctaccggactgggttctctgttgtggtttgatgcaaaattgaaaagacttacaacagttcagcaagtttcacgccatcctcgtcagttgtggtttgatgcaaaattgaaaagacttacaacaatataaatcttcacaattgtaaacgtggggttgtggtttgatgcaaaattgaaaagacttacaacttattataaaagcttggcaaaaagttaaaagttgtggtttgatgcaaaattgaaaagacttacaacttcgcctataaacaagaacatctcttgtatgttgtggtttgatgcaaaattgaaaagacttacaacttggagggatgcatagccttaggcttgtctgttgtggtttgatgcaaaattgaaaagacttacaacggttggaaaggtacaagcacacagttctggttgtggtttgatgcaaaattgaaaagacttacaacccatgatcgcggctcaaagacgctacctgggttgtggtttgatgcaaaattgaaaagacttacaactattttgccatgccacataaataagcagtcgttgtggtttgatgcaaaattgaaaagacttacaacatatgtcttgaccttgacggtatcgagccagttgtggtttgatgcaaaattgaaaagacttacaacccagtaaattcaacggagtttcattcgtacggttgtggtttgatgcaaaattgaaaagacttacaacatcacttaatttgactggtctcttcattacgttgtggtttgatgcaaaattgaaaagacttacaacaagttcgcaaaaattatgcaccccttaaatgttgtggtttgatgcaaaattgaaaagacttacaaccacaatcatattttttctgtaattgcttaagttgtggtttgatgcaaaattgaaaagacttacaacactttaaatttattttgcttccattttctgttgtggtttgatgcaaaattgaaaagacttacaactggtcaaaattggattgaatggttttgcttgttgtggtttgatgcaaaattgaaaagacttacaacaccaagttttgcaagctcattttgaagggagttgtggtttgatgcaaaattgaaaagacttacaacattttggctgggcaagttgtcgaacctccgttgtggtttgatgcaaaattgaaaagacttacaacggacgcgcgcttcacagaccttcaaaatcggttgtggtttgatgcaaaattgaaaagacttacaactggatccgaaaaaataaacaaagatgaagcgttgtggtttgatgcaaaattgaaaagacttacaacgacaaagcccgcatgctgatgaaggaacatgttgtggtttgatgcaaaattgaaaagacttacaacagcaactgccgacactggatccactgccgagttgtggtttgatgcaaaattgaaaagacttacaacaaccttctttttttgcatttttgaattcatgttgtggtttgatgcaaaattgaaaagacttacaacgagaaatcaactatacccaaacaagtcaaggttgtggtttgatgcaaaattgaaaagacttacaactttattaagaagtaccgcttgggcataaccgttgtggtttgatgcaaaattgaaaagacttacaacccctactcaaaatcagtaattgcccagaggttgtggtttgatgcaaaattgaaaagacttacaactcgtggtaaaataggttcgagcggagttggttgtggtttgatgcaaaattgaaaagacttacaacagttccggctacaagtgaaccgactaaatagttgtggtttgatgcaaaattgaaaagacttacaaccgaccatacaacttacccccgagcaacgcagttgtggtttgatgcaaaattgaaaagacttacaacagcaactgccgacactggatccactgccgagttgtggtttgatgcaaaattgaaaagacttacaactagctccgacccatttacacatagcgagtggttgtggtttgatgcaaaattgaaaagacttacaacccaatcagcaatcctgaatcaactttcaagttgtggtttgatgcaaaattgaaaagacttacaaccgtttgcaatataagtataagttgacgagcgttgtggtttgatgcaaaattgaaaagacttacaacctagggcatttagccctaggagaaatcttggttgtggtttgatgcaaaattgaaaagacttacaacgacatttgaagtgtaagagccttcgacccagttgtggtttgatgcaaaattgaaaagacttacaacttttcgtcaatttcatccataagataatcggttgtggtttgatgcaaaattgaaaagacttacaacgccagctctcgaatgtcttcgtcatcggcggttgtggtttgatgcaaaattgaaaagacttacaactttctatttcaaagattaaagatatagcaggttgtggtttgatgcaaaattgaaaagacttacaaccagccttccacgcccaattttttacgtggcgttgtggtttgatgcaaaattgaaaagacttacaacaagcggcgctcgcttactggaagggacttcgttgtggtttgatgcaaaattgaaaagacttacaactcgaagtctcaatcattgcagatactgagcgttgtggtttgatgcaaaattgaaaagacttacaacaaaaacattgctcacaattgatgagctttgttgtggtttgatgcaaaattgaaaagacttacaacttgatgacttcacttattcgtagtccttccgttgtggtttgatgcaaaattgaaaagacttacaacatacaaaatggttttgcaaaaaccaaagtggttgtggtttgatgcaaaattgaaaagacttacaaccgcaatgggtgtcttggtaccaagacccgcgttgtggtttgatgcaaaattgaaaagacttacaaccaaaaagaatattcgcacgattagtaaacagttgtggtttgatgcaaaattgaaaagacttacaaccccgacgcggaccatccaggttggttactgttgtggtttgatgcaaaattgaaaagacttacaacgttgtacccgtcagctgatttatgttcgcggttgtggtttgatgcaaaattgaaaagacttacaacagttacttcaaatgaaaatgaatgggatattgttgtggtttgatgcaaaattgaaaagacttacaacatctgcttctgatacctccgtttcgtctgcgttgtggtttgatgcaaaattgaaaagacttacaacagccggaaagtcgggttcttcatcgggtatgttgtggtttgatgcaaaattgaaaagacttacaacttttcccttagaccatattcagcgctaagagttgtggtttgatgcaaaattgaaaagacttacaaccaaaatggggacaagcaaaaggcttacaggggttgtggtttgatgcaaaattgaaaagacttacaactcaagaatattagttacaacctgtttgatgttgtggtttgatgcaaaattgaaaagacttacaactaaaatgcctgaagtaaggcaaacattgttgttgtggtttgatgcaaaattgaaaagacttacaacgatttggtgatctgttgcagggtttcaaaggttgtggtttgatgcaaaattgaaaagacttacaaccaaaataccggaagtggaccggtaacctttgttgtggtttgatgcaaaattgaaaagacttacaacttaactggatggggggttgtcatacttgatgttgtggtttgatgcaaaattgaaaagacttacaacgttatcggttccgaggataaccaggccgaggttgtggtttgatgcaaaattgaaaagacttacaacaccgggtcggttatccaattggtgggaagcgttgtggtttgatgcaaaattgaaaagacttacaacggctgatggcaagggtgctacttaccaggggttgtggtttgatgcaaaattgaaaagacttacaacgcagcaagttgatgctttgaggttctatgtgttgtggtttgatgcaaaattgaaaagacttacaaccaaacaaatgttatttacgagccgcgaactgttgtggtttgatgcaaaattgaaaagacttacaactatgaaaaattattacaaaacaaagttgtgttgtggtttgatgcaaaattgaaaagacttacaacgtaaatctccggcgtgtgtccttggaatgcgttgtggtttgatgcaaaattgaaaagacttacaactatgaaaaattattacaaaacaaagttgtgttgtggtttgatgcaaaattgaaaagacttacaacttaaaagcatttttagactttcagcataatgttgtggtttgatgcaaaattgaaaagacttacggatgttgtttctaacctgacaggttaccgaaacctgttgtcaggtttttttatcaacggcggtttttacatgagagcaatacccctgtcggggtctccgaccaccaacagggtgaggggaaaagaagccccggacggactcaaccgatggcaaaccggccttcacttataccgaagccattcttattttatcacgtaaaaccagacggaacacaagatacctgccgcaagcagcaccccgaaatgaaccgccattcgtttcctgaccgtacttccgcttagcgaaagcgcgtatatcatttttaacaggttgttgctgttggtggcattcaggatggccagcgccacgaccaatacatcaagggtgctcttttgttgcagcaggttcatcaggaacgggtcgatatcggtgacccccaccacaaaggcgaggctggtgaccccggcattgccatacacctgcgacacgtagtgagtaatcagtccgaacagtacgaacaggagaccaaacaccagggctgtccggaattcgagcgggttccggtgggtcgtttccacctgtttacttccgggattcgattgtgttgatttcatcagcgccgtccgcgataacaccatcgagacaacgaagagtagcaggaacggaacaatcagtcgcatggccacggccgtgttgaacaggaaggccagcaggagaatgcgcaggtacatcatgccgttagccatcataatagccgagacaacttcggcgcccaggctctcacttttctctttccgcgccaggatgacggtggtggcggtggaactgtataacccacccaggataccggtaacggtgagactggagcggggaaagaccagtttcttcagcaaatagctggcgtacgagatacccgaaacaaccacaatggccaaccagatgtgatagggcgataccggaatggattcggaaatattttcgtggggcagcagcggaagaatgattcccgcgaaagcgataaacttggcaagggtgataaattcgtcctgcgatatttttttcatgatggtgacaaactcgtccttcatttcggtgatcaccaaaatggctaccacaaatgacagcgtcagccagatgggctgcgttatgatgagcagcggaatggagtaggtgagcagggccaggacagtgctggtgagcccatatttctgctgcgttttgattttctggtaatagtgaatgccgaggagcaagcccaggatgacaaagccggtgagaaagggaacgaacgatttttcgttgacgacgatgaggaggtaaccgagtaacccgatgaaggtaaaggtgcggtcggtgccgaaaagttcggcgttttccttcgaggagtggtgacggcgttgttccagtccgatcagtagcgagaaaacgagcaccagcaggaagtggacaatttcgtcggggatattgggtataaagttcataggctgttttacattatccgtttagcatgaataaagatagaatttcgcgtgcatttggcataattatttttttcggatgagaacaaaacgaaatgtgagaaagggtgatgaacaatgagcaatgaaagatgaacaattagtaatgaacaatgggtaggtctaagatccaatcaatgagtaattaacaatga

SEQ ID NO: 4446 - DNA, 12905 bp, synthetic construct
  misc_feature 1..12905: note = Synthetic
  source 1..12905: mol_type = other DNA
ataagattgaaattgctaagaaaaaagaatgtgcaggaattttattcgtttcgggaaaagagcaaaatccaatagacaagcttcctcctatttacattttgcccggcacccatcaagaaaaaataccaattgtttacattactagaaatatagccgataaacttttgagaaagaataaggaaacgattgaacatcttgaaaaaaaaataaatacagaaaataaagcccattcgtttgaaacaatgtcaaacctatctttagttaccaacattcgttacataaaaaaaagcactcataatgttgttggtctgctcgaaagcaccgatagcattatgaaaaaagaatatattgtagttggagctcattacgatcatcttggaattggagggattctttcaggctctagaatgcccgatacaattgccgttcataatggagctgatgataatgcatcaggagttgccggaataattgaattagcaaaattcttaaatcaaattaaagatacgcttcgtagaagtattgtttttatcgcatttagcggagaggaagaaggcctaatcggatcaaaatattttataacaaatcctttgattccaaaagagaatattaaatcgatgttaaattttgatatgattggtcgatttgacgaggaaaataaatctttcgtgcttggtggagctaaaacggctgtagaatatgaatttttactgaaagggattatgacaaatactccgattaatgtacaattaatacccgaaggaactgccccatctgaccatgtttatttttatttagacaaaattcccgtattattttttcacacaggtttgcataatgattatcacacaccatttgacgatgcatccaaaattaattatgcaggaattgaaaaaattcttgattttgcgtcagaaataattatcaatttatcgagaaccgaaaaaattagatgttctacatactaaattaaaaacatctagtaaaagagcttcatttcagctggaaatgaagctcttttgcttttgttgaaacaacaaataattcggtatagaaaaacccaattatcgtaaaacaaaaagtcccaccgaagcaggactaaaggttttcacctacggcatatagccttattgtggtaagattaaaatggaattataattttgatattatattttttaagactaaattgaacttgtaaataaaaacaacgaacccccagtaaactgagggctctaaattttgtcaccttgcggatcattctacggctttgtcttttggacttcgccttattgtgatttgattatgacaaatgtaaataatatttttgagtaaactacttatggtatgagaaaaattaaactcggtctcgatttaggaactaacagtattggttgggctgtaattgaaaaacaagatggaaaatatgattttcttgaaaaattagataaaaatggagatttaattccaaccaaaggaagttatatttttccaaaaggagtaaatgccgatgaaaattcaaaagcagcagaaagaacaggttttagaggagcaagaagacgattagaaagattaattttaagaaaaattgctactctaaaagtacttaatgaatttggattatgcccaaaatttgaagaaaatgagttgggaaattggaaaaataaaaaaatatatccttgcgaaaatgaaaaatttatagattggcaaagaaccgggaaaaagaatggaaatagagaaaccgaaaaattaaaacaaccatattatttgcgacatttagcagcaacaaaagatggtttaatgaatagtgaacaagggaaattacaacttggcagagctttttatcatttagcacaaagaagaggttatctttcaaacggagaagaagaacaatcagacgataaattagaattattcaaaacagaagttagaaaattgcttgaagaaacaaatgattatacttcttttaaagaaccgtttcaagttttattagataatagaaaaagcgataaagttgtaaatacattaggaaacaaaattattaaattactgaaaactgagattaattttgataaaatcaaagattttataattacagaatttgataaacccgaaaacttgggcaaagtaatgaaatctattggggagctttccgataatattaaaattgctgtgaaaaatggtgaatgtgctccaacaatgggaagttttttctattcaatttatgcaaaagcagataaaaaaacaggtttgattactaaattaagaggaagatacacgcatagaaacgagcattatttagcagagtttaattacatctgtgataagcaaaatatcgaaaaggatttaaaagaaaaacttcatcacgctattttttatcaaagaccgctaaaaagccaaaaaggaatggttgcaatgtgtcctttagaacccaaacgaaaaagaatagctatttcacatccactttttgaagaatttagaatgtgggaaagtataaatagaataaaaataggtagagaaaaaacaaaattagattttttaacgaaagaagaaaaagaattaattaaaccattatttctgcaaaaaacagatttcgattttgttaaaatagcaaataaattaagcggtgaagaaatgtattgctatattaaaaaaccacaagaagttttttataaaggaaatattattgagggtggcgttgcaaacatattttttaattttccattagataaaaagttttctgcttgtcctactatttctgctttatcaaagctattgggtaaagataaatacaatgaaataccgtttttaaatagtggatacaaagatgaaaaaaacaaaacacaaataagtgttgaagattttggcattgtttgtttttagatgattttggaaaaaaagacagaaatacaatcagaaaagaatttgcagaaaaacatcttaaacttgatgaaaaaggaattgaagattttcagaaaattaaattggtaaaaggttatggaaatttgagtaaatcggctcttaaaaaaattgttccttttctcgaaaaaggagaaatatattctaatgcagtatttttagcgaatatttcagaagtgcttaaccgaaaattgtctgaaaatgaacaaaaaatagtttctgaaaaaataaatgaagcaattaatattcataaccttgaaaaacaaaacattggcattgcaaacaattacataagcaaagtaaaagaaaataaagaaagccttggaaacaatgaaattagtattgacgcacataaaaatggaataaaaaaagaaataattgaatggattggagaaacggaatataacaaattaaaacctgaagaaaaagaccaactttttaaaaattgttgggataaattttcgcttgtttctttagagaaatcttcaaaggaagtaatttacatttcaactaaaacaatacccgaattcattcttgacaaacttacagaagcttttccaaaagataaaattgatgtttcaaaattatatcatccttctgcaatggaagtttataaacaggtggataaaaaattaggaaaccccgaaataagttcaataaaaaaccctgtttttaacaggtcaatgcatcaaataaaaagattgtgtaacgagttaattaaaaaaggaattgttgataaagatacagaagtgaatgttgaagttgcaggcgaaataaatagtgcaagttatagaaaagcaattgctctatggcaaaaagaacaagaaattattagagaatgggctcgaactgaaattattaatacttatcctaaagaatgtcaaaaagagataaatccaacggatacagatattataaaatatattttgtggaaagagcaaaatcatcaatgtttatatactagttataaaccaatatccatttgcgattttcttgatggtaaaacaacttatgatatagaacatacaattccaagaagtaaatatcacgataattcattatcgaacaaaacacttgcaaatgctgattttaaccgaacaattaaaaaagatattcttccaggtcttttaaatacaaactataatggagaattaataaatatagaaactataattagaaatagagataaaaatctaaaatcatattcaatttcaagtcaactacaaaaggttagtattcaatggaatgttagtctttggagtttgaaagaagaatataaaaaatataagaatgcagcaaaagcaattacagacccaatttctcacgatgaagtaatgacaaaagcacattacacaaaaataaagttagattatttgagcaaaaaatataaaaattttgaatgtgtagaaataaccaatcaatttacaaatgccaatcttgttgatactagaataattgcaaaatacgccagagcttatttaaattcatattttaaaaaagtgaacgtagttaatggtaaaataacagaaacattgcgtaaaatgtggggtttagaaaaagaatatgaaataaaaaatagagataatcatatacatcattgcattgatgctgtaactgttgcctgcgttgaaaaaggaactgcaaatttgatttcagaagcttttcacaattacgaaagtgattatttcaagggaaataataatccaaaatacaaaattaaacaaccaatgcaagattttgccaatagaatgcacaatcttcataatgaagttttaatatttcataaacaaattgatagagttaaaccatttttagatgcagttgaaaaaggaaataatacaaaacaaaatttgagaggtaaattaaatagccaaaatccttatgcacacattaaaaagaatgacaagcttatattcgcacaacgaaaaccaattacaaaaataagtggtggagacattgaagatattattgatgatggaataaaaattagattattaaatcttgctgacactaaaggttgggaaaaattaatggaatttactgtaaaagaaaatgaagttgctgcagaaaaggaaatagaacacaaaaaaggtattgcttttaaaatttatgaaaaaattaaaaaagatgataagaaaaaagaaatagtgatagataatattacaaaacaaaatttttcaactgaattttccgactttaaagaacttattgaaatgttgtttaatgcaacaattagatacgatattgatgaaaagaaaagagtaaattacaatgagaaaatcacaaatgaagtggccaatcttactcgaacaaaaggcttggaaatattgttgaaagaaagcgatggcgttataattcttccagagttttacgatgaaaagaaaaataaacagattggaagaatggtaattaaaaatataagattaaaatcagggaaaacagatacaaatattaagccctataaagaatataggaaaatagataagtcagagtatgattggcagcataattattattttgccaaagaacccggaagtaattatgaagcaagaatttttggagatttaattcctgatgaaacaggaaaatttaaaaacagaaattataaattaatcaatcactacaacatcgttaaaggtcgttttagtatagaagattccaaaccaatattaaaattacatcaaaatgatatgtttttagtttttgataaacactttgatgaaattgattggaattgcaaaagtgatatacaaaatagattatttgtgcttgttcaatttgatgaaaatgggataattattttaaaacggcataattgtgctcttggaattacgggtacaccaaaccctattaaaagtgaaagtaacttatcagatttgacagaaattgttttaagaagaagcccttcaacattaagagttataccagcaaaaatagatgctttgggtaaaattgatgtaaatttttctaaagcatttattgaattaaattcataagttttaattcttcgtaaaactttgtcaaagttgaacttgcaaaatgtgctgattttgattattttgcagaattagttttgataaactttgacaaagttggaaacaacacaaaacgttctttgacatataaagatgtcaaatcctaaacaaccaaaccacaacgggaaatcgttgtgcagaaattgattaagttcgatttcccgttgtggtttgcaaacgtattgtttgttttttatggtgtttgcgattgttacgctacgctccacaattgattaaaaaatggaaacataaatatttcattatttttatctgatttaggagtgtttgttgtggtttgattaaaaaatggaaacataaatattaacaccaacaccataaattggagtgatttgttgtggtttgattaaaaaatggaaacataaatattaacttgtcaacatgcctaataacacagccgttgtggtttgattaaaaaatggaaacataaatatttcttaagaatcatataaacaacacccattagttgtggtttgattaaaaaatggaaacataaatattatacaatcagaatcacttttagttgcgatgttgtggtttgattaaaaaatggaaacataaatattaattattagatatagttattaatcaatacggttgtggtttgattaaaaaatggaaacataaatattaaattagtaagtccttcaactgcactcgtagttgtggtttgattaaaaaatggaaacataaatattgtgttacgtcaatccaagttccagatgctagttgtggtttgattaaaaaatggaaacataaatattaaaacaagtattttggaggctgacagcgttgttgtggtttgattaaaaaatggaaacataaatattcgttgaccgattatttcgaagccttagagggttgtggtttgattaaaaaatggaaacataaatattaaaaatttgataatttagtctcaaaggttagttgtggtttgattaaaaaatggaaacataaatatttttttcatcgtaagttatttttatgttagtgttgtggtttgattaaaaaatggaaacataaatatttgattttgtaaacaaattaaaggagttcagttgtggtttgattaaaaaatggaaacataaatatttccgcacttaaacgtgattgttgtgcttcggttgtggtttgattaaaaaatggaaacataaatattgagcattacatcacagcaaaaggcaaagtagttgtggtttgattaaaaaatggaaacataaatattttttttctatattttaagttattaatttgagttgtggtttgattaaaaaatggaaacataaatatttcaagttggttagcgaactcaatcaatgcagttgtggtttgattaaaaaatggaaacataaatatttacgaatttttaaacagttattccgataccggttgtggtttgattaaaaaatggaaacataaatatttgaaataatgctgtactatctttaccacctgttgtggtttgattaaaaaatggaaacataaatattgtgttattctaaatcataatgataatatgagttgtggtttgattaaaaaatggaaacataaatatttttagaaacaatttatactatactgacttagttgtggtttgattaaaaaatggaaacataaatattagttgatttgtaatcttctaatattcaatttgtaaggagtaaatatttttgtaaaaaataacggtggttgagcagatttgtgatttcttctaccgttttttttgttttaaaattagcgaaatcatcggtttagaaatgttgtaatttgataaaatatattttttgaaatacgtgcggttggcgtccacataaggtgtgaacttgagctgaaatagaactacaaattaaaaattgaaattcagaataaaagcgaaagttggcttatgtggtgggtttttggttcttttttgcggtagaaaaaagaacaataaaactcggataatttgatttatgaatcattattatgtaagatgcctgtctgcacaggcatgacagaatatggagtaaatatttttgtaaaaaatagcggtagttgagcagatttgtgagttcttctaccgttttttttgtttcaaaacaaaacttggaaatttttttaaataattcgtatatttgtattgttatcaaaaattaaaaatatgacagtaaccgcaactatagatgtaagtacgcctgctggtcgcaaattggttcgtgaattggaaaaacacaagaaaattgttaaaatttcaaatcctatacctgttggagaagatggtttacccgaaaaattttatactgttgacgaattttttgatgaaatttatgatggtttgtcaaatcgatatggagttgacattcgaaaaatatgaaaaaattttcaattatattttctgaatcagcacgttcagatattaaagatattcttgattttattgaaattgtatgcaaatctccaataactgcaaaacaatatgttgacggcattcgtaaagaagttaacagcttaagcaacaaagctcacatttaccaaattgcaactcgtaaatctattttaaaatatggtcataatgcaagacgagttaactataaaaaaattgccataatttatacaattcacaatgatattgttgttataagaagagttatccctggaggaacaatttctggaatttaaattttttactctacaaattcatcggcatctcgactccgctcgatgacctttgatttcaactttaggaactttaaaaacttgataaacttttaactcaataactatggttcagacatttttccgttgtggtttgtaaacttatttgcttttgatgcaaaagtgatgtaaatttacaccacaaaaagtataattatgataaggcaaagtatttctttcacagagccaaataatgaatggcttcaagctcaaatgaacacacgcgaatattcgagcaaaagtgagcttgtaaacgatttaatcagacaagcccgaaaacaacaaattgaaattgattggttaaaattaaaattagaaaaagccgaaaatagtggctttaccgaagacacaaaagaacaaattttaaaacaatcaaaaaaattacttaatggcgaaatttagattaagtaatgaggcaaaagacgatttaatcagaatacaccattttggagttgaaaaatttggaacaacacaagccgataagttttttaattcatttttcgaatgttttgaaatcattgctaagcaaccttacgcttttgaagcagttgattatttgaaagaaggatacagaaggtgcgtatgtggttctgatacaatttatttcaaaatcaataatgaatttgttgaaataatgtttattgtgggaaaacaagatttaaagaatattctttaaaaaatgatttcaaccttcccataaaaaactttactaactttcaactttctcggacaagaatgtccaagttactcgttttttcaatttcaattttaaatatatctgaaaatatattattctttatttaaaacctttcaacttatcaacctataaactcatcaactatttccccaactttactaactttcaactttataaacttttaactcaaaaaagttccaattgttgcggagccgtttcaagtggagttgtggttttgccccaaaaattggcaatgttaccatattgtttatcggttattcgcaaaatgctaatttgtcctttattcgtaatgttattttcaattcgtttttggtgaacatcggcactttcgctactggcacaatgtcgaatataaaccgaatattgcatcattgtaaaaccatcgtccaataaaaattttctaaacttagaagcttttttgcgttccaatttagtgtttgtcggcaaatcgaaaaatacaaataaccacataattctgtaagcatttaaacgtgtttgcatttcattattagttcataaagttcttaaagtccataaagttgaaagacaattagcaattaacaattttcaattttttctcgttgccttgatacctatttgccttgatgccttttctataattagcatattagcacattcccaaattatcacattttaaatgatttcgggaaaagaaagttttttaatttcacccgcaaaacatttcgataatgatgctgttgtttgcgataaacctaacattagcggacgttttgtgttttcaaactcaacatcaaaagttaaaatttttagaatttctaatttaagttcggttgttaaatcagattcaattttgtgattttgatttagattatagaccaacaaatcaacataagggcggtaaggttccataatatcgtcggctaaacaaaaagcattgtatttgttgtgatgatgaatccccaacgttggcaacaaaccagagccaactaacgcacgagcaaccgcagctctgagaattgcataaccataattcaacgcattatttggcggatgtccaattctttctcgcaaaaaatctttaccaaaaagttcgctccaataaaatcgagcggcttgagcttctcgattggtagaatcgccactttgaacatttttagcgtattcaagcaaattcaaatattgttttcctaaaattttcaaaacattggcttgattgccgatttttgcaactatggtttgtttccataattgttttttcagcggttctgtggcttttatttgattgctaaacatttcgttttgcaaatgattattttctaaattcagcaacatcgcagttggatgaaattttgaattacaaaaaacaacagcaacgttattctctgataataattggattaaatttgttgtgaaagttatttgataattttcaagaatcacaaatccaatgtcttcaacgggaacttgttttatttcaccagtatctttattggtgattaacatttggttatttttcgaagataagtaacatggattactgaaaaaaagtgtgcgttttaacatgttttatttgttgtggtttaaacaaatataaactgttttttttattttgcgaagaaaaatatcattgactgtgagacaaatatcttttatttaaagagtatttgttcactttttgagaataaatgaatataaattaaaaaaatgcaaacagagtaatttttacattttttcaaattcgtcttttattgctccgcatgttgggcaaacccaatcatttggtaaatcttcaaacgctctgttaggctcaattccatggtttttgtctccaattattgggtcgtaaatataaccacatacttggcattcgtattttcccattttcgattctatttttatgtttgagtttagtttcgatttatcgatataggtaggagcattttttggggcaactcctttttttacttctcggtaataggcgtaagttaatggggcttcgtcggaaataagttcgttatcaactatttcgctgataaacatcatgtgtgtgcctaaatcaaactcttgcattactttacactcgaaccaagcgatggtttcgtctaacacaattggagttcctgtttttcctattttgtaatttgcattctcaaatttgttaatgtcttttccgcttttatatccgtacaatcccatggtttccgacgatgtgttttgttgcaatattgatattgaaaatgctttgctttcgcgaattaaacctaaggtaaaattgtttttactgcaacacatggcaatttgtgcaggctcggctgtaacttggaaaacagtgtttccaataaatccgttttttttgtttccgctactcgaacttattatgtaaagtccgtatgatattttaaaaaaagcttcgtaattcataattatttaagataagagtttgtaaagtttatcaagttctaaaagtccataaagtttgtaaagttgaaaggtttaaatcaattagtaattttcaaattagcaaattatcacattaataaatttccccagtttcttgttaagctttcaattcactaagaattttttcaaattccttatttatttccgcatcgtatttttcgtgaaatttatggaaaatagttatgattttttttccttcaggcgttaagcatgagctgcctccatcagttcctcctctgttcgtttgaatcaatggaactcctagcaattcttccatcttttgtaagttattccatgtcttccgatacgttagatttaatttttccatagcttctttcagcgaacctgtttcgtcaatggctttgagtagctcccattttccatcaccgaaagctccttttccgtcaatttcaatccaaattttgtatcgtagttttatgtccgatagtttcgatttcattttcaatagttgtttattcgacactaatgtaaaattaaattctcgcaacagcaagaaaaactacataaagactaactgtaatggttaaataaatgtatcgaacattttctgattttataccaaaagctttgtattttattgaatttgatttacaagttgccaaacagtctccacagtatgtgcaagttaccccgataactttgcgttcaatgttttctttttctaaagcaatataattgcatgaagtcgtacatttcatgcaatttgtgcaagattgatcaatgtacattcgtatagggtttatgaattttagatacgatacgattgttccaattggacaataggctacgcaatgtatcattttgcctttttgtagcgataaaatcaataatatcaataaaccaattgtcccaaatacagaaccgaaaattatggcagtatcgatacttacatcaaaaaatcgtaacaaaatagttccaagtacaaaaatcaacaatatcacgtgtttatatgcccaaatatttttgatggtaaattttgaatatttattttttgatgcagcccaattgtcgaatgctccaaaataacaaagttgactgcaccatgctggtcctgaaataat

SEQ ID NO: 4447 - DNA, 9218 bp, synthetic construct
  misc_feature 1..9218: note = Synthetic
  source 1..9218: mol_type = other DNA
tttcatagccctaaaatacaatttaatatccttatagccaaatggttaaccctgttttttttgtctttttttgtaaaaatttaccgtgcaacggtcttataacttctttgtctgagttttttacttacctttaaaattcgaaattaattaattgctaattacacaaatattatgacaaaaatttcaggacttgatttgggcaccaactccattggatgggcttaaaaacaacgaacccccagtaaactgagggctctattaaggtaccttacggataattcctacggctatcttgtaaacaagtgccttattgtgatttgattaaaacaaatgtaatactatttttataaatataaagattatgagtaaaataaaacttgggcttgatttaggaactaacagtattggttggtcagtattagaaaaagacaacggtaaatataattttttagagtttaaaggagaaaatgataatttaattccaacaaaaggaagttatatttttcagaagggagctgatgctaaagaaaattcaaaagctgctgaaagaagaggatttagaggggcaagacgaagattggaaagaataatattaagaaaaatcgcaacgttgaaagttcttaatgaatttggattgtgcccaccttttgatgaaggggaactaaacaagtggaaaaacaaaaaaatatatccttgtgaaaacgaaaaatttattgaatggcaaagaaccgggaaaaagaaaggaaatagtgaaaacgaaaaattaaaacaaccatattacttacgccaccttgctgcaacaaaagatggtttaatggagagcaaggaaggaaaaatgcaacttggcagggctttatatcacttgtcacaaagaagaggctacctttcaaatggagatgaagaacaaacagaagataaattagacttgtttaaaactgaagtgtctaaattattggaagaaacaaatgatgctggagcttttatagaaccttttcaagtattattcgagaatcggaaagcagacaaaaaagtaataacattaggaaataaaatacaaaaagaacttaaaaaggaaatagaatttgagaaagtaagaagctttataatcaccgaatttgataaaccagagaatttaggtacagtaatgaaatctattggtgaactttccgaagcaataaataaaagtgggcagccaacaatgggaagttatttctatactatttatgccaaagctgataaaaagacaggtttaattactaaaattagaggaagatatacgcatagggaaatacattataaacaagaatttttgtatatctgccaaaagcaaaatattaaaggtgaattaaaagataaactgtacaatgcaatattttatcaaaggcctttaaaaagtcaaaaaggtttggtggcgatgtgtccattagaacctaaacgaaagagaatagctatttctcatccacttttcgaggaatttagaatgtgggaatccataaatagaattaaaaggaaagatgaaggacaaaagcaacttgactttttaaccaccgaagaaaaggaacttattaaaccgctttttcttcaaaaaaccgaatttgagtttaataaaatagcaaataaacttagtggcgaaaaaatgtattgctacataaaaaaaccaaatgaagtgttttataaaggcaatttaattgagggtggcgttgctgacttatattttaattttccattggataaaaagttttcggcttgccctacactttctgttttaatcaggtttcttggaaaagaaaaatataatgaactaccgcttttaaatactggctttaaagatgaaaaaggcaaaacacaaattagtattgaagatatttggcactgtttgtttttagacacatttggaaacaaggataagaaacaaggaagaaaagaatttgcagaaaaacatcttgaactcaatttaaaaggtgttgaagattttcagaagattaaattagataaaggctatggaagtttaagtaaagccgcactcaaaaaaatagtgccatttcttaaaaaaggagaaatttattctcacgcagtatttttagcgaatattaccaaagttcttagtagaaatttaaatgatgatgaacaggaaactattgccaaaaaaataagtgaagcattaaatattcataaaattgagaagcaaaatgatgggattataaataattatatcagtaggttaaaggaaaaaaatgaaaatcttggaaataattcatttagtattgaagcccatcaaaaatctttaaaagaagaaattttaagttgggtaggtgaaactcagtttaatattatgaccgaaaaagaaatagcagaaatttttgataattgttggtataaattttcagcttcttcattggataaaaattcaaaggacatcccatatctttcaactaaaacaatacctgaatttatttttgaaaaattatcagaagtatttccaacagataaaattgatgtaacaaaattatatcatccttctgcgatggaagcatatccaattgctcataaaaaattaggaaaccccgaaattagttccataaaaaacccagtgtttaatagatcgatgcatcaaatcaagaggttgtgcaatgagttaattagacaagggattgttgacaaagataccgaagtgaatgtggaagttgctggtgaaataaatagcgcaagttatcgcagagccttatctcaatggcaaaaagaacaggaaattattagagcttgggcgaaaaatgagattatagacacctatccaaaagattgtagacatgaaattaatccgactgatacagatgtcataaaatttgttttatggaaagagcaaaattatcaatgtatttataccggaaatcaaatttcaatttgtgaatttttaggaggtaaaacaacttatgatattgaacataccataccaagaagtaaatttcatgacaattctttatctaataaaacacttgccgatgctgagtttaatcgcaaggttaaaaaaaatattttgccaggtcttttaaatgaaaactataaaggaaaatcaataactaaagaatcaattatccttaatagaaatgcaaatctcaaatcatattcattaaaaaataatgtgccaacttggaacgtaagtttaaaaatgctagaagaagattttaaaaagtatacaatcgctgcaaaggcaacaagtgatccaattgcgcatggtgagtttagggaaaaagtacattatacaaaaattaagttagattatttaagcagtaaattcaaaaattttgaaaataaggaaataacaaatcaatttaccaatgccaaccttgttgacacaagaataattgcaaaatatgcaagagcttatttaaattcttacttcaataaggtgaatgttgtaaatggtaaaattacggatacattacgcaaaatgtggggattggaaggtgaatatgccgtgaaagacagaagtaaccatattcatcactgtattgatgccataacattggcctgtgttgagaaaggtacggcaaattggatttcagaagcttttcatttgtatgaaagtgattattttaagggaaatgataatccaaaatataagcttaaggaaccgatggataattttgccgagcgaatgcacaatcttcatcaagaagtttttatttttcataaacaaacagatagaataaagcctttattggaagctttaaaaaaagaaaatcctaaaaaacagaatcttagaggaaaactaaacagccaaaatccttacgctcatattaagaagaatgatgaattcatttttgcccagcgaaaacctattacttcgataggaggcggagatatagaaaatattattgacgagggaataaaagttagattgttaaagttagcagatgataaaggctgggtgaaattaatggattttcatgtaaaagatgatgaaaattcagaggaaaaggaattagaacatagaaggacgatagcctatcgtgtttttgaaaaaatcagaaaatatgacaagaaaaaagagatagttgttcaaagtgttacaaaacaaaatatttcatccgattttactgatttaaaagggtttgttgcatcattatttaatacaataattaaaatagatgttgacgaaaagaaaagagtttcctataaagaaaagattgaaaatgaagttaccaacctaacacgtacaaaaggacttgaattgttattaagtgaaaataaggaaagcgaaggcgccataattctcccagaatattatgatgaaaaaaataaaaagcaagtaggaagaatggttattaaaaaattaaggttaaaatcttctaaaactaacttaaaagattacaaagaaattagaaaaattgatgaatcgaaatttgaacacaaaagagattattattttgataaagatagttatacaaattatgaagcacagatttttggtgatttaatacccaatgaaaatggaaaattaaaaaacagaaaatataaattgataaaccattacaatattgttaaaaacatatttgaacaagaaacagaaaaaccaatattgaagcttcatcaagacgatatgtttttagtttttgataagatgcctaacgatgaaattaagtgggaaagcaaaaaggatttgcaaaaccgactttttaaaattgttaagtttgatgaaaatggtattcttgtattggttagacataattatgcttcaggaaatgttgataatgctaaagctattaaatcagaaggtgatttatctaatttatcagaagtagttttaagaagaagtccatcaacaattagaataattcctgtaaaaattgatactttgggaaatattgatattgaattttctaaaaagtttattgaattaaatttataaaaaatatgcaaaaaaatatgcaaaaaaatatagacatagataagggcacaataagtaaactaaaattactttcggcttttgaaaacaatagcgtaaaagggttgatggaagaagctgtaggcttgtttgtggctgaaaaagaaaaacaactttttaaaagtttaactatagaagaaaaagaagatttgggtttgttgttgttaatgcaacaagctaatagacacaatattgaaagcaggaaagaagttatggatattttgaacatagaataaagcctgtaacgtaacatttataaggtctttcctcaaaagattaagaagttctttgacatcatggttgtcaaaccttaaacagccaaaccacaacgaaaaatcgttttcccgatttttctagtgacgatttttcgttgtggtttgattaaagattagagaatacgatattaatcgagttctttgcctgctttttgtttgtgttgtggtttgattaaagattagagaatacgatcgcgaaagttgtggtttgattaaagattagagaatacgatatttatgccgggcaatttatgccaacacgaatggttgtggtttgattaaagattagagaatacgatattaagaagtaatttaagcgttgagcaattagtgttgtggtttgattaaagattagagaatacgatattaatatttttcggtttactttatcaaccctagttgtggtttgattaaagattagagaatacgatattcatcgttttgtggatatgaaaacaagggttgttgtggtttgattaaagattagagaatacgatattaagctattaaataacacgtgtagattgcaagttgtggtttgattaaagattagagaatacgatattaattataaaggttgattttttcatgtcttgttgtggtttgattaaagattagagaatacgatattaaaacagcagttaagtatgcgccagacatgttgtggtttgattaaagattagagaatacgatattaaattacatttctgtttctgcctttggttagttgtggtttgattaaagattagagaatacgatattatatcgctgtcccttaaaccggtcatacacgttgtggtttgattaaagattagagaatacgatattaaaatttacaatgaattgccacatccttatgttgtggtttgattaaagattagagaatacgatattaaaagagctgaattaagaacttttgttattgttgtggtttgattaaagattagagaatacgatattaaatcgttggctgagcaaaggctggctgttgttgtggtttgattaaagattagagaatacgatattacatacagatcgtattggtgaattaacttcgttgtggtttgattaaagattagagaatacgatatttggtttttttctctgttttatactctgtcgttgtggtttgattaaagattagagaatacgatattctatcagttgaaactattgccgtgcctgttgttgtggtttgattaaagattagagaatacgatattaaagagtatcctgatatttatcaattcttcgttgtggtttgattaaagattagagaatacgatattttcgtttctttatagttttcgtatggtgtagttgtggtttgattaaagattagagaatacgatatttcaaatttatcaatttctgtaaacctcatgttgtggtttgattaaagattagagaatacgatattacaacgcaattagccttattcgaggagatagttgtggtttgattaaagattagagaatacgatatttatacttggtacaactttaaccgcagcatgttgtggtttgattaaagattagagaatacgatattttttagtgagcgtaaaccccatatacttacgttgtggtttgattaaagattagagaatacgatatttatgccttggaattggctgaaactgaaaaagttgtggtttgattaaagattagagaatacgatattatatttctgggtatggtaaaaggacttttgttgtggtttgattaaagattagagaatacgatattaaaactccattgaagtatcttagctcaaaagttgtggtttgattaaagattagagaatacgatattgacaaagctaaaagagaacaggctactacgttgtggtttgattaaagattagagaatacgatattaaagcaaaaaaaacaacttaaggaactggcgttgtggtttgattaaagattagagaatacgatattttgacggaagtaaggcaacgtaccggaatggttgtggtttgattaaagattagagaatacgatattctcgctcccaaaaaacaaaagtattttaaggttgtggtttgattaaagattagagaatacgatatttctttttcggatgtaccaattatgagtacagttgtggtttgattaaagattagagaatacgatattcagcggcttttaatcgtgtttttcgcaaaggttgtggtttgattaaagattagagaatacgatattctatgtttcaagccaactttaaatttaatgttgtggtttgattaaagattagagaatacgatattatttagaaaaatgggaagttattgatgttggttgtggtttgattaaagattagagaatacgatattaccattaaagatttaagctatggattcttcgttgtggtttgattaaagattagagaatacgatatttttagatgttcaggaaagtgttatagccgcgttgtggtttgattaaagattagagaatacgatattcaaaacttaatgcagtcatctattgatctgttgtggtttgattaaagattagagaatacgatattaaataaatgcaaatattgcatattttaaagttgtggtttgattaaagattagagaatacgatattttgaaagttattgtactgaatggaatgaggttgtggtttgattaaagattagagaatacgatatttgaaaaaatggatttaacattaactgcttggttgtggtttgattaaagattagagaatacgatattgtttggaactaaaaggttatcaaggaaattgttgtggtttgattaaagattagagaatacgatatttgacgtacttcatttggcgtgtaaacaccagttgtggtttgattaaagattagagaatacgatattcgttggttttattgcatccaaagatggcgagttgtggtttgattaaagattagagaatacgatattgctgccgaattaaaagcaactgaaatgcaagttgtggtttgattaaagattagagaatacgatattaatcgagttctttgcctgctttttgtttgtgttgtggtttgattaaagattagagaatacgatattatgttgtggtttgattaaagattagagaatacgatattaatccgcctacaattaccgacactcaagtggttgtggtttgattaaagattagagaatacgatatttattaaattatttgtactcgcattacctggttgtggtttgattaaagattagagaatacgatattcagtaataaatcaatagcgagctacatatgttgtggtttgattaaagattagagaatacgatattccgcactttcggaacgtccttgatcatcgcgttgtggtttgattaaagattagagaatacgatattataattttaaaaaaaatctattaaaaatctgttgtggtttgattaaagattagagaatacgatattaaaaaactcggtcattaatactttatcatagttgtggtttgattaaagattagagaatacgatattaatggttgctcaaaacagagcgacacaagagttgtggtttgattaaagattagagaatacgatattacaaatgacaaatggaaagtttagaaataagttgtggtttgattaaagattagagaatacgatatttttaattgaattgtatattgatgctaatgtgttgtggtttgattaaagattagagaatacgatattagttgctcctaaagcttctaataatcaagaatttaaagagaaatatcgtaaataaaaacgctccttttttgtactgatagtgcaagattggggcatttttttatttctaaggtggtttacaaacacctcattttatttttttggtgtgtttgtgaatcgaaaaacaggaaaattttggatttatttcggcatttgggtggttttccgatttgattaaagattagagaatacgatattagttgctcctaaagcttctaataatcaagaatttaaagagaaatatcgtaaataaaaacgctcctttt

SEQ ID NO: 4448 - DNA, 5079 bp, synthetic construct
  source 1..5079: mol_type = other DNA
  misc_feature 1..5079: note = Synthetic
caacatagtgttattcagattttgggtgttttatagggacaggtcgcgacctgtccgtacgggataaaaaaaagtcccaccgaagcaggactaaaggttttcacctacggcatatagccttattgtgataagattaaagatttgaaagttaaatatagcaaaaaactttttttgtttgtttacggatttccgtatttgtagtaattttctttttcttatatttatgaattgattttttaagcgatacaaaatggcaagaattttaggattagatttgattataaacaacgaacctccaataaattggaggctctatttaggtactctttcgagataattcccacggttcgcttgttaaaaaggaccttattgtgatttgattacagcaaatatatataaattaattttataaaatatacaaaatgagtaaaagaaaacttggtttagatataggaacaaatagtttaggctggactgtcgttgaaaaagaagatggagtttatgattttttaaaaatagaagacgagaataaagaattaattccatcaaaaggaagttatattttttctaaaagtgtggatgctaacgaaaattctaaagcagctgaaagaagaggatttagaggtgcaagacgcagaattgatagaattcgtttgagaaagattgcaactttgaaagtacttgatgaatttggcttatgtccaaaatttaaagaaggtgaattgaataaatggaagaataagaaaatttatccttgtgataactttgattttattgaatggcaaagaacaggaaaaaagaatggaaatagccaaatagaaaaattaaaacaaccttactatttaagatatttagcagcaacaaatgctggaatgatggaaacagctgaaggtaggtctcaactcggaagagcattttatcatttatctcaaagaagaggttatttatccaattcagaagaagaacaatctgatgataaaatagatttatttaaaactgatgttataaaattacttgaaaattgtacaggttcaggagattttaaagtgccttatgaagttatttttaatttatataaatctgatgacaaagtaaaaaaactgaattctaaaattagtaaagtattaaaaaatgaactgcttttagaaaacataaaagcatttattgtatccgaatttgaaaaaccagaaaatttaggaaaagtaatggcaggtattggagaactctccaaagaaatgaaaggttttccaactatgggttgctatttttattcaatttataatacaaaaaataaaaatactggattaataaatagaataagaggaagatatacacatagagaagaacattatgaagcagaatttaattacatctgtaaaattcaaaaaattacaggtgatttaaaagataaattacataaagctattttttatcaaagacctttaaaaagtcaaaaaggattagttgcaaaatgcactcttgaacctaaaagaaaaagaattgctttatcacatccattattcgaagagtttagaatgtgggaatctattaatagaattaagataaaaagagaatttgatgataaattagattttctgaataaagaagaaaaagaacttattaaaaatgaatttttacaaataagtgattttgagtttagtaaaatcgcaaataaattgagtaatggactgccttataattatattaaacgacctgaagaagtttatgtaaaaggtaaaaccgacaaagattcagaaataaaagcggttataacctttaactttccaatggataaaaagttttctgcttgtccaacaacttcatctttgaagaaaattattggttccgaaaaatatagcactatgccacttttaaattctggatataaagatgaaaaaggaaagaagcaaataagtattgaagatgtttggcattgtttacaaatggataattttggttcaaaagataagaaatctgtaagagaagagtttgcaaaaaaacatttacagcttgaagaaaaaggaattgaaaattttctaaaaataaagttagtcaaaggatatggaagtttaagcaaatctgctattaagaaaataattccctttttggaaaaaggagaaatttatacaaatgcggttttcttggctaatgtttcagaagttttaggaagaaaaatttcagaagttgaacaaaatcaagtttctgaaattattaaagaagcattggagaatttcagaattgaaaaacaaaataaaggaattgtaaataattacatttccaaatttaaagataatcgagaaaattcattaggaaacaatgaattaagcattaatgcttttagaaaggaattagattatgaaattgctaattggattggtgaagttcaattaggttcaatgaaaaaagatgatgtaacaaaaattacggaaacttgttggaatttgttttttgaagctgcatgtgataaattacctaaagatgtaaactatctcacagcgaaaacaattccaagttttattgaagaaggattaagagaagttttttcaaatgataaaatagatgttactaaattatatcatccgtcagcaatggaaacatatccaaaagccgataaaaaacttggaaatcctgaaataacttcaataaaaaatccagtttttgatagagcaatgcatcaagttaagcgactttgtaatgagttaattagaaacggtttggtagataaagaaactgaggttaatatagaagttgcaggagaaatcaatagtgcaagttatagaagagcattgtctatttggcaaaaagaacaagaagaaatcagaagctgggcaagacataagattatagaatgttatcctgaagaggaaagaaaaaaaataattccaacagatgcacaaatagcaaaatatattttattcagtgaacaaaataaaaaatgtttatatacaagagaagaaatttgcccaagaaaatttttaaataaacaatctagttttgacattgaacacacaattccgagaagcaagaataatgataattctttaaagaataaaacattagccaattatgattttaatagatactataaaaaaactacgttgccatctttgttaaatgtaaattttaatggaattgaaattaataaagaatctattttatattatagagacacatacttaaaatcgtattcttttgttggcaaaaaaccaaatatgaatattgaatggaatgtttcattaagcgatttaaaatttgaatataaaaaattcaaaaatgcagcaaaggcaattactgatgcagttgctcatgacgaagtaatgacaaaagcacattacaccaaaatgaaactagattatttacgtgaaaaatatagaaactttgaaattgaagaaattaataaccaatttacaaatgcaaatcttgttgacacacgaataattactaaatatgcgagagcatatttaaactcttatttcaacaaagtaaatgtcgttaatggtaaaattaccgatactttaagaaaaatttggggactacaaggtgacgaagatgttaaagacagaagcaatcatattcatcattgtattgatgcaattgttgtagcttgtgttgaaaaaggaactgcaaatagaatttcagagttgtatcataaatatgaaaatgactattttagaggcaattcaaatccaaggattagtgcaaaggaacctatgaaaaattttgtggagcgaatgaaaaatttgcacaaagaagttttggtttatcataaacaaaccgatagaataaaaccactattaataaacgctcaaaaagaaaacgcaaagaaattaaatttaagaggaagattaaatagccaaaatccgtatgcacatatcaaaaaagatggcgagttgatttttgcacaacgaaaaccaatttccagtatatcaagtaaagatattgataacataattgatgaaggaataaaaaaacgtattttagattttgcaaacgaagttgattttgaagcgtttgttaaggaaagtaataaagtaggatatatgattttaccaaaatattatgatcgagaaaaggataaagaaattagtgaaatgattgttaaaagattgaggctaaaatcttctaaatcaaatttaaaggattataaggaaattagaaatattgatcaaaagaaaactcaagataaaagatttgatcataaacacgatttttattttgataaagattcatatacaaattatgaagctagaatttatggaagtttattgccaaatataaaaggtaagtttaaaaacagagagtacaaagtaattaatcatcacaatatcgtaaagaaaatatttgaagttgaaaatgaaaattcattattgcaattacacaaggatgatatgtttcttgtttttgatttaaatccaaatgttgaaataaaatgggaaaatataattgacttgcaaaatagattatttaaaattgttaaatttgatgaaaatggaattatagttttagtacgacacaattttgcaggcggaagtgttgattctgcttctccaataaaagctgaaagcgatttgaatgatgtttcgcaagtagttttacgaagaagtccatcaactttaagagtaataccagctaaacttaatgctttaggaaaattagatattaattttagtaaagattttattaattcaagaaatgattaaaaacatatatttgtaaattatggatttatcaaaattaacaaaagaacaaatagaaaaaatccaagctaaaattgatagagcttcaaaaagtggttttagtacaaaaacaaaagaggaacttttaattgaaattaaaaagaagtttggtttgcaatagatttttattagttcattgacataaagttttcaaatgcttaaacagcttaaaccacaacggagtttcggcgatagctcactcagttgtggtttgattaaagatttgaaaacacgatattcttggacaattcaaatttttaaaaactatggttgtggtttgattaaagatttgaaaacacgatattaaagcgatgaataaaacagttgaaacaaagttgtggtt

SEQ ID NO: 4449 - DNA, 9871 bp, synthetic construct
  source 1..9871: mol_type = other DNA
  misc_feature 1..9871: note = Synthetic
actcggtgcgggccagctcgtagccccagtcgcggaagccaccctccgtgaacttcatgatgttgcccttgtgcaccagcgtgaccgacttgcgcttgttctcgatggcgtacgagatggcgctgtgcacgaggcgctcggtgccgaggtacgacaccggcttgatacccacgcccacctgcaccggcaggctgcgcgcgggggcaccgatgccctcgagcaccttgttccactcgtcggttttggccttggtgccgaagcggatcttgtcgaagcccttggggaattccttctgcaggaaatccagcatcttctgcgcatcggcagaacccggctcgaactcgatgccggcgtagatgtcctcggtgttctcgcggaagatcaccatgtccacatcgcccggcttcttcaccggcgagggcacgccctcgaaccagcgcaccggacgcagacagacgaacaggtcgagcatctgccgcagcgcgacgttgagcgagcggataccgccgccgacaggcgtggtcaacggccctttgatgctgaccagatactcgcggcaggcgtcgaccgtggcgtcgggcaaccagttgccggtctgattgaaggctttctcgccggccagcacttccatccacatcagctggcgcttgccgccgtaggccttagccaccgcggcgtccagcacgcgcacgctggcgcgccagatgtccggaccggtgccatcgccctcgatgaacggcacgatcgggcggtccggaacgaccagccctgccggggttttggtgatcttggcgcctcctgccggcgctacgggggtgaaatcggccatacgttctccatcagcagccccgcgcccaccgcgcaggcaagacgtctattgtcgcgggttcctgcgaaccgggaaaggcttgacgcccggagcatcgaaagtgctgcggcgcagcattcgccgagctagtgaaaactcgtgcgggcgctgaggcgccgcttcgaaatcagccaggcgccgcaccaaggccgtctgtgggatgcaagaacacatcctgtcaaaagtgacaggaattacagcggcctatgcgctatcgcacgatatgcgatgcaatgcggcctatgcgctatcgcacgatatgcgatgcaatcacgtcagaaacaacaacggccggttgcccggccgttgtctgatttggtgcatctttcagcttgttgccggctggaagagcgcatttcctgatctgtaggtgggacgaccatagacccgccgacgcgcaacgtcaaggggagaaccatgaagggaccttatcgcatcggactggatgtcggcaccaactccatcggatggtgcatctatcggctcgatgacaacgatgcacccatcgctctgctccgcagcggcgtccgcatcttcagcgatggcaggaaaaaggacgatctgtcgtcgctggccgcggaacggcgcaaggccaggcaggctcgccggcgtcgagaccgtctgttgtcgcgacaacaccatcttgtcggcgacctcatccgcttcggtctgatgccggaggacgacggcgaacggctcgcgctgtcgacactcgatccgtacgaattgcgaagcaacggtgtcgatcaaccgctcacgccccaccagttcggtcggacgatctatcacctcgcgaaacgccgtggattccgcagcagccgcaagaccaagggcgaagacgacaaggacagcggcaaggtcaaaggggcgatcaagcgcaccgaacaagccatggacgaagccggttgcacgacgctcggccagtatctggcgcaccgccgcaagcagggtctgccggtccgtgcccggcgcgacccgaatgacgagtatcttctctacccgcaacgggatctggtggcgaaagagttcgatattctgtgggagaagcaggccagctatcaccctgcgatctgcactgaacccgcccgtgcggccatccggcatacgctgctgctgcaacgcccgcttcggccggtcgagcccgggcgctgtcaattcgagcccgatcaaccccggatcccgaaatgttcgcccctgttcgaacggtatcggattctctgcgacgtcaatcaccttcgtatccgccgcgacggcgaggaatctctgctgacgctggagcaacgcgatacgttggccgacgcactcgccagacatgccgacaggaaaccgatcccgttcgcggacatggccaagcggttgaagctgccgcgcggcgcttccttcaatttcgagaaggaccgcaaacgcacgggattcaagggggatgcgacggcgccgatcgctgcggcgatcggcgaccgctggacccggatcagcgatctgcagcaggaagccctcgcggtcctgctcgaaatggcgcccgacaacgagctgttgctgtccgcgctttccgcgctgccgaaggacatcggtccggccaagcagatcagccgcagcatcgaggccccgcagcgcattcaaccgtggctggacgcgctctcgcgcctgcccttcgcgttcgaccaacaggccgtcgcggcattgctcgccgtcggccatctgcccgacgactacggcagcctcagccgaaaggcgattgagcacctcctgccgtttctggaggcggaggtcatcacctacgaccaggcggtcgcgaagtccaggtacgtcagccactccgacttctacaccggagagatcaggcccaggcttccctactacggcaaggtgctcgccggttacgtttctccgcacccgcgacgttacgaagtggcgaccgagccgaacgacgacgatccgaaacagatgcatctggtcgagaagtatttcggacggatcccgaacccgactgtccatgtcgggctggtccagcttcggcttctggtcaacgcgatgattaagcggtgggggccgccgcgcgaaatcaacatcgaactgacgcgcgaattcggcatgtccggaagacgcaggaaggaattgaaggacgaacaggataaaaaccggaaacgaaacgacaagatcaatgccgagctgcgcaagctggggcaacgcgagaaccgtgagaaccggcaccgttacttgttgtgggaggagcttgggggaagcgacccgctgtaccgtgcctgtgtctactccgggcggaaactgtgcctgaccgacaccaccgacagcctgtgtgtgttctcgtcggacgtcgaagtcgaccatctccttccgttctcccgcaccctcgacgacagtctgaccaacaaggtgctctgcgccacggaagcgaatcgcatcaaaggcaaccgaagtccgcacgaagcattcagcgggggcatgcacgggttcgactggcagtcgatcgtcgaacggtccagggacttgccggccaacaaggcgaagaggttcaaggaagacgcggtggagacggcactcggtgagcgcggatttctcgcccggcacctcaacgacaccgcttacctgtcccgcgtcgcgagggagtatctgaccacgatttgccccccacaacgggtccgggtcaccagcggacggctgaccggcatgctgcgggcgatctgggggctcaacgatccctccggtgtcaacgccggccgcaagtaccgcgaagatcatcgccaccacgcgctcgatgcggcggtcatcggcgcctgcgacgaacgaacactgcaggcgatgtcgcaggccgcgcgcaatgccgaggatgccggccagaaccgcaagttcaagcaatttccgccaccctggccggacttccgcgagcgcgtactcgagtcctacgagcgcatcaccgtctcgcacaaaccggaccatggcgttcagggcggtcttcacaacgaaacgaattacggcatgcgcgagccggccgcgaagaaaggcgatagcccgaaggtctggcatcgcgttgcgatcgagtccatcgagctgaacaatgtcgagatcgtacccggcaagaccggtcgcccgtccgcgaaggtcgccaatcccgcgcttcgcgaacagttgtacgccctgctgcgcggcaagacgcctgtggaagccaggcaggcgttgctcgaattctcgcgaaccaccggcatccgccgagtccgggtcgaggaacgtctttcggtcgtcggtatcagggatcggtatggcgagcgacgcgaataccggtacgtcgccaccgccggcaaccactgcctgctgatctggcgcaatgccaaaggccagtggcgacccaaggtgatcaccacatttcgcgccaacgcaaacaatttcgatctgcgtagggaaacggggcccgacggcgagcctgtcgtcctgcgcctgcgcaaggaggacatgctggtactggaagaaaatggcgtcgccgtggtgcgcagagtggtgaagatctcggagaaatcggttttcctcgccgatcatcgcgaagccaacccgtcggccgacaaaaaactcaaggaatggagcccggaacaactgcgcaaggcggcagccagaagcgtcggcgtcgacccgctgggctacgtcaacgaccccggattcagatcatgatcggccggatcgtcgaagtggccggacagggccgctatctgcacatggatcgcggcttcctcgtcgccgagcgccacggtgccgagctgggccgggtgccactggacgatgtttccgccctgatcgcgaccgcccatggcgtggtgatcagcaacaacctgctgacggcgctggccgagcggggcgcgccggtggtgatctgcggacgcaaccagatgccgcgcgcggtgttgtggccgctggagggccatcaccggcagggcgcacggctggatgcgcagatcgcggcgggcaagccgctgtgcaagcgcctgtggcgggatctggtgcgtgcgaaactgtcgatgcaggccgccgccctcggcgcctatgcccttccggaagcgcccttgcgcgccctggtgccgaaagtgcgctcaggcgatgccggcaatctcgaaggcgttggcgcgcgccgttactggtcgctgctgttcggcaaggcgttccgccgcgacgccgacggcgatggcatcaacggcctgttgaactacggctacaccgtgctgcgcgccaccgtcgcccgccatctggtcgccaccggcctgcatccggggctgcccctgcatcacgccaacgacggcaacgccctgcgtctggtggacgacctgatggaaccgttccggccctgtgtcgacgttctggtacgccagcgcgtcgatcttggcctctacgacgtggatgccgccggcaaacgcgagctggcgctgctgatgacccggccgctgcggaccgacgaaggcagcggcccgatcgccaatgccatcgaacgcctatgcctgtcgctggcgcagatctacgaaggcgagcgcacgcggctggcactgccgctggcgcatgcggaggcgctgcgcaccatgctcgactcgcccaatcacccacgccggccgccacgactcacgccaagggcccgccgtcatgccaaggacgaagaagaatgaaccccgccccgccaaacgcgcgctcagcgcctaccgactcatgtgggttctggtgatgttcgatctgccggtggacacgccggaggaacgaaagtccgcaacggactttcgcaacgacctgctggacctcggattcgagcgttgccagtactcggtctacctgcgtttcgtcgaaggccgcgaacaggccaccaccaccactcgtcgggtcgaactggtactgcctccgggcggcaaggtctatgtgctttacttcaccgacaagcagtatgccggcatcgtccgcttcgacgggcgcaggcggaaacggccgcccaagaaccccgagcaatatgaactcttctagcccctgcgggccgattttcagccccataaaagccgaaaaaccctgccgaaacagggagttgcggtacgacggagcgtaacagatcaggaaatgcgctcaagccggaacgtgtcacaaccacacagacgggcgcgattggagcgtaacagatcaggaaatgcgctcaagccggaacatatgcagcagccagagcgcggaaattgtcgagcgtaacagatcaggaaatgcgctcaagccggaacgcgaatacgtatgttaatgccctcccctttgagcgtaacagatcaggaaatgcgctcaagccggaacagtgaattgcgatgcgccaagcgcacggaggagcgtaacagatcaggaaatgcgctcaagccggaacgctcaggtcagtatttgcaggactggcactgagcgtaacagatcaggaaatgcgctcaagccggaactgcagctgggtgcgatacgtgttcgtcggcgagcgtaacagatcaggaaatgcgctcaagccggaacgggaggcttcgtcccctttttgaactcaagggcgtaacagatcaggaaatgcgctcaagccggaactgcgtcccagcccacccgttcggcgcggaagagcgtaacagatcaggaaatgcgctcaagccggaactgtatgcgaacccacgtcatgggatcgaatgagcgtaacagatcaggaaatgcgctcaagccggaacggggaatggagtttatcgcaatgacttcaggagcgtaacagatcaggaaatgcgctcaagccggaactgccgagatcattcaccagccgagttggcggagcgtaacagatcaggaaatgcgctcaagccggaacgccctgcggtgtacgcatgaacgccaaccggagcgtaacagatcaggaaatgcgctcaagccggaacccaattccgcgtcgcatgtgttattcatacgagcgtaacagatcaggaaatgcgctcaagcaggagctggtatgacgcacacagtccgtatcaaaagatgcattgcggatcatgtagtcctttcgattcgtccacccgcgcaaaaggtgactttcgacagctaccgctcccgcttccgggttttctaacatcgctgtcgcaccgggacatggcctgccggatcctgacggagaagacgatgtatcgatttttgcgccatcgcagggccgtgctctgcgctttactcgcgatggcgttgtcgtctgtattggtgtgcgcgaaagacgctgcggagggtgattggagcgcggccgacagcgcacgcacagccgacgaggtggcgacgatgctgcgccggcatttcgcgcatcgacaggcgttgtccggcgtcgatctggaacaggcgttggcgcagtaccggatgcaggcggcggcgaccgccgagcgcgcggcgttttccgcactgaccacgcgcttcgtcgcaagtctgcgcaacgggcataccttctttcgcgaccccgcgcgcgaacgcgacgaccccggtcacctgggtctgcggctgcgtcatctcgacggtcagtgggtggtcgcgggctcgcgccgcgccgaggtgccggcgggcagcgtggtcgaggcgatcgatgcgcaaccgttcgaggcgtttttccaaagccgggcggggtttctgtccgcctccgacgagtccgcgctgcgcgatgcgctgtcgttcgacgcaagcttgtttccgctgcgcttcgatctgcgtctgggcgacggcacgcaggtgcgcatcgatcgcacactcgcgctcacctcgcccgccaggaccgaaccgcctccggtggaagcgcgctggatcgagccgggacgcatcgcttatctgcggatcgggcgcttcgaccggccggagtacgaatcgcaggcgcgcgatgcggtaacgggcgcgtaccgcgatgccgcggtgtgggtgatcgatgtgcggggcaatcccggcggtacgacgccgagccgtctcggtcgcgcgctgctgggcgaggattgggtctcgtggcggacatcgccgccgcgcgacgcgacgcgtctcgccgccacgccggccgcgcctgaatccgcgcgcgcgctgaagtacctgttgctgatcgatcatggctgcggttcggcctgtgaggatttcgcgatgcctttcggtctcagcgcgcgggccttggtgatcggtcagacgacgtggggcagcagcggacagccgaagatcaagacctgggataacggcatgaccctgtgggtgagctcgcgtcggcaatggtttcccgacgggcgcgaattcgagggcgtgggcgtcaccccggacctggcattgcctctgcatcgcgaggacttcatcaccggcgcgcccgaccgcacgctcgcatgcgcgttgcggatcgcgcgcgcacccgacctgcgcgattgcggttgaggccgccacgcattgcatgcggacctgacttccggcacgggaagcggtgcgccgatgcgcggacgatcgcaccatcgtccgcgggagcatgtacatgggcctggatcgtcgtggcatgttgaaactgggagcgcttggattggccggtgctgccgccagccgggtatcgaccgttgcggctggcgccgccgcgcacggtggcgagccgcacgatgcgcctcccgccagcgccgctccgctcgctgccggcgcatccgacaccacgcctgcggacgtcaaaccgctcgacattcttatcctcggcggcaccggactgaccggtccgcatcaggtgcgttatgcgctggcgcgcgggcatcgggtgacgatcttcaaccgcgggcgcaaacaaccggagtggccggggcatgtacaacaattgctcggcgatcgcgacaaaaacgattacgcctcgatccgtgccgaagtcgacaaaggccggcgctgggatatctgcatcgacaatccgagcagcgtgccgatctggattcgcgaggccgcggcggcgctcaaggggcatgtcaacggctacatgatgatttcgagcgtatcggcgtatgccgacaacgcggcgccgggccaggacgaaaccgcgcctttggcgacattcgatggcgaggcgctgaaagaaacttcgacgagcctgcgcgcggacatgggcaaatacgcgggcctgaaagccgcgagcgaagccgaaacccgcaggcaattcggcgaccgcgccaccatcgtgcggccgggcctgatcgtcggccccggcgacgagaccgatcgtttcagttactggccattgcgcttgcggcgcggcggcgaagtgttgtgcccgggcgatggacgcgatcctgtgcaattcatcgatgcgcgcgaccttggcgagtggatgatccggttggccgaacagaagacacgcggcgcattcaacgccttcggtccggattatggcctcgacatgacggcgttgctgtacggcatccgcgcttcgaccacacaaggcgcgaagttcgtcttcgtgccggccgaatttcttgaagcgcagaacgtctcgccctggagcgacatgccggtgtgggtgccgagcaccggtgacagcgccggttttcacacccgccgcaatgccaaggccgtcgccgcaggtctcaccttccgcagcatcgccgacaccgtcaccgcgacgctcgcgtggtacgacgcgcaaccacaggaccgccgcgacgccggcccgcgttcgggcatcaaaccggaacgcgaagcggaagtcttggccaaatggaaagcgcaacgcggcggttgagcacgcacgacaaccacgccgaagccggagctactttttcgttgcccttgccgcgttggaacgctgagaaagaatcgtagggcgggctcaagcccgccacaaagtgcggacgcgtgtgtggtgcgaggtgtcgcgaagaaatcgcttaagtcacgtgcggcatggagggcgtctcgtgatggcgtctcgtgatggcgtctcgtgatggcgtctcgtgatggcgtctcgtgatggcgtctcgtgatggcgtctcgtgatggcgt

SEQ ID NO: 4450 - DNA, 16496 bp, synthetic construct
  misc_feature 1..16496: note = Synthetic
  source 1..16496: mol_type = other DNA
tgcatggtgagtgccaatatggttcctgtgattccaaacataaaagctgcaatagaaagccaacttcttttatatcctaaagtatgctccaatccgtggacaggaaatggtgtgaatacttcttctattctaacaccttcgcctcttactttctctacagctgccattaagacatcctcgtcatcataaacacctaatatatagttctttccttgagccatagtttatttattcttttctccggttgctttaataatacttttcacctctgccatattgattaccggaaaaaactttgcgaacaagaagaacgcagtgaagaacagaccaaatgtgaacacatagacccctatatcgtacagggtcggataaaacatcgcccagcttgacggtaaaaaatctctatgtagtgatgtaacaataattacaaatcgctcgaaccacattccaatgtttacaatgattgaaataatgaatgtagccgcaagatttgtcctgatttttttgaaccagaacaactgaggtgaaatcacattacatgtcatcatagaccaatatgcccaccagtaaggacctgtcgctctgttaataaatgcatattgttcggccgctactccggagtaccatgcgataaaaaactcagtgatgtaggcaataccaacaattgaacctgtaacgataataataatattcatcatctcaatgtgttggattgtgatataatcctccagtttatatacttttctggtaactaataataatgtcagtaccattgcgaaaccggaaaagatagctcccgccacaaaatagggagggaaaattgtggtgtgccatccggggattactgatgttgcaaagtcaaaagacacaatggtgtgtacggaaagcactaatggagtggccagaccggctaaaaccaatgaaaccgtttcgtagtgagcccaagtcttggcacctcctgtccatccgaaacttaatgcgccataaatcgcttttgaaattttgttgttggctctatctctaattgtagcaaaatccggaatcaatccaatgtaccagaaaactaatgagacagagaaataagtagagattgcgaaaacgtcccatagcagcggcgagttgaaattcacccagagagacccgaatgtatttggtaaaggcaatgcccagtagaaacctaaccacgggcgacccatgtggagtaccggaaacattgccgcacatataactgcaaagatcgtcattgcttccgaagccctgttgatagacattctccaacgctgacggaaaagcaatagaacagcagatatcaaagttccggcatgaccaataccaacccaccatacgaagttggtgatatcccatgcccatcctactgttttgttcaatccccacattccaatcccatcccagagggtgattgctaccgcatatcctcccactaatagtaaacccagagagacggccatcgccaacatccaggtaagtgtcggcttctgctctaccctgccggcaatgtcttcagagacatcacggaccgtcttaccacctgtaaccaaagggattctgacttctgcttcggcatgaccctgctgatgaacaaattctttttctttttcaggaactaatgaaattgtagcgtctgacatttatgcgtctattttttcgttttcgtctttatttctcactttcgttaaataccaaacatttggcattactcttaattcttccaaaacatgataagctctaggttctttagactcaacactcttttcattgtattgaagatcaagtgtcctagagatgttactttcagggtctttcatatctccgaagatcaatgcatcggatggacaagatttagcacaagcagtttggatttcgccatctacaggtcttcttctttctttcttagcctctaatttgcctgactgaattctttgcacacagaatgtacatttttccatcacacctcttgctcgtaccgtcacgtccggattcaacaccattttgccaaggtcgttgttcatagtcatattcttattgaacttcttattatcatggtacttgaaccaattgaatcttctcactttatatgggcagttgtttgcgcaatatctcgtaccgatacatcggttgtaagtcatttgattaagtccttcggtgctatgagtcgttgcagcaaccggacatactgtctcacaaggtgcattattacattgctggcacatcatcggctggaacgtaacttcaggattttcaacttcagcaagttctttttgcttcacttccatcagatccgaacctccaaattcctttagttcattttctgatcgggagctgtaatacctgtcaattctaatccagtgcatctctcttctattcaacacttcttctttgccgacaacaggaatattattctctgtctggcaggcaatggtacacgttccgcaaccggtgcaagagttgagatcaaccatcataccccagtggtgattcggatattcatggcctttccaaagtgatactgcgtatggtttcaacttttctcccgtagcagcagaaattttaggcatgtatcgacccgcttgcggattcttttgataagctcccaatacagtttcctgaatgactgtttccctccctgaatacgtttgacttgtctgagtttgagcaacctttttaatctcgccggttagatccaaagaagctcccgataaattatagcttaatccatcagcagacgaagaaaccagatcgtaagcattgattccaatcccattacctacattacctgcttttgttctcccgtatcccaatgctaaaccaaccgttccgtaagcctgaccgggttgagggatgaccggagcaatgaccgacttaccatttacagtcagcacagctactttgtaatccatgtcccccccttcaacaatccatcctttttccattgcttctgcaagagaaacagtaaagtagttatcccagcatgctttagtaattgggtctggcatctcttgcagccaggggttatttgcctgcacaccgtctccgatggaatagttagtataaagtgcaacctccatgccaccggtatttgattccctgatgtttccggcagcaacggttggatctattgatatagttacttccgaagtttcagcttcaacctctagtacaccatcatgaagacttttcttccaaaacatttcaaaatcacctgcggcctgatcagcccatccttctctgatgaagtcataataagaagtagtattatccgaccataccaaaaaggactcttgagcctgtctggtattgaagatattattcattgtcggctgtgctaacgaaagatgaccggtcacggcttcaaaatcattccaggattctaggaaatggctatctggcgtgatgtacttcacggaagcggaggtctcatccattctatcagaagttgagatagtcgtttttacctttcccaaactgctaattaatgacgggccatttacatgatcgtatgcaggattacagttgtagaagattaccgttccaacctgaccggcttttatatcacttattagttgggtaaaagctttgtcactaccttttctcgtatgaatagcttttgaaagatctatagtggctccgtatgaaccaagcaggtcgttgatagcaatcaccatcaattgttcgtttacattatttgatcctgaaataaccaatgacttaccttttgatttccaaagatcattggcagctttctctaataaacttgttgtatcctttgtattccccactctaaccgtatttgctccggctttttgagcaattaaattgtaaagattagcgatgtatgatccttgttgggaaggtttaattggctttctgtagtctgcatttgatcctgttaatgaaagatttgactcaaatacatagagccttgacatgtcttttttgtccggacctaattttcttgttgctgcaaactgcttgttgttcaaaacttggtttggccatgatcccaagaagtcggcaccgaaagaaacaatcgtttttgccgccgagaaatcatgaaccggaagcattctacttcccgttgctgattcataagcatccaaaatgccgctgaaggaaaccgcatcgtattggatatgctccacattcccgtatttcgcattcagagttttaatcgcccttaaagtacttgggctacagttagaatatgataagatggatattttccccggatttgatccaagttctaatttgattttattgtcaatagtattccagtccgtatcctctccatcaacctttggattttgcaatcgttcctgatcataaagagaaagaacagaagcctcaatttgtgttgttgtacccccactgatcttagaaagattgttcccttcgatcttaatcggcctaccctctcttgttttcaccactatacttgaaacgtcattgcccattgcataagtagatgcgtagtagtttggtattccggggtctacatcaaccggtttatttacataaggaattgcttttcgaacgggtgcctcacatgctgcaagcgaggctgctgccaccccaaatcccatcatcttgagaaagtctcttctggagggctcaccgttctcaccttcatttattggcaagtatccgggaaattcttttgaaatacgctccttaaattcaggggtgttttctaattgctcaattcctttccagtatgttttagtttctttcatttttcttttagatcaactgattgagaattaatagtgacactttgagcattccaacccgcctatatcctctactctcatcggtttcctgctttgttccgaatggaactttaccaacttgttgtagtaggcattatcttttgcattaacggcagtttctctgtggcaattaatacaccatcccattgttagtgttgaatactgataaacaacctccatttcctcaataggcccgtggcatgtctggcattcaatttccgcaacgtttacgtgctgggcgtgattgaaataagctaagtcgggaaggttgtgtactctaatccattctataggttttgtatcggttccgtaagtttttgttgacggatcgtaatcaatcgctgcatagattttttgaatttcctctgattctgttttgatctgcgtgtggcagttcatgcaaatgtttggagaaggaatatttgctgatttggattttctaactcctgtatgacagtactgacaatctatttcatattgtccggcatgtaattcgtgtgaaaaggcaataggttgagttggctggtatccttgctgcacacctatggtaaaggctccgtctattaaagtttttaacaccatgatcgttactacaaagacaaccagtccgagaaaagagttactcttgacaaggccggaaagtgtaaagccctgattgacaatatcctcagcctcttcatcaagatctttctcttttagatattttgtcagggtcttgatcgcaactcccaatgccactaaagcaaccaggaggataacgattaaaatgatgatgatcgccatcaaataagtagaagaaaccgaatctccccccccttcaactcttgtagaagcaactgctacttcttcaaccggcggacctgcatctgtttcggatttgatatatgcaatcaattccatcacctgctcatcagtaaacggataagccggcatcacggttggttgatactcttcccaaagtgcaactgcctgctcatcaccggaagcaatcatcgcttgcgagttcttgatccatgactggagccattcaatagatcttctttcatatacattgtttaatgccggccccagtcttacttcccatatctgatgacattgcgtacagtttgccttgtaagtcgcttctccggctgcaatgacttcctgatccgtaggaatgtcttgagctaaggaactcgaaagtgaaatgaatccaagtgtcaggaagagacctatttgggttagcgtaagtattggttttaccatgtattttgataacttgaaatcaaacacatacaaaattaatattgagaggttgtatttcaaagatgggtactaatccctctttacagtattcaaggtattttatgtaagcaattgtttttcagattattaagtataagaaaaatactcataatattattatttagaatgattttaaataatatcagtcattgattcttcaaacccttcgtaagattattatcattttgcactttactcctagccatgttctcttttctcttgatgctcatttccaccctcttatttgatttgcttgtttcacgtattcggtatgaggtccatcatttattgcaggtggcaaattgattatcggcttcaaatctttaatgaacttttccattcctgaatcatgtccaatatctttcaaattttgcattttcttttggtaactataaaccctgtagtaaaattcaaaaataaattccttcctcattgattttattacagataggtttatagttgccttattttttgtaggttcatcactcacgacccttttttactgaagagtaaacataaatcagagatggctgctgcgatgttatcgtggttattgaaaaccttgaaggtttctacccttgcccgtccggcttgtggattcatctttatattcttctaccgctgattgcgcagcggctccgggggttcttgcagcgcgttccaggattgtttttgtttattgagcagctattttttattggaaatctactacattttagcgataccgattactgcactgttgacttgagaaatttaaagcattatttttgagtatggtttttgagaagacaattgaggaagtaataaatgagaattatgtttatgccagagcactgcattatttaggaattgacttttttgagaactcctccagaaagttggtagaagtctgtagggaacgagggttaaaccaacaacaagtaataaaaaacttctatgaatttgattcttcagccagatgctcttttaaagagctttcctcatatccaattgaactcttggtagaatacctcaagcatactcatcatattttcattaaagaaaagcttccttatatcgttcacctggccaaaacatacgagaatcctgcacttcgagatctaatgccggaatttgtagaagacctgattcgacatatttacgaagaagaggataccacttttaaatacatacatgcccttcacgaaattaacaaaggctatgaaaaggcacccatctccagattaatatattttgaagacttttcattgaaagatgagttagcacatcacgagggagaagatgaattaggggccattcgaaccctttttgatttattagagaataacaaccttcacggaagagtccttttaaatgagctaaaggcttttgaccgagaaatgatctaccatgcggctatcgaaaatcaaatactctttccaaaggcaatttcacttgaaaaggaagttctgaaaaaaattacttcactaagtaaactcaactaatgtctcgcatactagcgattgattatggagccagaaggacgggtttggcagtaactgacccattacaaatcattgcaaatccgcttgacgtggtgcctactcacgaattggaagaatacttaaaaaattatttctccattgaaaatgttgaaaaagtagtgattgggatgccaaagaatacgaacggttcggataccgatgcgactgttttggtccgggcatttgtaaatcggttcagaaaggtatttatagatatgcgactaattttacatgatgagcgattcacttccaggcttgcttttaattcaatgatcgccggaggtttgaagaaaaagaatcgtcagaataaaggaactgttgataaggtgagtgcaactatcattcttcaatcttatttagaaagtatctcatgatttttccaatcgtactgtacggggatccgattttgaagaagaaagccacagctattaaaaaaggcaatgatgctataaaagaatttgtggagagcatgtttgagaccatgtatgaggcacagggagttggccttgctgccccgcaggttggtcattccattcgattgtttgtgacagacaccgcaccaatggaagaggaaggggtgaatggattgaagaaagcattcatcaatccaacaatgttagaagaaagcggtgaagaatggacatttgaagagggatgtcttagcatacccggagttcgggctgatgtgaatagaaaaacaaaaatcaggctcaaatactttgatgaaaactgggaggagcatgaggaaatatttgacggaaagaaagcaagagtgattcagcatgagtatgatcacatagaaggcaagttattcacagattatctctcctcttttaagaagcggctcatcaaaggcaaattagcggacatcagtaaagggaaaacggacgtaggatattgtgtaaaagttccaaagtagtgcaggatttatctattgctttgattcaaactgatttacactgggagcaggtagatgctaaccttgctatgtttgaagagatgatttggagtatggatgcagatgtagacctcatccttctgcctgaaatgttcacaacaggcttttccatgaacgctgaaaaacttgcggaatctccgggtgggaagaccttcagatggatgcggcagatggccaaagtgaaagatgctgcaatggcaggaagctgcatgattaaagagaaatcacacttttacaatcgactttattttgtttatcctgacggcagcgcagcgcattacgataaaaaacatctgtttacgctggcaggagagcataaagtctatactccgggtaaggaaagaaaaatcattgagtttagaggatggcgtattaaacctttgatttgttatgaccttcgatttccggtttggggtcgatccgaaaaaaaagaagaccgggactatcaatatgatctgttaatttatgcagccaactggcctgatgcaaggattggagcgtgggataccttgttaaaggccagagccatcgaaaatttatcttatgttgcaggaataaatcgaaccggcatggacgggtatcccaaagaataccccggacattcatctgtttatggctacgacggagaacaattggctttctcagacaaaaaagaagagattctttatgtaaacctgtcttccgaaaatcagcatcagtttagaaaacgatttaattttcagtatgatgcggattcattcattctcaaataagtccacccctattattataatgtcatcctcaaacactttttattagattgagttcatggttaaacttccgtttattctttggataagtgagacgaatcagcctatattagaggtatgaaaaatgaagatagaatcgttgaactactagcggaaagccttcgaagacaggacaggcaggaagatatactaaagaaccaaggagatgtactaaaaaaacagggagatacactaaagaaacagggagatatactaaagaaaattttagaaactcaggagaagttagtagaccagtttcatcgaatggtggaccagcttcatcgaatgaatgaccatttgctcactaagcaggagaaaatagaagacagaatctctaggcttgaagataaaatttttggaaaatagaacatagcaaaaagataactacacttggagagagccttcgggtaataaaaaagccccgcagatgggcgaggcagccaaatgttttcacaacggaataatccttattgtgatttgtttgtaaattgtacggcaatattagataggcattaaaaggcgaaagtgggattatgttttaattatcaaaacactaaaaaaagacgactaccgaagcagtcgtcaaggataaattcctacggcttatagccttattatgatttatctttcaagagcaaatatagaacaataaataataacatgaaaaaacttggactagatttaggcagttcttccattgggtgggctttaaaagaggataaagaattcttgggaaagggtgttgtgacatttaaggcaggaatgagcgaaggtcggagtggcggctactcctcacccactaaagacaggagagaagctagggcgaaacgaaacctcatcaaagccagaaagcagcaaaaatgggaactcctcaaaattcttacagaaaaaaactttgttccaattgaaaaatacgaattagagatatggagcagatataaaaaaggacagctcagaaaatttcctgagacagaaacatttttaaaatggctggcttgtgattttagatacaataatcaaaaaaactataaaaatccctacgaattaagaattgctgcacttgatggaaaagtcagtgaccatgaatttggcagggcattgtaccatttggtacaacgcagaggatatagaaatataggagtgcccttctttgtggaggatggatcgaaatatgagtcaaccgagaaggataaagagaccaagacacaattagaaagaagagaaagagacggcttcaaagaagccatggataagcatggggttttgtctaaagccttgaaaaatgaatttctggataaagggaagagagccagaaaccaatatacactcagaggggaatatcaacatgagtttgaacaaatatgcgaaaagcagggctatgatatttccaaaggggaaaattcatataatgaccctttcatacaatcactttggaaagccatcatttggcaaagacccctcaaaagccaaaaaggaaatattggtaagtgtacgctggaaacttcaaggttacgatgcccggcctctcatcctgtctttgaaatattcagggcatttagtttcatcaatacaataaaatacgtcagttccggtggagaaaaagaacccattgcacaagaactaagagatgctctttttgaaggggtatttctaaaaaaggacaaaaacttcaaatttgaagacatccgaaagtttcttgacataaaaatcggaagtaaaaagcagtataactatccggtaaatgaaaaaggggaatatgacacttctgtatcgggaatgccgataaccaaagggctaatcagcattttcggggatgaagtaaaaaaagcagtctacacgctggagcaatataatataggaactgcgcctaaaatcattcatggaaaatactctatctacgacctgtggcacatcttatttgactttgatgaggcatatctaaaaaagtatgccgtcaattctttgaaggttgaaaataaaaagaataagaaagaagaagtcttcaatccttttgccaaactcaagcagtccgttcaatcaggttatgccgatctaagcctcaaagccatgtgtaagattattccttttttaaaagacgggcatctatataatgaggccgtagtactagctaaaataccggaactactgggcgaagaatgggaaactcaaaaagaagaaattagtcaggctttccaaacggcgaaaaatgcctacgctgatcacaaaacaataatcaatatcacaaataagctgatagagcaatggaaagcagaaaaagaattgtgggacaacggtgaaggacaagtaaaagcatggaaggattatacttatgaactagaccactatgatgaagaagatattttaaagacctgtgaaggctatttcggtgaaaaatcctgggaagatctaaaagatcggcaaaaaataacagaatcagtagaagaagaatatcaagccttttataaagatcaaaaaaggacataccgacaggtgccaacattatctgatctctttaaagaagagctaacaaaaataggcattaccacaaaggacggtgacctttatcatcattcggtgaaggaaaatcgctatttaaaaaagtacttgaacactaaaaccggggaatttgagttaccggaagatactaaaaccggactgtctctactgcctgaagcaaccacagacagcatcaaaaaccccatgttcaacaaagcaatgagcatgctcagaaaagtaattaatgaattgattaaaagtgaaaaaatagatgaggatactgaagtcactattgaggtagccagggaactaaacgataacaacaagagagcggccattgaaaggtatcaaagggaacgtgaaaaaaagcgagagaagtaccgaaaatttttggaagagtttaaagaaaaagaagatcgcaaagacatcaatgtagaaaacagcctggatgaatttgagctatggacagaacagatatttgaagaaacaacggatgaagagggcaaacctattcagcagcgagaagctattctgaaagaaaagtctgacattgataggtatgaactatggatagaacaaaaagggctgtgtatgtacaccgggaatacgatctccattgcacaactcttttcaaataaaatagacatagagcataccataccccgaagcatccttcctgacaataccatggctaatcgaaccgtagcttatgcacattataatagagatgagaaaggtaaaaatttgccacgtcacctttataattttgataaagagataactcacagattagaccactggaggaaggagagagacaagtggaggaaggagagagacaagtgcctttttaaaagccacacgaaagcaaaaggcaatgaagatgaaggcgcaaaaaataagcgaatacagaaaaagcactactttaaaatgcactacgactactgggcagataaaatagcccgattcgaggcaaaggaagtaaaagacggctgggcaagacggcagttggtagatacgcagatggtaagtaaatatgcccgggagttcctaaaatcttattttaaaaaagtagaagtacaaaaaggggaggttacggctattttcagaaaaatccatggatttcaggaagaagatgagatcaaaaaccgtaacaaacatactcatcatgccattgatgcagcggtgcttacgctcattcctgccaatagcagcaaccgtgaacgaatgataaagcaatatcacaaggaggaggagaataagcagcctacccaaaaaaagccgtttgcttcatttaatccccaaaccctcataaaggatattgaatcaggaactttgattgtaaattataccactgacaccatacttaaacaaacagttaaaaatgtaagaaaaagaggccgcttgcagtacttagagaaaaatggaaacaaaatacaaccgaaagccaaaggagataccatcagaagccaactatttaaagaaaactatctcggcaagatccggaatgtaaaaagagatgccgacggaaaacttaggcgggagcaagggaaatggatatttgagtcaggtaaaaatgaatttacatttaccaaaagagttcctgtagatggtgtaaaaacaaatgatattatagacccaaagatcaaagatatagtagcaaatgctaaagcggaaaatacaataccaatagatgcacagggtaaaaccatccgacatgtacgaataaaagcaagcacaggaagagaagttaagaagcggctcaattacctttcaaagcatgactataaaaataaattctactcagaggcaggatctattccctatgccatcatggtagaaaaggaaaaaaaacgactaattccattaccatcatttgaaatagctaaagcggctaaggatttgaacataagaaagtgggatgaagccgatattgaaaagtatctatctaaatgccctccgaaactctccggttattccggcaaacgattgttaagggttggtcaaaaggtaatcgtattcaagtccgacgaagaatatcatcaaaaagaggatttagcttttcaaatgaatcggatgtattacatcacacagtttcattcagatggacggaggatatatttgaggtatcatttagaggcacgatcaagagatgagattaataaatatcctgcatctattgaagtagagggagatacacctttgctgttaatgtcaagcaaaaactggaacttcctttatgaaggcgaagactttgaaataagtcttttaggagaaataaagtttatcaaaaatcattgaacgcatcaaaaacaacctcgaaatgattaaaaataacttcagatcggactaaaatgctcgctgaccggactaaaatgctcgctgactggactaaaatgctcgctgactggactaaaatgctcgctgactggactaaaatactcgctgaccggactaaaatgctcgctgaccggactaaaatacccgctgaccggactaaaatgctcgctgaccggactaaaatactcgctgaccggtctaaaatacccgctgaccggactaaaatacccgctgaccggacaacaataactgcttaatgaataaaaagagagacagaatggttataaatgaaccttcaataaaaaagtatagttaattgtaaaacatatttataatgaatcagaagcaaatcaaccgtctggaaatgtaccagaccacacttgactatctggacgtacataatgccgtctggagtaccgtacccatcatagggaaatacaaaaatgcactttcgactattgtcacatcaatcaaaacagcggcggctgatcaggccgatgcacgggtctttatcgggaagtctttatcggcattgaaaaagaatatcgctgcgaagatggacatcctggatgacatgctggaggcttatgccgtagatacggacaatgcggaactgacccaacaggccaacaactctaaatctgattatttcggtctgcccaatgaagactttgagatcaaagtaaagcaggtcatcggcttgttggaaacgcacctgaaagcaatggccgactatgggatgtccgaagagcagttgaaggatgtaaaagcggattatgaccagttcctcacttcacgcggcaagcctcgcaattatcaggtagcaagcagcgtagccacgcaggatatggaaaccctcttcagagaaggaacaacagcgaccgagaagttggacagggtgatgaagcgctacaagcgtgccaatgccaacttttacaacgggtatgtagctgcccggaaggtcgtggataattgaacccgacagatatcgggaacacttgaaaaacttttggaaaggttgaaacttctcaaaagttaacttcaagaaaaaatggtacttcaaaccttcaaggttttcaaaaccttgaaggtttctatcggcctcctgccataagatatcaaagcccaagctacctttgagatatgaatccggcaaaatcaaatattgcaaaccgcaccctcttttgccatgacaatttagaggtgctaagaggcattaattcagcatgtatagatttgatttatcttgatccgccttttaacaagaaaaagacctttaccgcacccattggcagcagtgcggagggtgctgaattttcagatatatttagagaaaaggacataaaagaagactggctaaaagacatcaaagaagaccactattcgatccatgaactactgagtgcggttaaaaatattgaaggtaagaagtcatacaacttttgctatctggcttatatcgctatccgtctgatggaatgtcaccgggtgctaaaagacaccggcagcctgtacctgcattgcgaccccacgatgagccattatttaaaactggtacttgactgtgttttcggcgaagagaattttcaaaatgaagtaatctggggttataacgtaggtggaaaaagtaaaaaaagatgggctagaaaacatgacgttattcttttttacggcaaaaagtcggatttttatttcgatggaataaaagcaggtattcagcgtgacacaggcactaaaagtaggggtggaaaaataggggttgatagtgaagggaaaagatatcaagataagatcgtaagaaaaaccggaaaagtatatcgctattatttaaatgagcctaaaattcctgaagattggtggtttggtatcaatagtttgcaatcaggagatacggaacgcaccggttaccctacacaaaagcctcttgcattgttagaacgtatcataaaagcaagctcacctcaagatggaatagtcttagaccctttttgtggctgtgccacaacgtgcgtggcatcggaaaagctaaacaggcaatggataggtatagacgtatccgtaaaggcttacgaactggtaaaaatcagattagaaaaagaagttaaaagccttttcgctcaaaatattggattttatacaagcccgccggacaggacagaccaaggcgttgattatttatccgaaaaatacgtttacatcatcagtaacccgcaatatgaaggtgaatacaaggtaggcattgcttccaatgtaaaaagccgtttaaatagctatcagacggctgatcccgaaagaagctacaaactggaatatgcacatctca

SEQ ID NO: 4451 - DNA, 5039 bp, synthetic construct
  source 1..5039: mol_type = other DNA
  variation 1060..1143: note = note, n is a, c, g, or t
  variation 154..263: note = note, n is a, c, g, or t
  misc_feature 1..5039: note = Synthetic
  variation 4756..4853: note = note, n is a, c, g, or t
ttttgttttttttctttttttaaaaggtagatatagatcttcgatctcctgaagactaaaactgttttctattctttgttttagatcctctgttaaagaattttgttcttcgacagatttcagaatggtctcttttcttttaataatttcttcnnnnnnnnnnnnnnnnnnnnnnnnnnnnnnnnnnnnnnnnnnnnnnnnnnnnnnnnnnnnnnnnnnnnnnnnnnnnnnnnnnnnnnnnnnnnnnnnnnnnnnnnnnnnnntttcttttaataatttcttcgaattgtctattcagcttagcaatctgctcaatctgagtttcgtccagatttcctgttgcatctttcctgtatcgggaaataaatggaattgtacaatcttctgaaaggagttttatggtggcagtaatactgttatcggagatgtttagatgttgctggatgaatgtggtcgaggtcattaactagaaatattaaataaaagaaggcgagttgccccgccttaaatgttttcacaacggaataatccttattgtgaattgctttaaaaattattgtatcaaatatataaaaaaaatctaatctaatcgtgttttttgtaattatttctaaataaaattattaatttaggaaactataataatacaaatatgaagagaattttaggattagacttgggaacgaataagattaattgtgcggaagatattgaagatgaatcaaaaataaacttacaattaaaacaaaaatggcaactaccagaagcagttacctagaaaacttttctacggcttatagccttgttgtgaattgtctttcgattacaaatgtaaaaaaatattttaataaacaaataacttatggcaaaaattggattagatataggaagttcttcattaggatggtttatcaataaaaataaaaaaggcgttatcacttttgaaactggtatgtccaaagggcaatctggtggatatacatcacctaccaaggaccgtagagaagctcggtctaaaagaaatttgattagagctagaaaatacagaaaatgggaattnnnnnnnnnnnnnnnnnnnnnnnnnnnnnnnnnnnnnnnnnnnnnnnnnnnnnnnnnnnnnnnnnnnnnnnnnnnnnnnnnnnntgggaattattaaaagttctattgaatgattacgttcccttgaacgaagttgaattgaatgagtggtgtcattatcagaaaggaaggagaagaaaatttcctgaaagcgaaaaatttttaaaatggcttgcttgcgattttacttatcaagaaggggaaaaatataaaaatccttatgaactaagggttaaagctttggatgaaactttaagtaaacacgagttgggaagagctttgtatcatttagttcagaggagaggatataaggacatcggtgaaactgatcaagaaactgaaaaacaaattctgcgaagaggagaaagcggatttcaaaatgcattagatacaaatagaacaattgcagaagcattagcaacagaatttttagataaaggcgagcgtgcaagaaatcagtatccctatagagaggaatataaaaatgaattggaacttatatgcaagtctcaaggattttctgtggcaacgaatgagaaaggagattactctgatgttttcgtaaagaatctttggaaagcaataatttggcaaagacctttaaagagccaaaaagggaatatagggaaatgcacactagaaccttcaaaacttcgatgtcctgtttcacatcctgcttttgaaatttttagggctttacagtttatcaatacaatcaaatattttgatgcaaataatgaaaaacaaagcattaacaaggaattaaaagataaactttttaaaaacgtattcttaaaaaaagattccaatttcatatttgaggatattaaagagtttttaaataaagaaactaaaactattaacaaatacaattatccaattaatcctaaaaacaatcagtacgaaacgtctgtagctggaatgcctatttgtaaaagtcttgtttctttatttggagatgatattcaaaaagcattgttggatattgaaaaatttaatattggcaatgctcctaaagtcataaatgaatattccatttatgatatttggcacattgtttttgactttgatgagcagcatttagggaaatttgctgtagaaaaattaggaattgaaaatgtcactcgaaaaagaaaaggtgaagatgtttctatctcgcctttagtagaattaaagagaaagtttttacaaggctactctgatgttagtctgaaagctatctgcaagattattccttttttgaaagaaggatatttatacaatgaagctgttgtgcttgcgaaaattcctgaattaatgggaaatgattggaaatcatctcaacaaataattttagatattctgacagaaagcaataagatttatcaggagaagtcaacgattgcatctatatcaaataatctgatagataagcataaagggcagacaagagcaatgatagatggcagcgaagaacaagtgtttgcttataaagatttttcttatttgcttaaagacgatgatattaaagatgtaaaaaacgcctgcatttcttattttggtgaaaactcttggaataaggtaaaagatcaggaacaattaattcagaaagtaggtttagaatatcaggaatatttcttcgaccataaaagagcttacagaaaaacagatacacttacggatatttttaaatcattattaaaagaaaaaaatatcacgctcactggagagctgtatcatcattccaacagagaaaatttatacaataaaaacttagaagtaaatttcaaaaccggagagaaatacctgcctaagtataaagatacagaaatcgaaattctgccgattccttttattgatagtatcaaaaatccgatgttcaataaatcaatgagcattgtaagaaaacttttgaatgaattaatcataaatggagaaatagatcaggaaactgaggtaactgtagaactcgcaagggaactgaatgataataatttacgagctgcaatagaaagatatcaaaaggaaagacgagataatagggacaaaatcagaaagtttttgcaacaatataatgatgaagaaaaccggacgattaatgtagaagataatatttccttgtttgaactttggacggaacagatttttgaagaaactgaagatgaaagcaataataaaattcagaacaaaaacaggttagatatcctgcgagaaaaagaagatgtaaaacgttacgaactatggactgagcaaaaaggtcagtgtatgtacactgggaaaatgatttcgatttcacaattattttcaaacgaaattgatattgagcatactataccgagaagtattttaccagataatacatcggctaaccaaactgttgcattttcaaaatacaaccgagatatcaaaggtgcaagaactcctttttattgtgaaaattattctaaagatactccaaacggaacaagtatttcaccaaggcttgatagttggaaaaaacttcgggattattacaaaattcagtatgaaaccagaagacgtgcaaaaggagcagaagatgaaaatactaaaaataaaagaattcaagataagcattactataaactgcatttgaatattggaacgataaactaaatcgttttgaagccgaagaaattaaagacagttgggccagaagacagttggtagatacccaaatggtaagtaaatacgctagggaatatttaaaactttactttaaaaaagtagctgtacaaaagggtagcgtaacggcagatttcagaaaaatatttggatttcaggaacaggatgaaataaaaagcagaaataagcatacacatcacgctatcgatgcagcggttctcacaatgatccctaccaacagtagttacagggaagaagttctaaaagaatattatgcagcagtagaaaacaaagacaaacttaaagttgatgaattaagaaaaaaaatgattcctccttatttcaatgttcagtcattgataaatgaaatagaatcttcaacgctaattgttaattatcaaaaagataaaattcttcaacaaactagtaaaaccgttagaaaaagaggagtaattcaatatgtaaagaataagaatggcgaatttgtatatgatgaaaatggggataaaatcatcaaaaaagcaaaaggcgattccataagaagtacattatatgcacaaacctatttgggaaagatacgggatgttgaaagatatgccgataaccaaccacaaagagaaaataatgactggaaatacaaacaaggtaaggatgaattcatttttgttaaaagagaaaatatctccaaactaaaagaatcagataaactcattgaatccataattgatcctaacataaagcaattggttttggatcaaaaaaagaattcggaagtaaaagattttcaaggaaatgtaattcgtcacgtaagaattaaaacaagtgcaggaagagaagtaaaagaaagattgaattatcaatcaaaatatgattataaaaataagttttattctgaagcaggttctgttccttattcaattctagcacagagaattcacaatggtgctattaaaagagaattgattccaatctcatcttttgaaatagctaaagagtataagaagtatggaaattttgtaattgataattttatttnnnnnnnnnnnnnnnnnnnnnnnnnnnnnnnnnnnnnnnnnnnnnnnnnnnnnnnnnnnnnnnnnnnnnnnnnnnnnnnnnnnnnnnnnnnnnnnnnnttgtaattgataattttatttctgaaaagtatcctgagtttttgcaatgggataaaaagcaacttctcaaaattggtcaaaaattaattgtactgaacgaagatggcgattacgaaaaaagacaaaatatagattttcagcaaaagagattatttaatattaatcaacctgttgtgcatttaggaa

SEQ ID NO: 4452 - DNA, 24521 bp, synthetic construct
  source 1..24521: mol_type = other DNA
  misc_feature 1..24521: note = Synthetic
tggcttctcaagttaaagagttcttagacgaaggattggttaatataattggtggttgctgtggaactaatcctcagcatattgctgctttagtgaaattggctcgaacagcacaacctcatattcctgttgaaaagcctaaatacatgtggttgtcgggattagaactttttgaagctaaacccgaaatgaatttcatcaatgtaggtgagcgatgtaacgtagcgggttctagacgatttcttcgattaataaatgagaaaaaatacgaggaggctttgactattgctcataaacaagtagctgatggtgcccaactattagatgttaatatggacgatggtttgcttgatggaccttctgagatgactcaatttttaaacctagttgcttctgatcctgaggttgctcgtgttcccattatgatagattcatccaattgggaggtaattgaagcgggacttaaatgtactcaaggtaaatctatcgttaactctatatcacttaaagagggagaatcggtgtttttagcacatgctcgtttaataagaaaatatggagcagctgtaatagttatggcttttgatgaaaagggacaagcagatacattagagcgccgcatagaaatttgcaatcgagcttatcagttgttggtgaacgatggatttaatccattagatataatatttgaccccaatgtgttagctatagcaacaggaattgaagagcatcgaacgtatgccattgattttttagataccataacttggattaaaaccaatctcccaggtgctaagattagtggaggaattagtaatctctccttctcatttcgaggtaacgagtatattcgtcaagttatgcactcagtgtttctctactatgccatacagcggggaatggatatggcaattgttaaccctggtttagccgttacttatgaagacattcccaatgagctacgtatcttgaccgaagatgtgatttttaatcgaagagcagaggcaactgatgaattaataacttatgctgaacaacacaaaagtggaactgtagaaaaaacaaacacagcatcagatgagtggcgtttgtggagtgtagatagaagattgtcttatgcactacaaaaaggtattagtgattacctagaagaggatttgaaagaagcattaacctattatagtaatcccgtcgatattatagatcaacccttaatgaatgggatgaatcgggtaggagtactgtttggtgaaggtaaaatgtttcttcctcaagtggttaaaaccgcacgaactatgaagcaagccgtctctatattgcaacccgctttagaaaagcaaaaagcaaatcaaaaattaggccttactaaaaatgctaaactcttaattgcaacagtaaaaggagatgttcatgacataggtaaaaatattgttgccattgtgttatcctgcaatagcaatgaggtgatagatttaggggttatgactccaacagaagtgattatccaaaaagtaaaagagattcaacccgatatgatttgtttaagtggactcattaccccttcattagaagaaatgtgtaatgtagctcgtgctatgcaaaaagagggattctctattccaatattaattggaggagctacgacttcaaaattacatactgcccttaaaattgctcctaattatcctaatggtattgtggttcatactgaagatgcttctaaaacaccgggtgttgtagctcagctaatgaatccgttatcagttactccgtttattgaatcgctaaaagaagagtataaagaactttgtgatgagttaagtgagtcgaaagaagattttctttcttttagtgaggctaaggctaatcgctatcctatagcgtggactaaccacaccatagtttcaccccatcggttaggtagaagggtattaaatgcgattcctatcgaagaagtaactccttatattaattggaaattcttttttcctgcatggggattatcgggacgttttgcatcaatacaagctcatgaaatgaaagaggatgccatttggactcaatcgttccctaaagaagatggagaaaaagcggtagaggcagcaaagttatatcgagatgctcaacacatacttcatcaactgatacatgataaggtcgattttattcatgctgtttatggaatttatgaagcgtatagtcaagatgaggctatcgtagtcgagggaattgagtttcctatgttacgtcaacaaaaaacaaataaagatgggtattgtctttcattatgtgattttgtttctcctcaacaatttggtgaggttgaacaagctatcgattacctgggtgcttttgccgtaacagcgggtgtgggagctgatacatggttaataaaccaaggaaaagaatctgatgattattaccagttactcttaaaatcattactcgatcgattagttgaggctacaactgagtggcttcaccgaaagataagagtagaagagtgggggttctcttcgaacgagtcatcctctataaaagagttgtttgctctaaaatatcaaggaatacgtcctgctgtaggttatccatcaattcccgatcagtcaatgaatttcttattacatcacaagctattgaaatctcaagaaataggcatagagttgactgaaaatggagtgatgtatccaaatgcatcagagagtggatttatattttctcatcctgaggcaaaatatttcgctgtgggtaaaataggaggagatcagttaatggagtatgcgaaaaagagagaattagatgagcaaacgataaaaaagtttctagcctctaatttataactcgtgcaagaaagagcaatagcaaagggatatataaaaacgcttctattagttatataactcaatagaagcgtttttatatactctaccctaaggtagggttgcttgtatttattctaatatccaaagatatcagtcgttgttaattgcttaacaggaccaattttacctaacttatcaagatctaaatctttcttatctcctaaaataaaataggtgtattttctatttttaatccattggtcatggaaatcaatgacatctttcaaagtcatgttttgaacctcttgatacgttcttttacgctgatcacccgttaatccaagttctttagcatctagataattccagataatatcacttttagtaatacgctctgttctaattttagtcaacaatccatctttagcaagtgtgaaagctgattcagaaagaggcatatcttcaatgatatcattaaaagcataaatcgcatccatcattttatcattttgagttgcaatttgagcaatcattgtgtaagggtatttaatcttattaggacttactaaacctgcccatgcagagtaagctaatccacgactttctcgcatctcttgaaatacaatggagttcataccaccgccaaaatactcgttgtaaagcgatcgagcagattcaatttcaggattgtagttttcagcttgattagagtacatccccatataaatctgttttgcatcataaggagcaattaagacttgagtttcagtcgtttcttgctgcttaaattgagtatcaactagtggtttctctaagggcgtttccacttggtggtggttatccacaatagcaactacatcgtttgctttagaaggaccataatataatacttgatgctcatattttcttaatgattgaatggtttgaattaatgattctggcgatgtgtttttaagctcatcggcagtcattaggttcttagctggagaattctcaccccaaatagcatagttgtataaacgagagaagttttgtgattgatttaactttgcatcagttctagcctttaataggttacccactaggttagtataagcatccctatctacttgagcgtcatcaataatatgctctaatagtttcagtgcttcttccatattttcttgtaaaccagaaatagagaagtaagtcgtttcatttcctgctgagaaacgataatcacaagctaattgataaaaggatttctttatttcttctgcactcattttagaagtacctacaaaatcgaggtaatcaaaagcagtaccaagttctttgatttgatttcttccaaagtcaaagtagaagaaaagttgaaacaactcattcgtatcattactcttgtaaacaagaggtaaaccttgagctgttgttaggtgagttaaatccttatcaaagtctaaaaactgaggttgaataggttgaacttccgtagcttgaatttcttttaagaagttactagccgaatctctattcattacaataggagtaatttcaggcttaggcatcttcacctcatttggatcggtacctgtttgcttgtaaactaagttgtagtttgtatccttaaagtatttattagctaactcttttaagttttcaatagaaagttgattaatggagtgaaagcgagaaaccatatcgctccagtctaaactattaataaaagaagaaacataatagtcagctcttgaacgattatcttcaaagctatacatttgctctagcttcatattattaataactgcttgaagcatctcttcatcaaaatcgcctttgcggagttcttctatttgatcgagtaataactctttaacttcatcaagcgactgtccctctttcggacgtgcttgtactagtaaagcacctccatcggccatacctaaaacaccagcaaaagcacctagtactttttgttgttgatttaattctaagtctaataaccctgctttcccattgtataacagataagataaagcttctaatccaacataatctggatgatttatagcgggtaatcgccaagctagtgtaatgttttctgcatcaggtcctagcacagtacgcacaataggctctgttatagcaggttcctcttctgtctttagttcgggtagattatgatttggttcaagatgaccaaaatacttttcaataacctctaccatagcatcaggctcaaaatctcctgataaacaaatagccatattattaggaacataccacgttttataatactcctttatattaataatagaagggttctttagttgttcttgtgtacctaacacagtttgtgtaccgtaagggtggtgtggaaagagagacgatagaatggtttcatagacctttctaaagtcatttgtaagtgacatgtttttctcttcatacactgtttctagttctgtgtgaaatccacgaataatgttgttctcaaagcggtcggcctgtattcgtgcccaattttcaatttgattagcaggaatatcttctacataaacagtctggtcaaagccagtatatgcattagtccctttagcaccaatagcagtcatcagtttatcgtattcgtttggaatagcaaacttagaggcctcgtaagagagactatctataacttgataaattttattccgttctgcttcgtcggttgtttttctataaatttcaaactgttcttcaatagcacttaatataggctcttccgaggcatagtcaaaagtaccatattgcttagtacccttaaacataaggtgctcaaaatagtgagctaatccagtcgtctcttttggatcattttttcctcccacttttactgcaacgtaggtttgaatacgtggagtttctttgtttactgtcatgtaaacttttaatccattttctagtgtgtaaattttagtattcaatggatcgtttggaaactcttcataagaaaacttgccactatctgtacagccaataaaagccatgcttagtagcaaaagaaatgataaaaataatttttctgatttcatataaatagttattgtaaataaattcttaaaagtttgatatctaaagtcaattctttaatgtggattgacgtttttttctgaacacaacgtgctcaagtaaaagtacactaatcacacccattacaaatccattacctaaaattggacgaaaagtagaaggtatttgatcgagtacataatcgggagtaaaagataatattaatcctaccattaatggcaatccaatggttaaactgtcattaaaactactgattatgtttttttctgtgcctatcatttgaaaagaggcagagagttgggttgccatgaggtagagtaaaatagtccccatcgttaattctggaattaaggtgaggtactcaataatagacggaaataaagcacaaccaataagggctattccggcaggaattaatgggtatcttgatgcacaacctgtagccataataagaccagggctcaaagagtaatctactggaccaataacacccatagaccctgcaaatatattcattatgccagtaacacctacggctctctcacttcgtttatctaactgatcggcctttattatctttcctacagattgaacagaacccaattcattgatgagtagggcaatgtaacaaaataaaaatgagagtgtagtacctaaatcaaagttcaacgatacaaaccagctggaggtttttgtccctgctatttttgcttctgtagagggtacacccataacagcaaaacagataattgagcctaaaacaagagcaattaataccacagtggacttccaaatgcctttgaagaaatgattagccaaagtcattaagaataaaaagctcagtgcaaacagtaatgaaaataaggcataactttcttcaccaaaaagcaaacgtagtataacaggagataaggtaaaagcaattaaagacataatcacaatgactattctaggggtaaatataaactgtatcttagaaagcaaacgactaaaatacaacacacctaataaaacacccccaatgattatggcagtataaatttgtgcctcatccgccgatcctgctgaaagtacaccaattagtaaaaccgaagctggaccaataactacaggcattttatgtccccctaaaacctgtaaaataagtcctacacccataataataagaagtttttgagtgtagaaaatatgtcccgctgtatctaatccctgcagattactaatcaccgcacttaaaataattaccataggaatggatacaagaaaccattgcaacccatacattgccagcgaaaagggtggtaatttatcattgagattgtatctgaagttcatatctttgtcttttattaaatttaataatgaagctgaaattacattaaaatagagttctatacaaatctatgcttaaataaacgatttgttttaacggttttagtgttgtagcaatggattatgaagaaaattaagaccaatgcagctcgcttgttagatcaagcaaatatagcctacgagctaattacctatgaggtagatgaagaagacttaagtgctgtgcatgtggcacaaatggctggagaatcggtagatcaagtatttaaaacccttgttttagaaggaaataaaacggggatttttgtctgtgtcattccaggggctgatgagctcgatttgaagttagctgctaaagtatcaggaaataaaaaagcggaaatgattcctatgaagaccttgcttcctttaacagggtatatacgtggagcttgttcgcccattggtatgaaaaagctacttccaacctttatacatgagagttgcttagcttacgatttcatttttgtaagtgctggacaacgtggtgtacagttgaaaatcgatccaaaagatttgataaatgtcattggtgctgaagtttgtcgtttgttttaggaaggttatcgataaatattgataactttgaagcgctttttaatataaaattgaataataatacgttaaataaaaacacactgattatgtttaaaaaacatcctaagggattattagcggccgccttatcgaatatgggagagcggtttggcttttatgtaatgatggcaattctctctctttttattgccactaagtttggtctcaatgaagttcatacaggtattatttactctgtattctatgccttaatttatttattggcattagttggaggtattattgcagataaaactcaaaattttaaggggactatattagctggtattgtaatgatggctgtaggttatgtagtcattggtattccaactccaacccctgttccagatcatctctattatgttattttaggaattacttgttttggacttttattaatagcctttggtaatggactctttaagggtaacctacaagctttagtaggacaaatgtacgatgatcctaaatatagtaaatacagagacgaaggatttaacattttctatatgtttattaatataggtgctatttttgctcctttatttgctacaggaattagaaactggtggatacaatcgaatggatttgcttataatgcttccttacccgagacttgtcatcagtatttaaataacaccatcaccccagaagctttaactaatatgcaagagattgcttcgggtatggggtatacaggtaccgatatgggagcttttgctattgaatatttaggtatctttaccacagggtttcactatgcctttttagtagccattgtagctatgggtatatcattagttatttatatagccaatagaagaattttcccagaccctacagctataaaagaagctgctgccgctgcacccgaaatggatgtaaaagaagtaaaacaacgtttatatgctttgtttgcagtgtttgctgtagttatattcttttggttctctttccatcaaaatggattaaccttgactttctttgctagagactataccgatttaagtagtatggtgtttagttttggtcaattcaagttagaaggagctgagttattccaaagctttaatcctttctttgtggtattcttaactcccattgtagtaggtgtctttggttggttacgtgctaaaggaaaagaaccttctacacccaaaaagatagctattggtatgggtattgcagcttttgcttacattgtaatggcattaggctctatgggattacctacaaaagctgaagtagatgctatgggtggtttacctcaggcacaacaagtaactccactccttttaattggtacttattttatacttacggtggctgagctgtttatttctccactaggtatttcttttgtatcgcaagttgctcctcctaaataccaaggtattatgcaaggatgttggttaggtgctactgctttagggaatcaattactatttataggtgctatattctataaaaatattccaatttcattaacttggactgtgtttattgtagcttgttgtatttctatgttcactatgttatttatgttaaaatggttagagcgtgtagctaaataagacctttttaattctaaaatataatttatgaaataggctgatagtattatctatcggcctatttttttgcttttaaacaaactttagccgttttagaatagaaaaaacacgttactcttgttctatttttgtatcattattagttaaaggaataaaaacaataatctagtaaagaaaataatattgcaacaaaaagatattaatttttggcttagagtgtaggaggcaagggagaggtaaaagagaagcctatactaaaaaggcctatgaaaaaggggtaaaggtataagttgtgtacttacatcattcattagagtacgattgatgtagtactcaatggatgtgttgaattaatttaaagtggtttatctaactgaaagatagaccactttttcttttgacttattttatttaaaagaaaaaaggtgagttgccccaccttaaatgtgttcacaacggaataatccttattgtgaattgcttcaaaactaggagcaagatacataaaattatttaatataaaaaggattttgttgtgatttttattaacttgtaaaaaaaggtgttaaataaaagtactatactatgaaaagaatattaggtttagatgtgggaaccaacagtgtggggtgggctgtagtaaatcagagtaaagatggtgaatatgggaccattgaaaaattaggtagtcgtattattcctatggatcaaggggtaatggatcagtttgcccaaggacagacagaatcgacaactgctgaacgtacacgttatcgaggagttagaaggttgcgtgagcgttctttgttgcgtagagaaagattacatagagtacttcatgtgttggggtttttacctacgcattacgatgaatcgattggatggaataaaaatgataataaaacctatggtaagttcttacctggaaccgaagtaaagttggcatgggctgctactgatgaggggcatcgctttttattttacgattcgtatttagagatgttagaagacctaaaagtacatcagccaagtctttctaaaacaagtaaaactcctgttcctctagattggactatttactatttaagaaaaaaagcattaactcaacccattacaaaagaagagttagcctggatattattacagtttaatcaaaagcgtggatactatcagttgagaggggaggaagaagtagtagatgatagtaaaaaggaggaatattatgctctaaaagttgtaaaggtagagctggacacagagaacaggagtaaaaaagattggtataatatccatttagagaatgggtggatttatagacggagcagtaatgtttcgttagacaattgggtgggtttaaccaaagaatttattgttacaacgaggcttgatgcagaaggtaatgaaaaattaaatgctgatggagaagttcagcgtagttttaaaaatcctagtgaagacgattggggtttaataaaaaagaaaacagaaagtgatcttttgaagagtggaaaaacggtgggtgcatacatttatgataatttacttactcaacctaatcaaaaaatcattggtggacttattcggacgattgaaagaaagctatatcgtgaagaattaaatgagatattaactacgcagtgtcaattcaatcgtgctttacagaataaagagttatttcaaaaagcatgttacgaattatatcctaaaaacgaaaaccatagaaagaacttactcactaaagattttaagcatctgtttattgaggatattcttttttatcaacgtcccttaaagaccaagaagtctttaatagcaaattgtccctacgagtatagagtttttataaaagagggtaagaaagaaattgctcccataaaatgtattgccaaatcgaatccctactttcaagaaataagattgtggcaatttatagataatttaaaaatactagaacgagaagtagaagtggatgggtctatagcgtacgatgtggatgtaacggctaatttttttaagaatgaaaccgattgggtgaatctatttatctggttaaacgataaaaaatcggttaaacaagatgagcttttaggccaatttttaggacttaaaaaagacaaagggaaaaaagagcataattatcgatggaattatgttgaggatagagactatccatgtaatgaaactcgagctttgcttctgaaagcactttcatattgtgaggcagaagatagattagatgatttttcttttacttatagcttatggcacttgttatattctgttgaagataaaatagagttaaaatcgggattagagaagtttgcattgcgccatcagttgcctcaattgtttgtagaacaactattaaatacccctccttttgaaaaagagtatggtagttattcagaaaaagctataaaacgtttactacctttaatgcgtagaggaaaatactgggatatcgacgctatagataataaaactaagcaacgtattcaacgtattatagatggtgaagttgatgatagtatttctattcgtgctcgtgagaaattagagggttatagaacgctagaacagtttactgcactgcctttatggttagcaggttatgtagtgtatagtcgccatgcagaaagtggtgatgtaacgaaatgggattcgcctgaagccttggatcattacatacaagtagaatttaagcaatattcgttgcgtaatcccattgtagaacaaatcgtattagaaactctaagagtagtaaaagacctttggagtctttatggtgattttagtgagattcatttagaattaggtagagatataaagaactctgcatctgtacgaaatagaataagtactaggcagcaagaaaatgaaaatacgcgtcaacggatattgaatttattgatgagccttaaaaaagaggctcgttatgctgagttgaatccttattctccatcgcaacaagaaaaaatgcggattgtagaagagggggtgcttaatgctcagagtcagttaccaaaagatattgaaaaaatagcaacgagtgctaaaccttctagtaaagagatgcaaaaatatttattatggctagatcaaaagtactgttctccttatacaggtaaacctatatctttagctcgactatttacctctgattatcaaatagaacacgtgatacctcaaaaacgttattttgatgactctttttcaaataaagtcatttgtgaggcagaagtaaatagtttaaaaggggctctcttggcgcatgagtttattcaaagagaagggggaagcactattactgtgggtacaacaactgttgaaattcttaaacctcaagaatatgtagctttagtaaatagaacttatggtgtaaaaaataagttgaaagcaaagaagttattagctactgacttagatgaggttatcgatggatttagtgctcgtcaattaactgatacccgttacattaatagggtaatgatgcggttgctttctggtgtagtgcgcgataaagatgaagcagagagtacatctagaaatgtaattccatgtgctggacgagttactagtgtgttaaaacaccattggggattaaatgatagttgggataagttaattcagccacgttttgagcgattaaacaagatgacaaatagctcggattttggggtgtgggtagcttctaaccgcttccaaatacgtgtaccttttgatctacaaaagggattttctaaaaaaagaatagatcatcgtcatcatgctttagatgcattagttattgcttgtactactcgtaaccatgtgaattttataagtaatagttattcaagagatgttaaagatagaaaagggtttcggtacgatttaagagctcagctctgtgaaaaagagtataataaggggagttctgataattacagttatcaatttagaaaaccttgggatacctttacagaagatgcttatgttgctttgcgagagattgttgtgagtcataaacaaaatactagagtattaacaaaagcaaacaataaaacggaatatataaactccttaggtaaaaaagcacttcaaccacaaactaaaggagatcattgggctattcgtaaaccgttacatcaagaaactatttttggaagaactacgcttagagaggtgaaaaccgtttccttaaaaaatgcgttagaaagtaattggaaagctctagtttctaaattattaaaacaaagtattgaagacttaatttttcagtatggaggtaaatatgatgctaaagttattttaaagtattttaaagatagagagtatcaatttaatggggaagatattagaagggtagaggtgtatgagtataataacaattatgcggctacccgtaaagcaattgatgatacgttaacgttgaaacaaattgatagaataaccgatgtaagtattcaaaatattttaaaaaaccacctagaaagatacgacggtaatcttaaagaggcttttaatcctgagggggtagccgatatgaataaaaacataaaagcactgaatggaggaaaaaaccactgtcctatttatagtgtgcgtttgtatgaagatatgggagcaaaatttgctttaggtactactcataataatcctgataagtttgcaatagcagctaagggtacgaatttatattttggtgtttatgaagatgaaaaaggtaaacgttccttcgactctattcctttacatgtagttattgaacgcttaaagaataaacaatctcctgtgcctcccacttataaaaacaatcagttgaaattctatttgtcgcctaacgatttggtgtatgtgcctactgaagaggaacagaaaaattctgaattagtggatatcactaatttatctattgagcaaaaagagagagtttataaagtggtttcttttactggaatacaatgtttttgtctattgaatagtgtagcacaatctatagtagataaaaaagagtattcagcccttaataaaatggagagagccatagatggaacaatgataaaacaggtatgctggaagttaaaggtaaataggctaggaaaaatagaaaagatatgtaaatagagtagaaagggagttgtgaccatgataaagaagacgttatacttttcgaatccaacctatttgagttgtaaagatgagcagttagtaataaaactgcccgatataacagaggcaaatatgcatcctaaattacaacagaagggagaattaactcgccccattgaggatataggaattgtggtactcgatcatccacaaataactattacccatggggcgatggaaaaattaatgcaaaatagctcggttgtggttttttgtgataaacgaaaattacctttagggttatgtttacccctttatgcccatacaacacacaacttgcgtttaagatatcaggttgaggcttctaaacccttagtaaaacagctatggcaacaaacggtgcagtataaaataaaaaatcaagcttttgttttacaacatttcactaccgaaaaagcagagaatatgtacatctggtcaaatgaggtaagaagtggagatagcacttatttagaagctcgtgctgctgctttttattggagatacttatttgctgatttaccttattttgtaagagaacgagagggacctcctcctaatcagttgttaaattatggttatgccattttacgtgctgtaatggctcgctcattggttatgagtggtttaaatgtaacgataggcattaatcatcacaacaaatacaatccttattgtttagctgatgatataatggagccttatcgtccgtatgtagatcaattggtattgcaaataattgagcagaaaggattggtggaagacttaacaaaagagtataaagtggaattactacgtattcctattttagatgtagttatagggggtagaaaaagcccactaatggtggcaacaagacaaacagcagcttcgttagctaagtgttttgctggaaagagtagaaaaattgaatatccttatatggggtaaacaacaggtgtttcgtttaaatcaatatagagtcatgtgggtattagtgttttttgatttacctaccgaaacaagtaaagatagaaaagcttctgctagatttcgacaagatttactgcgtgatggatttactatgtttcaatattccatttatcttaggcattgtgctagtagagaaaactctgaggtacatataaaacgagtgaaatcttttctacctaaaaaaggatatgtgggaattttggccattactgataaacagtttgctaatatggagctctttattggaacgaaagaaactccaccacaaactgaagggcaacaattagagttgttctaaatagaaaacaaataaagaatgaataagatagccctacaaattataaaccaatggatagctaagcatccaaaacattctaaacacaaagctgatttaattgatgttttttctaaagcgtttagttgtacttatttccctagtaaagcttactttggattgacaaaaaaatggagtagtttatctttagttacaggtaatatttatttttttgctattgatagtagaaatgcatgttggttactggtgggtgataatacttttaattattcttttgctgaataccatattttgcgaagtagtttatctttcaattctcctctctattggttaaaactattagatttgaatagaatgggagaattagtagaaaataatgaattgtggaatagttatacacgagcgacttacttaatatttcaaaataaaacagttaccagttaccaaaaaaggatttgtgggttaaaaattaatcttagtgacttgttaggagacaatcaagaaaactattttttgcaaataaatgaaattagggccttagagtgtaaatctattaaaaagaataaattagataaagagataaaaaaagtacctaagtatccagataaaaaagaggttgttgttactcaatatactagaagtcctttaattgttgaggcttgtttacgtagagcaaaaggttattgtgagagttgtaataaacctgctccttttaagaaaaagtttacattagacccctatttggaagtacaccatatcataccattgtctaaaggtggggaggattcattagaaaacacactggcactgtgtcctaattgtcatagagagctgcactatggtgttattacaaaatagaacgatgaggctgcttcaaaataaaataaactaacgttgatagatttactactagtattatataaaaaattcataaattttataaccttcaaaaggataagttaaatggattagaaaaggtgtattatatagaaatggaaaaactagagtttcactagtggattttagttttattgcatcttatttttttaacgaagaatccccatattatgttgattgtcagcataatatggggattcagttgtttgtcgtatcaaagatactaagttttgaaagcaattcacaacaaaatatgcacagcactattttcggtggaagttgtttgtcgtatcaaagatactaagttttgaaagcaattcacaacactagtgaataataattattactagtataagttgtttgtcgtatcaaagatactaagttttgaaagcaattcacaacgtaataatatccataccctcattccgaagggttgtttgtcgtatcaaagatactaagttttgaaagcaattcacaactgatggtggcacccaacgattgatgattaagttgtttgtcgtatcaaagatactaagttttgaaagcaattcacaactaacttcatcaaatacctgattagaaagttgttgtttgtcgtatcaaagatactaagttttgaaagcaattcacaacctgtaaggtttggctgccttggccagatacgttgtttgtcgtatcaaagatactaagttttgaaagcaattcacaactcttttacatattttcattactttacttttgttgtttgtcgtatcaaagatactaagttttgaaagcaattcacaacgctgccccaagctacagagttatagattttgttgtttgtcgtatcaaagatactaagttttgaaagcaattcacaacatctataggtggaattgtagcaggaatttgttgtttgtcgtatcaaagatactaagttttgaaagcaattcacaacaatagttatctcttattcttattcttgcttgttgtttgtcgtatcaaagatactaagttttgaaagcaattcacaaccaacaaaaccaaaataaattattagtaaaagttgtttgtcgtatcaaagatactaagttttgaaagcaattcacaactggtacacctgtgtgcaaggagagagttacgttgtttgtcgtatcaaagatactaagttttgaaagcaattcacaaccaagactgccgaataaaatatacatacagagttgtttgtcgtatcaaagatactaagttttgaaagcaattcacaactatcttggggcagcaaaaatagctcggtatgttgtttgtcgtatcaaagatactaagttttgaaagcaattcacaacagtactctttttctttttcttttctcctatgttgtttgtcgtatcaaagatactaagttttgaaagcatgtctatttagttagttatttaacaagaaaactgtcgatctatatcagtataagacaagcataaggtgagcgtttgcatatgactagggcaaatagatgagatgactagggcaagtgtatcatttgccctagtcatctttgtttttagttactgtgcctaactaaaaggcataacctacacctaagttgaatctaaatccactccagtctattcgatgaagaggatttaatttggctccaagcgaaaaatcgtatcctgctgtcattgtaaaaagaaagtgtttatataaagccaactgagtacctgctagaggttgaatggagtaggctgtttttttaattttatcctcagaaaaattctctttcgattgctcattatttacatcataaattttaatttctccttctgtttttagtgatgaaaacaatagagcaggagagagttccgctaaaaaagagactttataatttttattgtttattggcaatgtatgaaaatgaaccctatacattaatcctactctatatccattagttacaattttctctatataagagccagaataatcggaataggccattttagaccctgttgtaaggtaagaggctttaacgccaaattcgtgcatcttgatgcgatacagagcatccatggtgtgggttacataggcagggaagttatcgacaaggcgtaatccttgaggtaattgttccgattctttgcctaagtcaaatgcaagttgagttagggctttaagatcactcattttataatctccatagcctactgaatagtttatgctgaattgcgcctttgttcctaaactaataaatagtaaaagaatcagtactattgattttctcatggttttaatgttgtgctatagtctaaatagtagtcgttatagatgaaaatattattaaagaagtaggcttttgtattacctaaatgttttgcttttatatttaataatgtggtagtatatgttttatctagcagcttaaatgtaatagggttttcatagctgctacaataaagaagatttccagtttcaggatcgatattacagaaagtaccttgaatactttttttaagtgataaatctttcaggtttcttatttcaatggtattaaaagaatcataaaatagaacttcagttcgattagtagggttaaaaacaggatcaccatttaattgatttattgttttagtccatatggctttatgatcttcaatttttaatagtataatctcttgttgatagtttttacaaattaaataatctccattcaaggctaaatgaaaactactagtattggacgtatagtcttctaaaccttctattctccgaggttctagtgtatttaaatcgtaaaatgaggggtgctgattgttttcaaagtgaaccatcaatagatttccaccaaaaaagaagttttttactttctcaaagctttttagtttttcttttgctagcggagcatataccgttaaattgtttcctagtatgcctatataaccattgtcagcgacttttattatatttcccgtatgggttatttcaataggagattgatgtacaacttgcatattgcgatgtgtatcataaataattaagtcattaaaggtaatgatgtataattgctcattatagtaagtgtaatcgatggtaaaatctgttttatttaacatcttatcgcgtaggccgatacgagccgaattatattttgcataattagtataatctgctgttacaggtagcatatataaatcgaagaattcattttgtatggggaataagttatctctattaactgttacttgtagattaccggcaggtaccaatattggtttgttattatataaaacaacatattgaatagggtagggatttttgtttttccaagtaactagaaagtcatttaagttttgaatttcaatagttgtattgtcattggttataggagtatatgaaggttgaaaaaactcgatatagtttgattgttgttttttatcaggaattccttcaatggtatattttttataaccatagacgtagtttttatcaataaagaaagtattagttaagtcggttatatgggcaattgtatcttgataatcgtcatatacaatatattctttcatggtaatacctttaggattatcccaatcgactcttaagtatttgccatcagctaagctttgtcgggtatttaatcggctagatccttcttctgtaattttaattctaaaattatatgttccctcatacatagcataaccttttgaagctagcaaataactcaaaagactatgatcgctaatttccattttcaacttaaggtaatgcacttcatcgtcaacctcaggaacactaattagagcctgggttgaattagtccaagaagatatagcgattccatcaagatagaattgctgattaatcagtttaaaagcatcatcagataagctataataaaaaaactattgttaggtatttctataagttcattaggattgataccagctaaatcaatgcttaggtttttaaggtctcctttatcaacttctatgtagtttatatcgtcgttatcccattcgcaacttataagtaataaggataatggcaaaaaataaattaaagcgaaataaatactgttgcttatcttctttatattaaggttaaaattttccgaagatagtatgtaaatttggttaagtatgaaattacaatgttaaaaaataagattgatgtttgtttttattctctaaatagtttacttagttttatagttagctaataaatctaaaaaatgaattttatagtgaaagactttgaaagtttactttcccactttaagttggaaggggaaattaaagggataactcctttaggtagtggtttaattaacgatacctattgtgtggaaactgtttctccagatactcccaactatgtattacaacgaattaaccacgctgtttttcaagatgtagagttgttgcaaaacaacatttggttagttaccaaccatataaaaaagaaattaaaagaagaaggagttcaagatattacccgtcgtgttcttacgctaattaaaaccaccgatgataaaacatattggtttgatggaaaaagttattggcgtgttactatacttatttcggatgctacaactcttcaagcagtcaatccggaatcctcatactatgcaggaagtgcttttggtcagtttgaatatcagcttgctgatttagaagagcctttaggggataccattccaaattttcataatatggaatttagaatagaagagtttaaggaggctttgaaaaagaacaaagttaatcgtatagacgaggtgcaagatatcattgatgagattgaaaaaagagccgaagaaatgtgtatggctgaacgccttcaccgagagggtaaactgcccaagagaatttgtcatggggatagtaaagtcaataatattctctttgatgaggagggtaatgtgttatgtgtgattgatttggacacgaccatgcctaattttatcttctctgactatggtgattttttacgtacaggagctaatacaacacaagaagatgatcctgatttgaatcaagtttcttttaatatggatatctttaagagctttactaaaggttacttagaatctgccaaagcgtttttgacacctatagaaatagaaaatcttccttttgctgttaaattatttccttacatgcagtgtgttcgttttttaacggattacattaatggagatacttattataaaatagagtatccaacgcataatttagtaagaacaaaaaatcaacttcgtcttttggagtgtgttgaagattcttacggggcaattcaagactatattaatcagcagttataattagctgcaaatagtaatagaaatagaaaaaagggtatgacttagtgagcttaatcagcgcaactaaaatcataccctttttcttattatagactaattcattagtgtccactaaaaaaccggagacacccttgcaattcacagataatcagtgtgttatatgctgtttttgagtgaaccgatttgatttttttttgtgattagaattcgattgttaagcaaggcaacctgccctacactgtcgtgtaggccatattgacttatcttttcagtcaactattttacggtgcaatatttttagtggacagtagtgagactaattatagattaagtagttaaattaatagttctttaaaataaaatcatcgtagatagcaggatgattactctctccgatatgaattaatccaggacgaggtacacggtcccaacgaactaaatattccacattgtggggcgtatcgtgaatacgagtccatttcttaccattattactaacagaaaaacgaagcatacaacctttttctacttcaattttaagatggactttagtctcattgcatgctgtatcataagcaatggtttctttattgtcttttattatacgtagctgtaatctgttatcagtaactccccaaataataagattttcattatctccatatagggttaatcctttggtgttattgggtgtattaaggagaagaacctcgtaggagtaattaggtgcttgaggacgcaaacagagtgcactaccgtattgattattctccttaggagtacccgataagagtagctttcctttttttgtttgtgtttttacctctgcaaatggaaaattccaagtccactccatttttaactctttactatcaaaagaatcgttgaagccaggaaaatccttttgtgaggtattgggaaaaggcataggttgctctattaaggctgttcttcctgtaataaagaaaggccattcatcttgagacatacctatctccaataatatgggttgcctacctccataaaaaccttcacccgtaagataagcgtggcataagtagaaaagtctgccatctggagttgttacacccgttccgtgaccacaagaaacaaaatcaaggtggtttccttgtaaaataggattttgttcgtgtttttcataaggaccttctatattttttgatcgagcaactgatactgcataatcactatgcggaccacagcaaccaaaaggagagtaaataatgtagtaatagtcgccgtgtttaaaatgatattgtccctccatggcaataccttcatcatctttaagtagtgtaaaaggctctccaattaaacgaagtccatcatcagatagttttgaggctataatttctatgggacgatcatccaatccgtaagccttccaactgatgtataactgtccattgtcaccatatacaaaagcatcaatagcttctgtgccatattccactaatagaccatggtcgataaactcttcatacggagagtttgccgtagctactccgatatacgatacattatcgctttttctacgtgcagtataatagcaataaattttatttttgtggtaaaatagctcgggagcccagaaagagtgagaggtccactccggttttttattaaacacatgtcctatttgagtccagtttaccaagtctttcgattcaaacatagggtagtgaggggcccattctgaagaagttgctgtagcataataggtatcgtcaattcgtattaagctaggatcggccatgtcaccacgtataacggggtttttgaatgttgtgttttgactgaatagggataaagaggtgagtaagaggagtagcaatagtacgttctttttcatggtaaagtaggttaagtctttatttttagattttaattctaaagatacttattaattgctttttgttaaaacaaagggttgctattttaatagagcatggtttaaaagaagtagggcgattgaattcaatcgccctaccattcatactatgtcattttttagctatatgctaaatttgagaaatactacattgtataatccactttttcgctacccatagtaaactcaagagtacctcctttttctatatcagcaaaattgatgtagaactctttataaggttcaccatttagtttaatgctttgaatgtataggttttctttgctattatttaccgaagtgatggtaaaggtttttccattacctacattcagtgtagctttgtcaatgcttggcgtaccaaaaacatattttccaccagcaggttcaacttgatacattcctaaaactgaaagaatataccaggcagacatttgaccacagtcttcgttaccaattaagccatcaggtctgtcagaatagaactcatcgagaacaaaacgaactttttcagctgttttccaaggctcattaacaaaagggtacatataaagaatgtgatgactaggctcattaccatgaacatattgtccaacta

SEQ ID NO: 4453 - DNA, 24515 bp, synthetic construct
  misc_feature 1..24515: note = Synthetic
  source 1..24515: mol_type = other DNA
acaaggaaaaggtattttaatgtcggcgttttatccaggtgtactgctagaagagaagggggaaaatgagtctgttataatacaagatgtagaactactgcgagcttttgctaaaatagagattcaatttcataataaagtaggagaggaaaattttaaagagattaccaaagtcagttttcataatgtgcccaaacattatacggttccagcagcaaaccaagattatctatcgatatatcccgataaatttacctctttcgaaaaagctataacatttactgaggaggaatataaaaaagaaactataggaagtgttgtcttttatgtccctgagtttttgcgttacaaagacaataaagtggaaaaatacatggatataaccattgaaggtataggctttttaccccaccagattaggttagcccatcagcattttgaagattacaagcaaccccgcacactctctactgagctgttatctactactactgttcttcgcaatacacattataaagtagatgtgaatttaaccgcttccagagatttggagagtgtcttaaaagtgttgccatggcagtttttaaaatcagaaatatcctatacagacccttcatggacgttgtttaaaatagaggtcggaggaaaagatgttatagatcaaaaagagatttctcttaagtcgggagaggaggcaaaagtaacctttgagttagatgagccatcgggggctatatggaaagcctctttgaccaatgggcgtttttttgaatttacagacccaactacaactactggtttggctggtacagaatatacttttagcataaaagcgtctcaagattggaatggctctttcaactatacggagttctatatatcggttaacggagaagagttaaagttgcgagaagatggggtaggaattggtaaccgatatgtgtttaaacaagtagagtaagagagatgaataaaataaaattatacttggtagtactattagctattgcttttagttcctgcataggagaggaacttgttgaggagaaaggttctagtaataaggagctgattttgacattggcctattccaatcagatagctaatggggtaacagcaagtagtcgcgcaacagaggtgaaagatggagaagacctcttgaatgaaaatagaatagagaaagtagacatcttcttttatacggaagcaggagaactaacttggcatgtagagcccactgctatgagaatagaagatggagaggatcatactaaaaaactaacattaagagctaccaaagagatagctagtgagctgaataacaaaaaatataaactggtagttttggttaatggacctgatcgcggagagataacggataaaccctacaacgagttgcagcagaaggtatatactaagaacttagatgcaacagagcgtcagcgtcctttagatctttttttaatggacggggagaaagagactgggactataaagcttgatgaggaaccttataatcttggaaacgtagaactctctagagcggctgcaaaaattagagtactaataaataagatagaggtcgatggttataaagctggaactcctactttaaagctggttacttatgctggaaaaacagctcttttaggtggtaaacctctaaaagcacctacatacaaaactacaacagaacaaaatttaataaaggggaataaaatcccctatactacaaactaccctctttactcctttgagaacgattggaaagaggatgattcaaagatgacttatctgttgctaaaaattcctttctcagatacaacagagaaaaaagaggcagattactattatcgtgtcccaatctattatagtattgatagcaacaactccttttctataaaaagaaatcatctttatgaggtaaatatagatatagagcgcttaggtgcttctacagaagaacttcctgtggaattatcgggaaaaattgatgtagaaccttggaaagagatagatgctgttcatgcacaacttcataaggcaaattatttggttgtgaaagagactgagttggatatgatgaatgtggctgaaaagaaaatagaatacatctctaactctacattaaaagtgaaagactctaccttaaaagctcactattttgagtatgatacgaatggaaattcgcaaaaggtcgaattaaaaggtgaatctctacccaaaatttcgtttactgaaagtgatggaaaaacttttattcaaattaacaaagaggttcctaataattatgcacctctatacatcgaatttactgtacaaaatgagggtgggctagaagagaaggtaaatatcgtgcaatatcctccgcgctacattacaggtattaatccgtcggataaaagatattataaaggaacagaaggtaatccaaagagtaataccactttattcacagttaccactgttgtgcctgttgagggcgatatcattggtgatcctacagatgttgttagcggtaaaacaggaacggatgagctttcgaataagatcatatctcctcaatttattatagcttcacagttaggggttacttaccaaaggtatttagataaagatgagtacaacaacaagggcagattgttaggtgaaagtggggagactcgttgttcaaagtattgggagagaaattatggagataatagtgaagttgtacttgatggtgtacaatatcttgggaaatggcgccttcctaccaaagccgaaatagaatatattcaaagaatacagagagatccaaattcttctgttaagagtttattagaaggagaaaaatattggagtgcttatcaccatgcctattttaattttaaaaccggtaaatggccgaatgcatacgaatactctaaagctcatatccgctgtgtttttgatatctataaatctgaacctacgaaacaatgaaaaaatacatactaattctaagttgtttgattctagctgcctgcgcagaagatgtaaaatttaactctgacttaaatactaccggtgagggagagaagattgaatgtgaattatctgttttccttcccgaatatatagctgctaacactcgctcaataaaagaggttacttccttacacttattggtttttgatgaaaatggattattcctatcaagaaatgaagccattttggaggagggagaaggagatactcgaaagtttaaggttaccttactctctagtaaatctaaaagaatcattcactttgtagcgaactatgattggacaggctttcctactagtcatgagttgcgtggtgtcgatgaaggaggaatagtgcctaaaatggaacaaagtcaaacttcgtattggaagagagttgaatatgaaggtggtttgaatgcagatacttttaataaccaaactatatctttgttacgtaaccgtgcaaagattacagtagatagtagagcatctagttttaagttgattagctttacattatataatggagtaagtaaaggaaccttagctccatttaaatacaatggagaaacaccagaacatacatttacagagggagttctaacagaggcactaactggtgatggtgaaaatgtaaatagtggagataacaacaaatccattgatgtttttgaaaaaagcaatagtgatgccagcgcttctaaaaaggcctttttagtagtcaaaggaagttatctcggtaaggaggggttttataaaatcgacttagttaataaagagactggagagttatacaatctgattcgtaataaacactatactgtaactatagaagaggtaaattttgagggttatcctacagcgaatgacgctgctcatcatccagcctctaataatatatttgcctctattgagttgcgagacttcccctctatctctgatgggaatagtatcttaaaggttagctcagtaggagactatttcgtgcgtgataatgaaacgaaagttgtagctattaactactatccagataagaattcgacagctaccgaaaatggaaaaataagtgtaaaaaaaattgatccagagaatagagtaacttatgagtgggatcctagtttaggagaattaactatttttgatcctagaatagctccaggtgaggtgaagaaagtatcttttgttgttactgtagaggggagtggtttgttgcggtatataggcttttacctacgctctccttataagtatgaagcaaaactaatttttaatgggttgaatcaagactctggtgtggaaattagttttaaagtacccaacacttttttatccaatttattcccggtcgatttaaagatatataccaatgagctttatcccgatatagctgagaatgaaatagcagtaggttttgaagatagtaggtatttctatagatatcaaataagagaagaaaatattggagaagatgaacgagtaactctttacttcaaaagagtagccaataataagacagaagaaataactttgagttccatttactacgaagatgtaaaggtatccttataaagaagaaacggtttcttttccatgatataattaaaaaaagctcttttaattactaattctttgactttatctatttagaaccgagtaatgttgattactgttattgagttttgattgtgaagtagttaaaggtgttttcctatgtcttgttgattataaaatatttttttgggcttaaagataaagaataaaaaagagttctagagctagttttaacgactctaatagcttaaaaatcaatttgaaattagttatttattatgtaaaagagctaacaatctatagaaagaataaattactgttctggtagtcatctcaaaattaaacaaggatttcaatagtaaaaatattcatactcttaaactagaatgtgtttgccccataaaagaagaggatgtgcttttgtgcacatcctcttctttatataaaggtatttgtttttgcggtgcattttaaagccaaatagaacccgcttcagggtctatgtccccataaaaaagagtcttcaaatcttcaagagcttcttctggagtaatagaataggctttagctattgattcgagtaactttttgtcggactcggataaatcttctatcgcttcagtttctaggtactccatttgatccgcataaacgactacgggaattttgatttttaaatcccaatgatctctttgtctttgggctagactaggagcatagaaaggagaagcttgtcctttaacatcccatttagattttgccgcatgcattaactctatatttaatacaaactgttttcgaggttttaaaaacttaaagtatcctttcaatccgataggatttttatcccccaattaatttagctccttcgttgtgcctgtttttatcccaagggtcggtatcgcaatagaagtattcaaacaaggttgcagggttggtatcgtcgttttcacttactccatcaaaagtgtttttaatatctcttggaataaagaaatgctgatgaatttgatcttgaccattttcaacaaactctcctgtgatctcttctcccttagcattataatactttatccatagggcatacacattttgtcctttggcatcatgaggggtacttctgacattgaattgcttagcactttctgcactggggtgccatcctttctcggtctgttcaatcgttactttctgaactttattcagatgtacaacgccttctatctcggggttttgatgaaacttataagttccatgcaaatgcccttccactaaaattagttccgcttttactgggtcttcatgatctttgtttaaaatttcattactaggaatatctggatctttgctgcatgaaaacattcccatacttgctaccatcaaaaaggcagtcatcactttcataaatttctgtttcattttatgatctttttaaaattaaaaactccatatacacaccatacggatatcgcgtccagtatcatgtgcatagtatctaaatcgatctctatattctttgtattctttgtttaagagattgtttatctcaactagaaaggtcattttatgcttttgtttgaagtctatattaccttctatttgcaaccccaataaatgataagaagggggagtaaatgggatcaggtcggtagctggatcaaaacgtttttgcttggctacatacttatgtttcaatgtaaaacctactttatggaaaagagggatacccgataattcataccccaaagtttgtagccagtgaaaggatgggatatagggtaaatatcgtcctgtattcttctcattggcccaaatcatactcgctttatgggtataggttaaggatgaaaaaggagtaaatgataattctgcatctattcccctaaagaagccatctacttgcttgtacctaaaaacaggataagtacccgaaacgatagtcatataatcttgagagggctcatcgtaaatataattatgaacccactgcaaataaccatctatagagagagtaagaggcttggtttcatagatgaaagagctaatccatttcgtacttcgctcgggctggagttggctattccccacaacataaattcctgaggcatgatctagtccattgctatacaattcgtgcacatggggagacctccaagctagccccagattggatacaaattgaagagaacgacttatctgataagcacctcctagatgataggtggcattagcaaacgttcgtttacctccgtatcgttctccatatgaattaaagccatcagctttactactttgtctgtcaaaccgaataccggcatcggcactccacttctccctcaaaaacctttgaatcaaaaatgcaccccagttctgttgtgtgtaattgggtatgataggaacaacgcctgtacctgctttattggcattatcagcagtacttggcgtaaacactcaaggctatgcagtcttagcatactattctaatgatggacaactcatatatgacttaggacctcgtggtatcaactcgggtgctattaagccagaaagctggacagaaaccaaacttgtagggccaattaccagtgatgatgatcctaagttctttgacttcaatctgtataccaatacagactcatataagggtcacacctactatagatactttgcaggaagtaatcctactattacgctcgaggaaaaagagaaagagaattacatctatacgatgaaagggaacttcaattctaagataagcgatggttggtatatgatggaaggcactccaggtatgagcatagctgataatacaactgcatttgtacggccatttggagaagatggtatatacgaatggggaacaggtgttcgagatataccacctatttactttagaatggtaatgcagtataagggaggccaaatttacaaaaccaaatatgtgtgttggaatggtccatctgatacatcagggggtatgtttcctccaaatagtggaattatagtttaaaacgaaagatatgaatttaaaagaaattaaaattataggaattgacggaaaatgtcaaacgatcaaatttgactacaaaggtttagctaactacatattcagtaaaacgcaggatataggagagctagagcttgctagaaagctctacaaaacaggtaaagtggagctagataaggagcaagctcaggctctgaagaactacatcgaccaagcctttggggcaatagtcaaagaggcattattcccaaaactagataaaattattaatcagtaaaataaatagttatgacaaagttattaaaagaacaagagagaaacactttagtaaaagcagctgcagaagtagatggctttaattacagctgcgagtatgaaatccaagaggataaattacgtaaagttaattgcaatgttactgatgggaatcactacgtcggagcaatgcgcttcgagggtaattcatctttcatctttcaacttccaagaagaagtggacactattaagcacattatggtgttcagggatattttaaaggaaatcaaaggagagttggagccaaaagagggagtgaaaaaatagaagaaacattatgagatgaaatgtgatgatgaatgaagaagcaagaatagtggaaagtattggctccgtatcagttatggctgtcgctagtaattatctagtggtagctcttcacgatatgattatatggcttatatgtatgttcgcagtgattttgcgacctattcgctggggtgatacactcgctatctatgggtgtaaaagtgagagcatctaaagccgtcagaaggacgtttggaaagagtgttgtgtactttggagtggtagcaatggcagtcctactcaatatcgctacaaaaggcgagtataagctagataaatgggcagtactagcagttgctttcgtggagagtttgagcatcggagggcatattctaggtatgagggggtacaacttcaagcctcttaacctagtaaaagtgctagccaaacggaaatacaacatagcatcagatgagttaaataacatagttgaaaaggaggagagagaatgacatcaaaagaatttgtagaagcatataagcctttcgcaaaagaaacggaagcaaaaacagggattaatgcaaattttatccttgctcaaagtgcattagaaacaggttggggcaaatcagcaccaggtaatatgatgtttggggttaaggcaagtaaaaacacaccagaggacaagaagcagttaataaccactagggaggtgctatctcgaccaaattacaagtttccagaggtcataagcgtaactaagcgagcagatggaaagtacacttacaaggttaaggattggtttcgtaagtacgatacaccataagagagttttacggaccatgctaatttttatttaagcaatccaagatacagtaaggcactagaggtaaaagaagaccctcgtaggtttgcagatgaaatagcaaaggcaggttacgcaatcgatccaaactatgccaagacgctaaagtctataataggaacaatcgaaagagtatgaagaagtacatagccttatcgtttgtgttaggattacttctaggctttatccttaagaaggataagtacaaggtggtagtaaaagaggttaaaggcgacactattaaggaggtggtacatttgccatctccttccattcaaggagctaatttaaacttatccaagctgccttactatgtattcaaggaaatagtgcgagtagatacaattactcaaatagctaaaatagataccctagctattctaagggattatacagcgattaagactattcctacacactattcaataatgaatacggaaagctcacactcgatcaaagtacgcagtacaatagcctagtttctacttcgtatcattatgagccaataaagcgagttgaattgcttcaaaagaagtggcaaattctaattggtgcaggatattctactaataactatgtaggaccatcagctggagtaatctataaagattttgggttattcggtggatataagtatagttttagtgagaaaaagaatgtggctgattttagcttgatgtttaagctgtaagccaaagttgattagctgcttctttttttggtaatttttttaaacataaagcagtgagttatcgcagtttatttacgtgcagtagtcaatgtatacttattttatgaaggaatagcgacttaaataggtcagtggagcttactaaaacctgcccgtttatctgcccgcctatttttcaagcgattgatattcagtacgttatgtgtgcaaagcaatccttattgtgaattgcttcaaaacatttacaatatagtaatttattttgataatcaaaaggtttaataagtaatttttattaaattgagattcataatacttaaaatgaactactatgaaaaaggttttgggactagatataggcacaaatagtgtgggttgggctgtagtaaatcaaaatgacaagggtgaattccttagtattgaaaaaataggaagtcgcatcattcccatgtcacaagatgttatggataaatttggcgcaggtcaaacagaatcaagcacagctcagcgaactcaatatcgaggagtgcgtagattgcgtgaacgctctttattgaggagagaacgtttgcatagagtgcttcatatcttgcactttttaccacagcattacgatgcagcaataggttggaataaaaaagaaaataaaacatatggtaaatttcttcctggtgtggaagtgaatatcccttgggtagccacagatcaaggtcatcaattcatttttatggattcatatgccgagatgctaaaggatttaaagcagcatcaacctcatctttttgagaagagctcaacacccgttcccttggattggactatttattatcttcgaaagaaagcacttactcaagccatttcaaaagaagaactagcgtggatattattaaacttcaatcaaaaaagaggctattatcagttgagaggtgaagaggtggaagataacacgaagagagaggagttctatgctcttaaagttgtaaaagtagagttggataaagataacacttctgctaagacttggtataaagtgcatcttgaaaatggctttatatacccatgtcctagtgatacacctatagacagttgggtagggatggtaaaagattttattgtaactactactttagagaaagatggctcagaaaaaagaacggctgatggtgagattaaacgaagttttcgggctcctaaagaagatgattggacacttttaaaaaagaagactgaaagtgaactagagaaaagtggaaagcaggtaggagcttttatttatgataccttattgtccaaccccgatcagaaaattattggagggttaataaagaccattgaacgtaaatactataaaaaagagctagaacaaatattagagactcaacagaaatttatagcggaactatctgataaaaaactattccaagcttgtgctgaagagctctatcctttaaatgatagccacagagagaatcttctcgaaagagattttaaacatctatttgtacaagatattatcttttatcaccgaccacttaaaacgaagaaatctttaatatccaattgtacgtatgaatacagaaccttctataagaatggtgaaaaacagatttctcctatcaaatgtattgccaaatccaatcctttatttcaagagtttagggtatggcagtttgtgcaaaacttaagaattcttcaacgtcaacgctcagagggtgatagtatcaaatataacgtagatgtaactgctgagtttttgaaagatgagaacgatatagccaatttatttacttggcttaacgaacgaaaagtaattaagcaagaccagttattaaagtcttattttaagctgaaagtaaataaagaaacaaaggagcttgattatcgttggaattatgtagatgataaaaacaaagagtatccttgtaatgcaacacgcacccatatcttgtctttcctagagaaatgcaaagaagaaaaaaggattgaagatgatcgttttgtctactcgctctggcatttattgtactcggtggtagagcccatagagcttagaggggctttggctaaatttgctgaacgagagcatcttcatccctcgtttgttgatgtgttcgctcagtttcctcctttagaaaaagaatacggttcctactccgaaaaagcaattaaacgccttcttccattgatgagaatgggcgattattggcacgaggataagattgatgtgaagacgaagcagcgtattcaaaggataattgatggtgaagcagatgatgatattactcatcgctcacgagagaaagttgagaacttgcgaagtatcacagactttaagggacttcctttgtggaaagctggatatgtggtttataatcgtcactctgaaagtggtgaacttacaaaatggaaaacaccccatgaactctctaattatattcaaaatgagtttaaacaatattcattgcgtaatcctattgtagaacaaattgttctcgaaactttgcgtgtagtacacgatttatgggttaagcacggagattttagtgaaatccatctagagttgggtagagatattaaaaactcatcggataagcgtaaacgaatggcagaacgtcagcaggagaatgaaaattctcgtcagagagtattagaaatgttgatcgacttaaagaaagaggctgcatttgccgatttaaatccatattctccttcacagcaagagaaattgagaatagtagaagatggtgtccttcgttctaatatagagattcccaaggatattgaaaaaattacgaagtctgccaaacctacttcacgagaactaacgaaatatagattatggttggaccaaaaatatcgttccccttatacaggacagcctatttctctagcccagctatttacatctaaatacgagatagagcacgttattcctcaagcaaaatattttgatgattcctttacaaacaaagtaatctgtgagtcggaagtcaataaagaaaaagggtctatgctggctcacgaatttatattaaagaatggtggctcaacagtcaatgtaggaggaagacaagtccaagttttaaaaaatgatgcttatgtagaactgattaatcgtctttatggaaagaataaccctgtaaaagcaaaaaaacttttagctgaagatatcgatgaagttgtgggcgactttagcgaacgccagttaaatgatactcgatatatcagtagggtagttcaaaaactactatcaaatattgtaagggaagaggatgaacaagaaagcacatcaaaacatgtgattggttgttctggacaagttaccacagccttgaaaaaggattggggattgaatgatatttggaataaaattattcaacctcgctttgaaaggttaaatgagatgacggctacagaagattatggagtgtggcaaagtcctaaccattttcaaatacgtgtgcccgaagaaattcaaaagggttttacgaagaagcgtattgaccatcgtcatcatgctatggacgctttagtaatagcttgtgctacacgaagtcatattaactatatcagtaaccgatctggccaagatagaaatgctaagtttgagactactcgcactgatttacgcagtaagctttgttataaagagaatagcagtggaaacaactacaactatattttcaataaaccttgggatactttcacccaagatgctcacagagctttggaaaatatcgtagttagtcacaaacagaatttacgagttcttacaaagaccaataactacacccagtttattaataaggacggaaaaaaagatctccagaagcaagtcaaaggtgatcattttgctgtgcgtaaaccgatgcatcaagagactatttacggaagagtaagtattcgttcaatcaaagaggtagcgttgaaaaaagctctcgaaaactggaaacagattgtggatagaacgcttaaagataaaattagagagttaattggggcgtatggcaagtatgatgctcagactattctaaagtattttaaggatagagattataaattcaataatctaaaaataaatagagttgaagtttatgaatatgatcataattgtgctgccgtaagaaagtccataggagatgatctaactataaaacagattgaaagaataacggatgaaagcattagaaaaattctaatgaatcatttatcaaactatgatgataatcttaaagaagcattttctccagaaggtttgatggaaatgaataagaatatcaaagaattaaatggaggtaaaaatcatcagcctatttataaggttcgattatttgaggacttaggctctaagtttccattaggagtaagtcataacaatcctgataaatatgctattgcagcaaaaggaactaatctgttttttggaatatacgaagaccaagaaggaaaacgtatgtttgatagcatccctttaaatattgttattgatagattgaaagagaaaaaatctccagtaccagagacgtataatgaatcgaaattgaaatttcatttgtctcccaatgatttggtctatgtcccaacagatgaggagcagaagcaacctgagttggtagatgtagatcatctgtcggacgaacaaaaaggaagagtttataaggctgtttcgtttacgggtaacagagctttctttgttaatcatagagtatctaaagtaattcatgattatgtagagtttggtacaaaaaataaaatagaaaatgatgatgataaacgtagtttaaagcatatttgttggaaactaaaagtgaaccgattaggagaaataaccgatgtaaaaagataatattatgattaagaaaacgctctattttggcaaccccacatacttgagttgtaccaatgaacaattggttatagagttgcccgagatttcaaaagctggtgttcatccttcgttgcaaagtaagggagtaataacacgccctattgaggatttaggtttgattttgttggatcatccacaaattacaattactcatagggctattcaaaaactattggagaatacttgtgctattgtaacttgtgatgatagacgtatgccctttgggctttgtcttcctttatatggcaatactacacaaaatgagcgttttcggcatcaactcaaagcttcaaaaccactaagaaagcaattgtggcagcaaactattcagtataaaatacggaatcaagcctttattcttcaaaaattcaccaatgaagaagctgaaaatatgtatgtgtgggcttcagaggtacgtagcggtgataataccaacttggaagccagagcagcagcttattattggaaaaacatttttccgcaagtgccaggatttatacgagatagggacggtgtagcacccaataatttactaaattatggttatgctattcttagagcagtagtagcaagatctattgtgatgagtggcttaatcccaactttgggtatcaatcatcataataagtacaatgcctattgtttagcagatgacttaatggaaccttaccgaccttatgtagataaacaggtactgagaatgataagaaaatatggaattcaagaagaattgagtaaagagttaaaatcggaattgcttcttatccccacactcgatgtaaagataggaaacagaagaagtcccttaatgattgctgccaaccagagtgcagcttctttgtataaatgtattgtaggagaaagtaggaggatagactatccactcatgaattagtatgaaacgcttaagtgaatatcgtgctatgtggatacttgtattttttgatatgcctaccgaaacaaaaaaagagaggaaagcttataccttattccgtaaaagattaatggctgatgggtttactatgtttcagttctctatttacttaaggcattgtgccagtagagaaaatgcaatagtacacataaaaagagtaaaatcttttctccctaagcaaggttatatcggaattctctgcattaccgataagcaatttggaaatatggagttgtttatcggtcaaaaagaaactcctacacaatcagaagggcagcaattagaactattttgataaaatagaaaaggagaatcaatgctttaagtcattgattctcctttttttatgtggttttatttaaacataaaacctctataacaaacagaccctcaattgattactgagggtctgttgttgctggtatctaagatactaagttttgaaagcaattcacaacaggctcgactcctgtcgatttttccatgtagttgttgctggtatctaagatactaagttttgaaagcaattcacaactatggagatattggaagccttaataatgaagttgttgctggtatctaagatactaagttttgaaagcaattcacaactatggagatattggaagccttaataatgaagttgttgctggtatctaagatactaagttttgaaagcaattcacaactgttcgacaaagtttaatatctttttatctgttgttgctggtatctaagatactaagttttgaaagcaattcacaacctatacgaatgtatgataatctaccttttggttgttgctggtatctaagatactaagttttgaaagcaattcacaacttagcttcgagtgtattaatcactctaatgttgttgctggtatctaagatactaagttttgaaagcaattcacaacgcaaaaaactggatattggtctaaccagtagttgttgctggtatctaagatactaagttttgaaagcaattcacaactaatcttctttaccatatttgtaaaatgaagttgttgctggtatctaagatactaagttttgaaagcaattcacaacaagggattaagtactgctataatacttgtggttgttgctggtatctaagatactaagttttgaaagcaattcacaactgagtaggatgtatgcgtttttctttgtttgttgttgctggtatctaagatactaagttttgaaagcaattcacaacttctgcattattgtttccacccctataattgttgttgctggtatctaagatactaagttttgaaagcaattcacaactgctaaatcgccaacatacttaccattaagttgttgctggtatctaagatactaagttttgaaagcaattcacaacgctgtgaaagcatttacaaagttatccattgttgttgctggtatctaagatactaagttttgaaagcaattcacaacatcgaccacaaacacttggttactatcttgttgttgctggtatctaagatactaagttttgaaagcaattcacaactacaaagcaatgggagaagacttcttgcgagttgttgctggtatctaagatactaagttttgaaagcaattcacaacgagagggggtgtcgtccacatacaaacctcgttgttgctggtatctaagatactaagttttgaaagcaattcacaacacccttgctggaattcctttaggttgtgatgttgttgctggtatctaagatactaagttttgaaagcaattcacaacaggtttaggattattagtaggcatagttacgttgttgctggtatctaagatactaagttttgaaagcaattcacaacctatacaccaaatgagagttgcgagtccttgttgttgctggtatctaagatactaagttttgaaagcaattcacaacgagagggggtgtcgtccacatacaaacctcgttgttgctggtatctaagatactaagttttgaaagcaattcacaacccgtattggctttatatatttctttggatagttgttgctggtatctaagatactaagttttgaaagcaattcacaacaataagcagaattatgaaagatataaagaagttgttgctggtatctaagatactaagttttgaaagcaattcacaactaatgatcgaatcttcagaattgatattttgttgttgctggtatctaagatactaagttttgaaagcaattcacaacaataggttgaattttataaaagagaacaccaaagagaaaacaggaagatccctgcagagtaaagctactccaattcgtgaaggagtaattgtaatttcagaagaaacaaccctgaaggacttgcataaatttgcgcaaaaagcagaagagaaattcggaataaaagcaatacaaatttacacacacaaagatgagggacacttcaaagaccaagagaaaaaagaatggaaaccaaaccttcatgctcacatagtttttgattggactaatcacaaaacaggtaaaagcataaaacttaatcgccaggacctggctcaaatgcaaacacttttagccaacacccttgagatggatagaggtatttcatccgataaggttcatgtagaggctcaacaattcaaaaatgaagccgaattaaggcgattagccgaacttttgctagagaaagaggaaaacgtacgcaaagctcaagaagagcttaaaaacgtaaaactaagggctaatgcaggcaagactattgctcgagcagtaagcaaagtttatgagctgcttggagctactaagggagaaaaaagaattatcgagcttgaaaaagataacttaaagctaaataaagagcttcaggggacaacaaaaatcataggcaatctcagcaaagaattgaaagaaaccaaacaagaaacatataaacttatagaagaaaattacacttacctaaacagagtaaaaagcctaaaaggtaagctagacagctctttaggagaaaccaaagcacaagctattgtagtttacaaagacctaatgaaaatgtttaaagaaggcttagatatcaatccattcaataacacagatatagccaaaatattcaatacaggtaaaaaactgaatcaggaacaggagcaaaaagaagagcagtcacaaagcaaaaaaagaggtagaagtatctaacccccctccaccccctcagggggaacaggtttaacgcatttacctttgccgagagttttaagtgaaaatcattaggaattatactgccccaaattctctacttttaggcattacaaaaaatgtcgaatttaggcaaatgtattcacgaatgtattcatcgcaattttctgataataaataatttagcccaaaagtaaatacataagtgaatacatccatttttgtaactaactatcatacacttgtgtattttataatacacgttgtggagtatacttcttgctcaatgtttattaaaaaacacttttctaaaaatcggcttttttgaagtttaaatcactcgtttttcgacaagatattcttgatgtatagattaattttaataacgggagatagattaattaatctatctcccgttattaaaattaaaatcagacttgtatttacttgtttttattttgtttccttaattccattataataaaacaaacaaatagtagaaattcaacatgaaaaaataattccacccaattgcttggcattagttggaacatattatttacatacaaaacagtaaaaacaattccacatataatcatttgtattaacatatcatctacacattaaagctgatacaaccccccaacatacagcaaatccaatactagcaccaagtgtcataggagcaaatgcagctccaactcctccagctactcccattcctataccacaccattctgatccagaagctcttgtttgagagttgtacaatttaactaaatgtatttgctctttctttaaatctagcctaacatccgctacaggttcattagaactatctattaaagtacccgttggcggaattaattcactaaaaaatgtcaggaaataagttgtgcatatcattgattattagtattttaatggtgatcaaactattaatatacagctcaattatgcacaacttatatgcaatattcgctaaatttcttgatatatgcaagaatgcaagatgttttctgctgatttagtaaacgaaaaagggaatatacctcgcagaggagtcgtcccgaagttctctgacttagaagtgatcagtttaagccttgctgccgaatcaataggtatagatagtgaaagctttttgttttctaaattaaatgaatacaaagatgatttttcttctctcatatcccgtcgtcaatataatgatcgcaggaagctcactatcggcttatgtaatcaggtgcgtgaaagaattgcatcaaaagttgatggtggagaagctattttctgtattgattctatgccaattgaagtctgtcgtcccataaggtcaaaacgttgtaaaatgggaaagaataattatgataaagctcccaattatggctattgtgcttcacagggtaaacattattacggatataaattacattctctctgtgggttgagcggtgtcatacactcttttgacctgacaaaggcgagtgttcacgacattcattatttgaaagacgtaaagtgtaactttcagaattgcaccatcatcggtgatcgtggatatattggagcagccatacaacttgatttatttgaaaaagctaatatcaagttggaagttccatatcggtcgaatcaaaaagattggaaacctgtatttagtccatttgctaaagcaaggaaaagggttgaaacgctttttgcacaattatgcgatcaatttatgataatcagaaattacgcaaaacaaacagaaggattgtttaccagaattacggggaaaattagtgcacttacaatccttcaatatataaacaagattaataacaaacccattggacaaattaaatatgcactaatttaattccgccaacgggtattaaagtatataaatctccattttttacaaatgtaaaaaatgtaattattacatctttagctgtactacaacctcctagtattttattaggatcgtttttatcaaaaaccatataacaatatatagaattactaggggaactaaattctaccatattttcaaaatcccattgttcgtctttaatagagcgagtaagcttattttttgatataaactcattaaattgaactctaacagactcatcaatagatggacttgtttttattaaaacatcttcgattacagcattgtctttaacttctgtttcattcatattctcattagaacaggaatataatacaatacaaaatggtactactagaaagtaaaaagatactttttttaaatgatttaattaaatttgttttcatattaacgcaatttaaaggatttatatattaaatgtctattcgtaaaacaacatataaatagttgttgctggtatctaagatactaagttttttagaaagggaaaaattactttgacaccgataggttatcacgatgtcggtgtcaaagcattacgatgtcggtgtcatgatgattgcatgacttagtcatagtgtctctttactcctcctaaaaaaacctgtctaaattactctagacaggctttttctgttttataaaagattattgaatctattaaaagttaagttctactaccaagggaaaatgatcggagggtaggcgagcctcattgacctcaaaagatacttctttggggaaatcgccctcgtgtaccgttttgatttctttgttggtacttctataggtatctgtaagtactccatatttctttacttgaaaggtgggtgatacaaacacatgatctattctgctatctgttcttagattaatgttgaaggcattgaatgtgccgttgagtgcatagcaaatttctgctacctcataagaatcttgtaaaatatcagaatcgtgaagtatcttatagctgttgtgagtttggtctacattaaaatcgccagtaagaattactggttcttcgccacacatttctgttatcttgctaagtaccagactagcactgtgcttacgtgcttctacgcctacatgatccatgtgcagattgaagtaccaaaatgattttcctgttttcaaatctctaaactctccccatgtacagatgcgaggtaaagcagcatcccaccctttattggggtaagtagtttcttccgaaagccagaaatgccccgattttaggcattctatcttgtcttttctatagaagatgggcgcatattcgccttctgtttttccatcatctctacctacaccgatgtagtcgtattcaggaagtcctgcaagcaaatcgagcaactgagggtgcaatacttcttgagtacctagcacatcaaaagcattgtatcggattagttgaatttgtacagggcaacgttgtgcccagccgtttccattttgggcatcgccctcattggcatatctaatattgtacgaaccgacacgtaaatcttgggctaatccgcctaaagttacggcgataaagaaaaataatagagctaattttttcattggactagatcttttaattatgagtataaattgttttgtgaatcacaaatatagctcttttagataagaggggggatagacgaggatatataaccacataaaaaagcgtactactttgtggtgttatgcaaaatagtagaggaataggggggagttagggctattcaataggatctctgttactgagcagcatctggaaatccttctgcataaatctcttttgctcgctcgtaatctttatcaaaaacatagacttctatttcgaaaccaggaagaccagctagcacagtagccgagttttcgtttcttttgaaagactctataccttcgtttttgagtacgctgcaaagaagatttgcacgataatcgctttgaaacctagccaataatattgtatccattatctcaaaagtttaagaagagaaagctatttctctttgtttttacagcaaaacgagcaataggttactttcccatatagttttttagcagaatcgagggcatctgtgcactccgaaaaatcacccaaatatactctgttatatgtgggggagggaagaaagccacagaactcggtatgtacttccctttgccccgatgtattggggttccgattcacataatatttcatatccttattttactttatataataccacctattgatgagttagcctattttggggcaatactctgctgttgtttgtcttctcttaaagataggaaactttgtgaataatgaaggctatttgcttgattaagtttgagatagactatcctctaaaaagaattagtttgggtagaaatagcatccttgagtgtgtgttgaagtaggatgccttctctatctagttgatctagtctgattttgaaagaagcgtaggtaggaaaacgaaagcctcaccatttacttaaatactctattgatatttcaaatataagacagaagatgcttagatgatttattaaatagtctatttcctcttcataaaactctgtaactggctttatacatctcctaatagaagatgtgttatactataaaaatatttacagctatcatatgaatcagtgataagtattgtaagtatatataaactagtttgttaggatttaagtagggtgtatgatacaatcctattccagctgtaatatccttttttatctttctatggagttaatatatttcgtttctaaaaaggtgtgggttgattgagtagagtcatacgctccaaaattgatattgaattctttagaatgagaaaggaggaagattagagaactttttaactatgagttggactgtaacagattgtttgatagtgtactatgtcctatcacgaaagagtgagaaaaaggatattgtcaagaataaagtaagaagatagataattattttttcattttgtactctttttattcaataaataagcagagtgtgatttcttttttttaaattcggagagataaagaataatgattgcgaaagtatcgtttgaaatttgtagaaatttgaaatttatatacatcccatctacccgttttatgcgatacaaaaaatcctgaaaaaggagattagtatgaattgtaattaacgtaaatctaaaactatgtccgataaagaatcgttcctatccaagctctttaccaagcagatttttataccgtttttggtattgggtgtttttgcttttagtatggttattgccctcagaaaagttttcttttcttgaattaactattatccagcagcgtgttttattaatttttatttttgctgttgttatgtggattacggagtatatcccatcgtggattacgtctgtttctctcaccactttactgttgtttacggtgtctgatagtgcattgaatttctgtcggttgggagttcctcaagaagagcttttgtccaatagaatcttgatcgcatcatttgccgatcccgtcatcttcctcttcttaggtggttttatactggcagcagttgcctctaaattttacattgataggaagatagccaatggagtaataaaagtaattggtactcgctccacatactacttacttggtataatgctagttacggccttgtgttctatgtttgtgagcaatacagctactgctataatgatgctgacattggtaggtcccatcttgaaagattttgagaaaggagataagggtaaaattgctttggtactaggtattacagttgctgccaatcttggcggtatgggtactcctatcggtacgccacccaatgcgattgctatgaagtatttaaatgaccctgccggacttaatctgaatattagttttggagagtggacaatggtgtttgctcctctagcaatagccttggttcttattatgtg

SEQ ID NO: 4454 - DNA, 15828 bp, synthetic construct
  source 1..15828: mol_type = other DNA
  misc_feature 1..15828: note = Synthetic
caattcacaacttcgcaaagttcacttttaacaaaaatagagttgttactgatatcaaagatacctcattttgaaagcaattcacaacctttgcctgcttggtcttgcaagcttgatagttgttactgatatcaaagatacctcattttgaaagcaattcacaactcatactcttccgttctacctaaaccgctggttgttactgatatcaaagatacctcattttgaaagcaattcacaactggtgtgtacagtgagttcattgatatgctgttgttactgatatcaaagatacctcattttgaaagcaattcacaacgagtgggcatcaaaccctactcccttttttgttgttactgatatcaaagatacctcattttgaaagcaattcacaacgaggcactgcatacattcacaataaggataggtttaagcatgtaactatcacaatatcaaactcattgtaaataggtggggcaaaaaacggggtaatttagcactaagtctttaattcgggtgctaaagaatatataaaggagattggtactatccaatctccttttatcttttgggatacttgtagtttgcctttagcatcctgtttttatctatcttatttcacagatagataagtttaatattttcttaaagttattggttgctattaaactcttcttgcgagattgacgggccaagtcctgaaccgtatgtagatagtctaaatgatatttctccttcagaccattctgatcgtgttcgagttacagaaaattaccctccatcatgataagagggtctatcattgtgcacagctttaattttaagcttaaaagtatctgattgactaaagcttaaagtcatttctgattgtggacgtaaagtgaaagttctgtataagccacccatttgataaataatctttagagtcatagtataatcagacttgtttttgaaaaccattttggctaacgtgtcctcactattcatatacgctccccatgagttttgtgccgatgcagctagtgaagtaatcaaaatgattattacaagagttattcttttcattaattaagatgttaggatttaaaaatattatttataatgcaatatgtgttgagttgaatagtactgattttaatcactcataggtacgctaaagaaattaattgcagcacttcaatataatttcctggccgctaccaatcaaccctttgcgagtaactcctttatgccggacgacttattcgttttggtgttgtgactaactcattttaagataccgaattttaaaacataaaaaaaggtgagttgccccaccttaaatgtttacacaacggaataatccttattgtgaattgcttcaaaacattggcaagataagaatttattttataactttaaaacattattgataatattatcttaaaattaacatataatagttttaactagagatgaaaaaaatactaggattagatataggtacgaatagcgttggttgggctatcatcaataaagatagtgatggaccacaaagtattgtgaatttaggtagccgtataatccctatgtcacaagatgttatggataaatttggtaaaggacaaactgtatctagcaccgcagaaagaactggatatcgtggtgttcgtcgcatacgtgagcgttccttattgcgtagagaacgcttacatcgagtattacacatacttggttttttacccaaacactatgatcaggttatagggtgggataggtctgataatcgaacgtatggaaagtttttaccaggaattgaaataaaactttcttgggtaccaacagatagcggtaatcagtttttgtttatggatagttatctcgaaatgctgaaagaattaaagcaagagcagcctgaattatttgagactagtgatactccagcacctatggactggacactctattatctacgtaagaaaggattaaagcaagctctcagaccagcagaactggcatggataatccttaactttaatcaaaaacgtggttactatcagcttcgaggtgaggagcaagaagtagaccctaaaaaacgtgaagagtatcatgctttgcgtgttgtaagagttgaagttgatccagaatcaggttcattgtctaagccttggtataatgcttacctagagaatggctggatatatagatgtcaaagcaataagcccttagatagttgggttggcatgataaaagactttatagttactatccatcttgcggatgatggttctgaggccttagatcgtgaaggtaatgttcgtcgtaattttagagctccaggtgaggatgattggacattattaaagaaaaagacagaaagtgatctacaaaaaagtggaaagactgttggtgcctatatttatgacacacttctgaagcaaccctcacaaaaagtaagaggagaacttgttagaaccattgagagaaaattttaccgcaatgaactggagcttattttagataagcaacttgagtttatccctgaattaaagagtaaagagttattcgatgcttgtgcaaatgagctctatcccagcaatcataaccatagagccaatttactgactaaggattttaaatatctttttgtaaatgatattatattctatcaaagaccactcaaaacaaagaaatcactgattgcaaactgtccatacgaaagaagatcttacaaaaaagatggtgagcgagtatatgtccctatcaaatgtatagcaaaatcaaatccttattttcaagagtttagactttggcagtttatagaaaacttgcgtattattcagcatcaaaaagagatggatgatagcatccaatacaatgtagatgtcacctctgattacttgcccgatgaggttagctatgttaagctattcgattggctgaatgagcgtaaagaagttaaagaagatcagctacttcgcaacttcttcaatctaaagaaagataagatttcgaaagagttttctgttagttggaattacgtcaaagacagaacttatccatgcaatgagacacgtgcattacttattagtggcttagaaaaatgtgatagtttgtcttggctcgactcgaaagaaaaagagtacagactttggcacttgctctattcggtagaagatcctaaagagttacgaggggccttagcaaaacttgccgacaaagagagtttatcgagtgacttcgttgatatattctctaaactaccatcttttgaaaaagactatggttcatactcagagaaagcaatcaaaaaaatattacctataatccgaaaaggttcttactggtctgcggatgctattgactctcgaacacaaaaacgaatccagcaaattattgatggagaagtaaatgagtcgattgatatgcgtgcacgagaaaaactggaatcgctacgcgagatagctgcctataaaggtcttccattatggcttgctggttatgtgatatataacagacactctgaagctggcgaaataaaaaaatggaataccccagaagatttagagtactacttaacacatgagtttaaacaatattcacttcgcaaccccattgttgaacaaataattttagaaacactaagactagtaaaagatctttgggaaaagtatggggacctttcggaaatacatttagaattaggaagagatcttaaaaacccagcaaaaaagagagaggctgatactaaacggaatgtagataatgagaatgagtggatggagatccaagagaagatgcttgaattccatagggagggtttgataagtaatccctattctccatctcaaaaaatgaagtataagttgtggttggagcaaaatcatatttcgccatacacaggagaagctattccacttactaaactatttacttcaagctgcgaaatagaacatgttatacctcaagggcgctattttgacgattcatttaccaataaggttgtatgtgagtccgaagtgaataagcttaaaagctctatgctaggacatgagtttattaaatcaaaaggtggtgaggccgttttaattggaggaactcaggtcagaattttatctgtgccaaaatatgtagcactggttgatagactctacagctctacaaacccaaccaaagcaagtaagcttttgctcgaagatatagatgacctaaataaagactttagtgagcgacaattgaacgacactcgctacatcagcagatatgcgatgagcatactctcggctatagttcgtgaagatgatgagaaggagtctgtctcaaaaaatattattacttgttctggtaagattacggatgttttaaaacgtagttggggattaaaagatatctgggacggactaattcagcctcgctttgaacgcttgaatacgatgtatgatacccaagagttcgggaaatgggtaacttcaaataagtttcaagtcagaattccattagagttacagcgtaatgtgtccaaaaagcgaattgatcaccgacaccatgctatggatgctttggttatagcttgcgctacacgtaatcacaccaattacatcaacaatatgtctgcttggaggggtgaggactataaaaaagtgcgctatgacttaaagaagaagctgattgatgagaacagtagcgagcgtgatactttcatcaaaccttggccaaactttactgttgatgctaaaaaggctttagagcgaataattgtcagtcacaagaaaaacttacgtgtgctaacagcgacagttaatcatactgaatatatagataaccagggcaaacgacaattaaaaaaacaagaaagtaacgatcattatgccgttcgtaaacctctgcatcaggaaactatatttggccgtgtaagcattcgtagcataaaacaagttacacttagtaaggctctcgaaaactacaagtcaatagttgataaacatctcaaggctaaagtacgtgaagtgatcgctgaatatggagggaaggttgactcaaaaaccctcaataaatatttcaaggaccgagactataagtacgaaggtcttgatattaagcgtgtcgaagtatatcattacgatcacgattgtgcagcaacacgtaaaccactcaatgactcgctgactctaaaacaaatagagaaagttacagatgagagtattcgtaagatattatataatcatcttgataattatgctggagatctcaaagaagcatttagtgttgagggcttagtcgctatgaataagaatattaaaaccctcaacggtggtgtacctcatcatcctatatataaggtgagactatttgaggatttgggttctaagtttgcacttggtacaacaaataataatccgagtaagtttgcggtagccgcaaaaggaacaaacctgtatttcggggtttacgttgatgaaaatggtaagaggagttttgatagtattccatttaatgtggttcttaatagaataaagtctgggctgagcccagtaccggatgtttttggtaaatcgaatttgctcttttacttatctcctaacgacttggtttatatcccttcatcaatagaacttaatgaagagttctgtattaatgaaatcaataataatagactatataaaatggttagcagtactggcttccagtgcttctttagtcaaaataatatggctcaatctatttgggataaaaaagaattctcagcgttaaataaaatggagcgagatattgaggggaatatgattaagcaagtctgctggaaactagtagtaaataggataggagagatcactgatgtaataagatagaactatgattaagaaaacgctctactttggtaatccaacgtatttgagttgtaccaacgaacagttggtaattgaaatgccagagataacaaaggctaatacacacccctcgctacaagcaaagggtgtgataactcgtccgattgaagatataggtttgatcatgctagatcatcctcaaattacaatcacacacggggcgatacaaaaacttttgcaaaacacctgtgccattattacctgcgataacaagagactcccattcgggctgtgcttgccgctctatggaaacacgacacagaatgagcgttttcgagatcaattagctgttgcacgtccagttcagaagcaattatggcaacagacagttcaatataaaataaggaatcaggcttttattcttcagaaattcacatctgaaaaagctgagaatatgctggtttgggctagcgaggtacgtagtggtgacgttacgaacctcgaagctcgggctgcagcattctattggaaaaatgttttccatcagtatcccgactttatacgcgatagagatggtcttccacccaataatttgctcaattatggttacgctattcttagagcggtcatagctagagctattgtactgagtgggctaataccaacgttgggtattaatcaccacaataaatacaatgcatattgcttggcagacgatataatggagccgtataggccctatgttgacaagaaagtactccagctattaagcaaatatggacatattgatgagataaccaaagagataaaaggagagttattattaatcccgaccatggatgtaaagataggtaagcggcgtagcccgttaatgattgctgcaagccaaacaacagcatcactttatcagtgttttataggtaaaccccgcaagattgattatcctttaatggaatagtatgcaacgtattagtgaatatagagctatgtggatattagtattctttgatctaccgacagagactaaacaagaacggcgtgaatatgcattatttcgcaagcgattgatggcagatggttttactatgttccagttctcaatataccttaggcattgtgctagtcgagaaaatgcagatgtgcatgtcaagcgagtcaaaaaactattacccaagaaaggatatataggtatactgagtataaccgataaacagtttggtaatatggaactatttatcggtaaaaaagaaacagcttctcaacccgaaggccaacaattagaattgttttaaggctctatacactatttctttagtctactcttcataagcttagcttgtttaataacctcaggagataagacaagtaaggcgattacgttagggactactaagaatacatttagcgtatctgttagctcccaaacaaggtcaacctgcaatatagaacctaaaaccacaattaccattacaagaatacggtagtagggtatccctttttcacccataaggtaacgcaagttttgagcagcgaagaaataccaaccgactatagttgtcaaagaaaagaagaaaagggtgactcctacaaagataaagccagcgtggccgaagactaatccaaaagaggcttgagctgcatcggctgcactatgcgtaaggttggtctttgataccaaaataattagcgctgagagtgtacaaaccacaaagtttgtagcaacaccaacaagagctgtcataccttgctcataaggttcttttacttgtgctacagcatgagcgtgaggtgtagttcccattcctgcttcattggagaacagtccacgagatacaccatatcgtacagctttcattacggtcagccctagcgcaccacctccgatactttggggagaaaaggcaccaacaaatattgattcaaaagctggtaaaatctctttgtaattgaagagtataacaagcatcccacctgtgaaatatagaaaagccataataggtactaccttttcggcaaacgaagcgatacgagtaatcccacctattaatataaagccaatcagaacagctactgctatgccgatataaattggttctatgggaactatattagatatagcaatcgatattgaattcgattgaacagcaatacccatcagaccaagcactactacaatgcttatggcaaagaatacagcaagaaacttactaccaagcccattttggatatagtaggctggtccaccaataacgtgtccctgctcttttgttcgatatagttgagccagaacggcttcagagaagttggtcgccatgcccaagaaagtactaatccataaccaaaaaacagccccaggtcctcccgaaacaatagctgtagcaacacctattatattacctgtaccaagttgagcagccacagcagttgctagtgcctgaaaagagctcattccttcagcctgagttgccttcttcttaacaaaagcaccagcaaaagtcttctttatcgcttgatctaggctcttttggacaaaacgaaggcgaatggtaaaataaatccccgtaccaaatagagctacaataagaataggtcctagataggtattattgatatatcggagaaactcaataagttgatcttggatagattggtctatcatgctaatttgtgtgtttgtgaattagtaaaataaataggcaaagttaaggcataaatatatatgaaaagaaaaatatataataatttgtaataaagccttatatctcatttagttattctctttgtaatatctgaagtcttttaaatgcttaatcctcttcctacttatatgttcaatatatatttgatatagttgtttgccgactgaagttttcataaatttgtagtgttgttggtgatggagcatactcaaatctgtatgactctattgaaaagggaatcaggtgaaaatcctgaacagacccgctgctgtaaactcttataaatgtactctttgaagactgctatagccactgtcagatgatgatgggaaggcatcaaagagagagtaagtcagaagacctgccacaacaggttaagttatgaaagctttctgggactagagtttttaacaatattgagttcaatcatttgaatttaaatttcttgttattgctgatattttaatcggcaacctatccttgtatagctgctagttttcaattaattagatgcaatgcaacctttaaaaaaaattattctctgtgggtgctttggtttactgccattaatctctcaagcccaaagcaaattggatagtcttcaatacctgcaagaagttgtggttacggccaaaccgtttgaggcagtaatccctgttcaaacactgtcaggtgatattttgcaaacacttagtgttcatagcgtcgccgatgctttacgatatttctcaggaatacaagttaaagactatggtgggctaggcggactcaaaaccattgatgtccgaaacatgggaacacaccatgtgggtgtcttttatgatgggattgaacttaataacgcgcaaaatggaacgatagatttgggaagattctcattagacgatatggaggaactatctctctataatggtcaaaaaagtgatatcttccaatctgctaaagacttttcatctgcttctaccgtttaccttcgaactaagcgccctcagcttttggatggaaaaaacaccaatctaattgttcgatataagacaatgtcaatcaattttaataacccttcatttcgttttgagcaacgacttagccctaaggttacaatgagtgctagtggagagatgataaagtcgaatggacgttataaatttagatataaacgacgcaacctcgataacacattggcctacgacacaacagccattcgaaagaatagtgatatagagtcttatcgctttgaaacagctttgtttggtcggttagaagatggtggatgggatgcaaaagcttacttctatagctcaaaccgtggagctcctggtgctattgtagctaataagtttgaagatggattccgtcaaaaagactataacatctttgctcaagggaattatacaaaagactttacggatcgttatcattttcagttcaaagggaaatatgccttcgataagatgcattatatcgctcgtgatgtgaccgactttatgggtgaggaaacgacacaaggggcgcagtttgatgactcatactatcagcaagaggtatatacctctatgattaatatgtataatatcacagattggtgggatgtttcagcttcggtcgactttcagtggaataagctgaatgctaatcgaaaaggtatcaatacacctttctcttatcctgtcaggtacacagttttaggtgcagtagctacctcttttaacctgaataagttcaaagcgatggttagcgtaaacggagcatttgtacatgagaaggttaaaaataacaccaaagcacccgataaaaaagaattatctccagcgatattcttagggtataagcctttcgaagatgtcgatttcaatttgagagcttttgctaagcgtgtgttcagaatgccgacgttcaatgatctgtattatgctcaagtaggttattctaatttaaagcccgaatacatgaatcagtttaatgttggctttacctactctatgccatttgagcatactattttcgatcagttcacgatacaatctgacgcttactacaccgaaacaacagataaaattattgcagcaccgacaggaaatctatttcgttggatgatgagtaatatcggtaaagttaaggggaagggagttgaagcttcggcagacttggatttccattttggaccagttaatttaaatgctcatgcttcgtatgcgtatactacacaacgtgactatactaagatagcaggtaaacctctatcttcttatggagatcaaataccctatacaccttggcatagtggttcaagcatcgttactgccaattacgatggatggcatgtaaattatagcttcatctatgtaggtaagcgttataatggtgcgttcaataatattccgaagaataaggttcaaccttggtatacacatgatatctcacttcagaaaaaaatcccattcaagcatttcaaattaaccgctgctgtggaggtcaataacctcctaaatcaacactatgaggtaatctataattatcctatgcctggtcgtacgtttaaatttaatatcggaatagaattatgaagaagatatttaagataggattaatcctaaccacagtcttttcaataactctgctgcactcttgtagagaagatgaatatatttttggtactgaggtagcttcacgaggtgaacccaatccagatgcaaaggttctcggcttctatatgctcaacgaaggtaatatggggatgaatagagcgagcattgacttttatgacttccgtgctgctcaatacaagacagatatctattctgaggccaaccccaatgtggtaaaagagttgggtgacgtagggaatgacattaagatatatggtgataagctttatgccgttatcaatgtgtctaacaagattgaagtgatggacaaatggacagcgaaacgaataaaagttatcgatgtaccgaattgccgttatatggctttccacaaagataaagcttatataagttcgtatgcaggtaaagtttctattgatcccaatgccgaaattgggtttgttgccgaaatagataccgtgaccttagaacttaaacgcaaggtaaccgttggttatcagcccgaagagatggttattgccaatgataaactctatgtagcgaactctggaggttatcgtgtaccaaattatgaccgaacagtatcagttatcgatctcgaaacctttgaagtgatcaagaccattgacgtagcgattaatctacaccgaatggcgattgataaatacggattcatctatgtttcctctcgtggagattataacaagataccctcaaatgtctatatcatagactccagaactgacgaagtagttaagaacatgaatacaggggctagtgagttttgtatgagtggagattctttgtactactaccgtgtggagtggagctgggctgcaggggggaacgccataaactttggcatcattgacacccgaacgcaagaggtaatcacagaccagattatcaaagatggaaccgagaaagatataatgattccctacggattagccatcaatccggagacaaaggagatttttgtgactgatgctcaaaactatgttgttacgggctatgtctactgttattcccccgatggctatttaaagtggaagactaaggcaggaaatattccggcacactttacctttttagagtaaaataaacattctatattatacacaatgaaaaagactatgaacacgaaacgtatgtttcaatttttacttgcaagcagcctatttgtaggtgcttcaagttgtagcagcagtagcgacgaaaaagctagttgcccctacatcaacaaggtttatgaatttaaacctgctgttggtcagtttactaatggtttgcctatgtatgtcgaaggtgatacctatgccgatatgcttgctaaagcaaataaagccttagtaggacctaaatcatcaatggttagtttgggtggctttggtggatctgtggtgtttggctttgatcataccattgagaataagtcaggcttacgtgactttagggtacttggcaatgcttttaaagctgctggaaatcccaatcctgatggaagtaaagatggcggcagtgctgagccaggaataatacttgtctcgtacgataccaacaaaaacggattacccgatgatgagtggtacgagattaaaggtggtgagtatgacaagtctacaaagaattacaccatcacttacttcaaaccagatcccaataaagcactcaaacccatttctgaaagcgattacgtaaccgatgcagagtatataagatgggaagatagcttaggggatgaaggctggaagactaagaacagattccatactcaaagttattatcctcagtgggtaaatgaagataaaataacatttacagggacgttactgcctaataatagcaaagatgaaagtggtacgggtaattactgggtttcatacccttatgaatacggatatgctgacaactatccaaataacgatccaagatcagcaatagatattgattgggcaattgacaaagatggcaatcctgcaaacttaccaggtattgactttgtgaaggtttatacaggagttaatcaagaaatcggctggctaggtgaaatctctacagaagtagctggtgcatatgacttgcacttaagaaatgaagtaataaaatcaaaactaaacaactaatgaataaatatatattactatcgctagtcgcgatatttggcctcttgtcatgtaacgataacgacaaggttgaaaatcctgttgaacccaattttactattgagaacctttcagaaaaagaaagtgtggccataggtgaatcagttgtactaaaagctataattgatgagacaatagactccaaagactatgaatatgtttggaaggtgaataataaaactattcaagatgaatctgtagttaacactgaagatttgacctttacgtttactccaacacaaacaggtaagtacaaaatcacctttgaacttgattattataacgataaatatgccactgaggttgacatcacagctttaggtaaatttacgaatggtgtgtatcttcttgatgaaggtcgaatgggtgaacatgggtcactacactttataacttctgataatgaatttatagatgatccgtattacgaagtgaataagaaatacttaggagatgttactcaagaccttttcgtatcgaatggacagttctatattatatcacagaatggttctaatgatgatcagatggaaggcttattaacagttgccaatgccgaaacattagagcgaattgtgagttttcaatccgagttatcaagattatctatgcctacaaacattgtcgttttaaatgaacaaaacatcttcattcgtgataatcgcggagtatatcgcttcaatctagactctaaagatttatcatatatttcaggaacggcccagtctaataagatgagaatgactgtagtcaatggtaaagtttttgctaccgctggtaataacttgttggtcttagaagctgataaaaatgaagtaagccaaactataccttttaaggaaaaagtttcgtcagttatcgctgcttatgatgggaacctttgggtgtcagttggaagtaataccattgctcgcgttaatgctgaagatttaagcattatggattctaaacagattacattaggtagtgttagttctaaatttgctattacaccatctatatctgcttacaaagagtatatctactactctggtacaaatccaaagatttacatgtttaactacgagacagaggagaacattcttgctgcaaatctcaatgatcataactctgacgatgaagtttatcagaatgttcaagtgaaccctaaaacaggagatgcttacatgacttctttaaagtcttattcggaatacaaattaaatcatgtgaccatattttcgtttgataatggtaaactaaagtttaaagacgcacataaagatcacttgtcttttcctgctggagtgttttttactgatagctttaattaagaaaatatagtcgaatcaccttaattaaatgacttataaaaaagtctaactaatccagaacaaggataagttagactttttcttttttaactaaacaattattgcaacactattgcaataattgcaccttattgtatctttgttgcattaaccaagcagacaactaagcacatggcaaagaagcgaaatacgaaaaccaaagaactggtttggaaggtaatggagaattcggagtcggcattgactcacgatgacattacccaaagcctaaggggtgaaatggatcgagttaccatctatcgaatccttcaaggatttgaggaggaagggctcgttcataaggtaattgatagtgctggtaaatcgcactatgcaatttgtcgtcactgcacagagcaccatcatcacgataaccatatgcatttccagtgcgtaacgtgtggggtggttaattgtttggataaagaggtacgcaagcctaatatgccagagggttatacagtcgaagaaattaactatttggttacgggctgttgccccgattgccgagacgacaaagactaatcaatgaaaatatatttacttggtttagcatacacaatagtgggtatgcaggctctttacgctcaaaatttagccgactccttggcctttgaggcctaccttaatgaggttgtagtagaagtcaaacacgcttcatcaagctcaatgccacttgccttacctagtcaagaagttaacggtctatggcttcagaaatatcgtgctggcagccttatgcagagtcttgagagccttgcaggcgtacaagctatgccagtaggagctacactttctaaaccaatgattcgtgggcttggttttaatcggattgctgtagtgcagaatggcattaagcatcaggggcagcaatggggagctgatcatggcttggagattaaccaatatgcaccaaacctgttctatgtccatcaaggtcccatgtctttgcagataggctcggatgccattggcggagtgcttgaggtcgaatctgtctgtagcaagcctaaagatggggttaatggcgatttatatctatatggaggtactaataacggtttattgggctcagtaatatcattagattatcagagaaacaaaaactattggagtctgcaaatggggtatcaaactactactgactataaggttcctactgatgaatttaactatttaaatggtcaatatcacctaaa

SEQ ID NO: 4455 - DNA, 23432 bp, synthetic construct
  misc_feature 1..23432: note = Synthetic
  source 1..23432: mol_type = other DNA
cgaccttgaggtcgccgtggccctcgatcgagaagccctcgacgggcacgccgttcttggcgatgccctcgacgacgcgggcggtccagttcggctcgatgccgatgacgacgacggccgcgatgttcgggttggagccgacgccgatgagcgtctggaacgtgagctccaggtcctcgccgaactgcagccggccgaaggcgtgcggcagcgcgagcgtgccgggcacgtggaacgccactgcctcggcggcggcgttcgagaggtcgtcgaccggcaggatcgcgacgttgttgcggatgccgaccttgccgttgggacggcggaaaccggttaggcgacgctgttctgccaccgtgcgctccttacgttgtgggtgtggacgtagtcaccctgcttgatgtcagtggttgcggtgccgatgggcagcgagtactccgtgacctcggcaccgttcgcgacctccttgagcgcgaccttgtggccgagcgggatgtccgcattgacgacgacggacttcgtaggcgagccgtccaggaacccgacgatggattcacccggagcgacgtcacgaaccgcaacggcgacagcgtcgtcggcgtcgtggcctaggaagtcgggatattcattagacacttgtatcctcccttctggtcagtggtctgaccagttgttgaaggatatacatgggttgggcgggagcgcaagggaaaccccaagatcctcgggacgcgcctccacggcgcggaccgccccgtcaggacttttgcggcacgccccacgtcgccaggactgccgcgacacgcacccaccctgcgcagagcttccgcgacgccgccggattccccgcattggaaaatcgagggaaaactctcgcgctcaagggcacccaacagcaccactgctcacactatctgccccgaacagttgccccgaggatggggtggcgctatcctaaacccattgggaaagcggttacccgcttgaccacttacaacgatgtaaggagcccgcatgaccagtgcgaccaccgcaacgcccgtgatcgattccccgcagaagcgacccccgaaatcgaggggcaatgcccgcggatcatggctgcagagcatgagcgggtacgtctacccgaccatattcctcgtgctcgcggccatcgcctggtggatcgtcaccgaggccgacctcgtggccccctatattctgccctcgccggccgacacgatcgcggcgttcaccgagaatgccgcctacttgtggcagcacacggtggtgacgaccgccgagaccgtcttcggcttcgtcatctccgtcgtcgtcggcatcatcgtcgcgatcgtgatggtctattcgcgcaccctcgagcgcacgttctatccgctcatcctcttcgcacaggttatccccaagatcgcgatcgcgccgctattcatcgtatggatggggttcggccccgagccgaagatcctcgtggccgtgctgatggcgttcttccccatcgtgatcgcgggcatcagcggcctgcgcaccatcgatcccgagatcctcgagttgacgagcacgatgggcgcgtcccgcttcaagaccttcatgaaggtccgcttccccgccgcgctgccggagctgctctcgggcatgaaggtagccgcgacgctcgcggtcacaggtgcggtggtcggcgaattcgtgggcgcgaacgaaggtctcggctacgtgatcctgcaggccaacggcaacgtcgacaccgccatgctcttcgccgcgctcttcatcatgtcgctcctcggcatcctgctcttcgcgatcatcctcatcgccgagcacttcctcgtgccttggcacgcatcccggcgcaacctcgagcagtagcggccggcctcaacctcatccgacaacccaacaaccctgagaggcacccaatgtcaacgaagacaacacgcaacgccctcgttgccgccgtagcaagcgcaggtctgctcctgtccggatgcgcgggcggcgacgccggcggcggcagcggcgacggcgagctcaccgacgtcaccctcatgctcaactggtatccctatggcgagcacgcccccttctactacggcgtggagcagggcatcttcgaggagcacggcatcaacctcaccatccaggcagggcagggctcgacgaagacggcgcaggccaccggccagggccaggtcgacttcggctgggccgacacccccgcggtcctctccaacatcgacaagggcgtgcagatccacagcgtcggcgtgttcctgcagaccacaccctccgccgtccaggtcttcaccgattccgggatcacggagcccgaggatctcgtcggcgcgacgatcgcgacgaccgcgggtgacgccccgaccaccacgttcccgctctacctcgaggccgccggcctggaggagggtgacgtcacgcaacagaacctcgatgccgcaggcaagatgtccgcgatgatgaacggccaagtggacgggctgatcggattcgcccacgatcagggtccgaccatcgccgccgagagcggccgcgatgtgacctatctccgctactccgatgtcgggctcaatttcttcagcaacgggctcatcgcgagcaactcaatgatctccgacgacccggagctcgtgtcgagcatggttgcggctacctccgaagcattcgccgccgcagtggagaatccggaagacgccgtggccgccatggacggcaaggacccccagatgcccgaagccgaagtgctgctcgagcagtggaacggcaccattcccctcctcgaatcgcccacgagcggtgccgtcgtgccgggcgcgaattccaccgaggactgggacgccaccatcgacgtgctcgcggaggccgggctcatcgaggaggcgaagcccgcgaaggactacttcgactcgagcttcgctccgtccgggagcgctgaatgaccctcatcaccgacgaacgcaaggctgaaggcaccatggcaccagaccgcagtgacacgctcctcgacgtcgccgacgtcggcatccgattcgagaccaagcgcagaagcgtccaggctctcgagcacgtcgatctgacggtgcagcgcggcgagttcatctcgatcgtcggtccatccggatgcggcaaatccacgctgctccgagccgtcgcgggcctgaccctccccacctcggggcgcatcgagctccgtggctcggaagtgaccgcgccgcggaaggacgtgggcttcgtcttccagcgccccgcactgctgccgtggcgggacgtgcgcaggaacatcatgctgcaggcggagatgcgcggcatcgacaaacgggccgcgaacgcgcgctgcgacgagcttctcgagctgacgagcctcaccgacttcgcgaaggcgctcccccacgagctgtccggcggcatgcagcagcgcgtctctctgtgccgcgcgctgctccatgatcctgatgtgctgctgatggacgagccgttcggcgcgctggacgcgctcacgcgcgaacatctgaacgtcgagctgcagcgcgtctgggcacagacgaacaagaccattctgctcgtcacccattcggtgcccgaggccgtctacctcgcgagccgtgtggtcgtgatgggtccccgaccgggccgcatcattgaggagttcgacatcgatctgccccacgagcgcgagtacgagcccacgctcgaagaccagcgcttccacgcggtcgccggacgggtccgcgaactgctgggcagccccatgggcggagactgaaacccctcccgctcggccccggttcctcttcgagaggggtcggggccgaatcgtgcgtgcggagaccgtgcctgctcagcggcatgtctgggggcagagccggatcgggccgcatcttgccgctcgtccagggagcgctccgcaccgcgcccgtatcccggcgagctgcgcattccgccgcgctccgctacgcccgacatccgtcggagcaacgggaatgcccgcccccttcggggcgggcattcgtgttcgccagcgctcaggagaggtggacccccacgtgtgcgttgaaggtctgccaggtctcccggagcgcttcgccgtacggctgcgcccacagctcggcgttgaacacctcgacctcgacgtcgccggtgtagccgctctcgttcacgagcgcggtgagggcggcgaagtcgatcactcccccgccggggaggtgacggctcagcagcacgtccgccggcagcggcgtcctccagtcgcacgcctgatacgaggcgatccgccccgcggcacccgcgcgacggacctgcgccgccacgtcgggatcccaccagacgtggaaggcatcgaccaccgcaccgacggcggggctcccgacccgctccgcgatgtcgagcgcctggccgagcgtcgagagcacggcccgatcggatgcgtacatcgggtgcaggggctcgagcgcgagcgtcacgccggccgcctccgcctccggggcgagctcggcgacgccttcctcgagcctcgctctggcctccgctatcgtgctgccctcggggatccctcccgcgaccatcacgagcaccgcggcgctgccgcgggctcccgccgccgcgagcgcggcggtctcctcgatcgcgcgacggttctcgtcgagggcggcggagcgatccttcggatcggtgaggaagccaccgcggcacatgctcgagaaccgcaggccggagtcgcgcagcagccggaccgatcgccctaggccggcctcggcgaccggctctcgccacagaccgatgctcgcgaccccctgctcgacgcagagcccgatcgcctcaccgagcgaagcgtgcttgatggtcgcctgattcagcgagaaccgcgcatgggggagcgtcatgaccgcacctccccgtcgagcagtccgtcgaggcggagcatcccgtgccatcgctcgagggcgagttccggctgctcgagcgcgcccgatgagttcgcgagttcgacgatccgcgacaggtgcggcaggctgcgggccgagtggaggcctccgaccatgcggaaggcgtcctggtgcccgttgagccagctaaggaaggcgacacccgtcttgtagtagaaggtgggcgccgcgaacacctgacgcgagagctcctgtgtcggcgcaaggatgcgctcgaactcggcggcgtcgccgcggtcgagggcctgcacagcagccgaggcgttgggggcgagcacgctgaacgcccccagcagggcgtccgaatacgcgcccgtctcgtcggcaccgatgagctcgacgtagttgaagtcgtcacccgtgtacatcgcgacgccctgaggcagtcgcgaacgcaccaggcgttcggcctcggcatcgagcaagctcatcttgatgcccgcgatccggtcctcatgccgctcgacgatgccgaggagcacgtctgcggccgcctcccagcgggagtcgccgaagtagccctcgagcacaggatcgaacgcggtgccgagccagtggatgaccgccttgcccgatacctcgcggagcacgcgatcgtagacacggacgtagtcccggggcgaccgcgccgccctggcgaggtgccggctcgacatgatgaccgggatgacgccccggtcctcggcgaactcgagctgttcgagataggcggcctcgatctcgtcaaggctcaagtgctcttcatcacgaccgtcggtgttcacgcctacggcgacgcgaccgccctccttgcgcgcggcctcggccgtgcgggtgatcagctcgcgggtagccgcggcatcgaggcccatgttgcgctgtgccgtgtccatcgcgtcggcgaccccgaggccccacgaccacagctgccgccgatagtccagcgtggcctcccagtcgatgtcggccggcgctcccgggacggtctcgctcgtagtcttggggatgacgtgcgctgccgcgaagagctccctcgaggccagggggccggagggccgctcgaagccgggggccgcgagcagctcggcggcgccgagggagccgtcggcgccgatcagccgcagggcggagccgagctcggcccgcgacgcaaggtcgagggtctgagtcatcacgcacccgcctgttccgcgagcacgatccgacggccctgcgcgtccgaggccagggcggcctcagcgagcagcatgccggccgccccggagcggaagtcgtagtcgtgccggccgtcgtcgagcacatagcgcaggaactcgatccactgcagcttgaagccgttctcggcaggctcgttctgcggcacctcgatccagtccccggagtagtcgtgcgtgtcggggagatcggggttccaggtgggcttcggcgtggcgtcgcgcggctggatcttcgcgccgaacagcccgacgaccgcgctgccgcgcgtgccgtcgacgtggagctccacgagctcgtcgcggttcacccgcaccgtccagctggagttgaactgcacgatcgggccgtcttcgaggtcgaatacagcgtaggcagcgtcatctgccgttgcggcgtatcgctccccccgctcgtcgacccgctcggggatgtgcgtgcgggtttcggcgtagacggattcgatcttgccgaagaggttctcgatcacgtaattccagtgcgggaacatgtcgacgacgatgcctccgccgtcctccgagcggtagttccagctggggcgctgagcgggctgccagccgccctcgaagacccagtagccgaactcgcctcggaccgaaaggatctcgccgaagaagccgctgtcgatgaggcgcttcagcttgagcaggccgggcaggtagagcttgtcgtgaaccaccccgttcttgaccccagccgcctccgcctcatcggcgagggcgagcgcctcctcgtagctctccgcggtgggcttctcggtgtagaccgatttgcccgcagcgatggccttgcgaatggccggcacgcgcagcttcgtgacgagggcgtcgaagtacacggggaaaccgggggtcgcgagcgcctcgtcgagatccgtcgtgtacttctccactctgtgctgctccgcgagcgcgcggagcttctcctcattgcgggcgacgaggtagagctcgatcggtcgccgggtgccgtcggagagcggcaccccgccttcgtcgcgaagcgcgagtagcgagcgaaccaggtgttggcggtatcccatccgcccagtggcaccgttcacgatgatgccgagcacgtcgttggtcatgtccatcctctcgtcgggatctcgtcgttgagatatcctcatcctatggaaagcgcttaccaagcacaagcgtgcacgaagaagcgccttcgaagcaggcctcgaaggcgccggattcacccctcaggcgcgggcagcggtccgtaccggcgtgctctcgcgcacgacgacggaggtgttaacccgcagaacgacaggcttctgctccgatggctcctcaatcgcgagccgcatcgcgcgatagcccatatcagcgagcggcacgacgaccgtggtcagcctcggagtcacgtcgcgcaccgtctcgatgtcgtcgaatcctgcgatcgacacatcttttcccggagatttcccgaggtcccgcatcgccgtcatcgcaccgatagccatgacgtcgctcgtcgcgaaaaccgtatccacctccggaaccctcgagagcagtgtccgcatgccctcgtatccgccatcgcggttgaacggcacctcgaccgtcgcatcctcgaatagggccatgccgctgtccgagagcccttcgcggaatccttcgatgcgatcgtgattcgtggcgagcttgcgaggccccgcgatcacgccgaatcgttcccctccgcgctgaacgagcgtgcgcgcgagctcccgggccccttcacggttcgcgagctcgacgacatcgaacggcgaaggcgattgcgagatcatcacgacgcgaccgcccgtggcggcataggcctcgagctgctggtcgagcagcacctgattgggatctccgagggtgcgggaaccgctgaggatgatggcccgcggccgctgcccgcggaaggtgcggacgatgtcgagctcgttctggggcgtgtgctccgcggcggcgaccgtgacaacgaggccggcctcgcgggcgccgcgcatgatgcccgcagtgatcgcgctgaaatagggatcggcgatgtcgctgacgaccaccgcaatcgtcgaggaggcccccttggcgaccgcctgggccgagagattcggcaggtatccgagacgatcggcggtctcgcggacgcgcttctcgatgtcttcgctgactctgcggctgctcccgttgatggcccgcgatgcggtcgcgatcgagacccccgcggccttggccacttcgccgagcgtgaccggctggctcttcctacccatgccccgacccttcccgtctttgtccgcgcgccgttgcgaatctatttgagcatatcggcgcccattccgggtaagtgctttccgcaacgccgaaaatcgctatgttggtgatatgcagcgtcgcatcgtcatcgccccggacagctttaaaggcaccgccaccgcgcccgaggtcgctcgtgccatcgagcgcggatggcgccgggtgcgcccagaggactcgaccgtgctgctgccgatggcggatggcggcgaggggacgatcgacgctctcgagacgtctgaccccggcgcggctcgtatgatgcttcgggtgcgcggtcccctcggcgtcccggtggatgccgcactgctgaagctctcggacggcacctggatcgtcgagctcgcggagacgagcgggatcacccggttggaagcagtgtcccggttttcggcgtgcaccgcgagcacgttcgggctcggcgaggcgatccgattcgcgacgtcccgtggggcacagaacgtgctcgtggccctcggcagcagtgcgtccaccgatgccggggccgggatgctgcaggcgctcggtgcgaagctcctggacgcctcgggacgggacatcgggccggggaacgtcggcctgcacgacttggcctccgtcgatctctccggtatcgccatgctgccaccccgcggcatcgtggcgctcaccgacgtgaccaacccgctgctcggcaagcgtggggccgccgcggtattcgggccgcagaagggcgccgcatccgaggacatcgtggaattcgagtccggccttgcacggttcgccgagctggtgggactcgagccggatgcgcccggcgccggcgccgcgggaggcaccgcctacggtttgctcgcgatcggtgcaaccatctcgccgggggcggcgacgatcgccgaggcgatccgcctccacgagacaatcgcctcggccgacctcgcgatcaccggagaaggatccttcgatacgcagtcgctcgcggggaaggtgccttccgaggtgatcgaggccgcgatcgccgcttcaacgcccacggtcgtccttgcaggtcgcgtcgcggatgaggtcgccaacgaccgcgtgcgcggagtagccgcgacgtggtcgctctccgagctggcgggaagcgccgaatcggcgatgcgtgagacggagctatgggcggaaacggccggggcgcgagcggctgcatcggcgttttgatggcggcttgaggttctgaccacctcggaggcgagcgaatggggcttccctacacgggaacacactgccccatgtgaacgatgcccctcgaatccacattctggtgacgccagcactcaagtaccaccgctcaggtcaacggtggagagcagttgcacataacgactaaccaccccagcccccacccactgaccgcgcgcagccaccagccttgtgctattctcttgcgcgaacgggattctcaataaggtgttggccatgaggttgcagcattgatttctcgccctcccccggcttcgccgatcaggggagggtttttcttttccggacttgacgagatgcgtgcgccgacgcaggctaatactggatagcgtcaggcaaacaccagcggcaatggaggcgagcgcaatgcacgtgttgggtacggatgtcggagaaaactctctcggcctggcgtcgatcgaagttgacgagaacgggtctccagcagccgtcaaccgtctcatggtcgtgctgcacgataacggacgtgatgggatggcgtcgggaagcggcggttcagtcagccgaaaggcgtctgggggttcagcccgccgcgtacgacgtctgtatcggaaccgccgccgtcgcagcatcgagctcgaaaagaggcttcgccagctcggctacccagtcgtcgccccggagcccctgcaaacctatgaggaatggcggtcccgccaagaactgcttcgggagcacatcaaggacgatgactcgcgacgcagtctgctttcgattgccatccgacacatgtccaaccatcgcggttgggcgaacgcttgggtcagtctcgacacgtatctctggaaggaagagccttcaccagaattcaagcaggcggtggaggaccttgtagcttcagaacgcttcgactttgcaacggctccccaagagatccactaccaggcggacctcgctgcattcggcctgcgacaagatgaacgacttcgtcctagacagccacagcgtccggggccggacgccgtaccacctgaacaagcccacctgcttggcagccaacgtcgtgttgatgtcgtacgcgagtggcgccagatctgccgcgtgcaacaggtgcccgacgatcatttcgagcagctcgcgcgcattgccttctcacaggagaagccgtccattcctgcggagcgagtcggtaacgattggcttcccggcttcaagaaccgcaagcgagcctcccgcgcatctttggagcatcaggagttccagatccgtcaaaccgtggcgaatctgcgcatccgcgaaaacggggccaagcgccgtctcaccgtagaagagcagaagcgcgttgtcgatcacctcttcgccgtcacctccaagaacgatgcccccacctggaaggacatctcagaagaagtcctccaggtctcgccccgttcgctcgtcactgcagatcgcgatcagtcggtcggctcggtcgctcccaccttgcgctcagtcgcaacggtgaacacgcttccgaagcgccatccgatccgccaatggtgggataccgcgaacgatcaagaccgcagggacttcatccgatggatcgcggatccggtcaagctcaagcgtcccgcacgaatcgagtcccagatcgagccgatcctagaggcactcaacgacaagcaggctgaagccgttcagagactcactttcccttccgggcgcgacgctcactgcgtagacgcgcttgacctcatgaacgcggagatagaacgaaccggcaaatcctacgtagaggttcgaaactacctcttcgatcttgacgagcagaagaatgcacccacgccttccacactcgatgtggtggcagatcacccaaccctccaacgcatcctgcctccgatgcgccggttcctccagggaatcgtctcgaaacatggggagccggagcgtgtcgtcatcgagcatgttcgaagcgctttccaaggattccaagcacgagaagatgcgctttccgagcagcgcaggaatcagcgcgaccgtgaacgtgccgcagagcacatccgacatgcctacggtatctctgaaccgagcaatcacatgatccgacgcgtacaagcattcgagcggcagggatcgcgttgtctctactgcggttccacaccgggtttcggcgacattgaattggatcatatcgttccgcggaaaacaggcggaaactcgacccgggcgaatctcgtcgcggtgtgccgcgcgtgcaatgccgcgaaggggaagcgcaccttcgtcgccttcgctgccacgtcacagcgtgaaggagtgtcactcgaggccgcgttgcaacgtatcgacgaacttcagcaagggcagctcgaccgccgggcgttctcgcggttgaagcgtgaaatgagacgccgcttgaaacaggacgaattcgacgatcccatcgacgaacggtccctcgcctctactgcctacgcggcggtcgacatccgtgagcgaattcaagggacgctctctctggggacaggcgaagtccctgtgtactcggggcgaatcatccaggccgcccggaaggcatccggaatcgatcgggtcatccgcatacgagagggagtacacgcgaagagccgtttcgaccgcaggcatcatgccattgacgccgcggttgctgcaatgatcaatccatcagtcgcgagaacactcgccgaacgtgatgatatgcgaagggccgcctacgaatcgaacgaagaccgatggaattggacgacgtacgagggatcaacgccagaggcagtccgaaagttctgcaaatggaaagaagacatgcaggaactggcgaggctggtcgacgaggtactcaaacacgatgatgtggttgtcacgtatcccgtacgtttctctgccaaacacgctgcgctgcacgaggccgggcggtctcctcatagaacgaaagccgtcggcgaggcatggaccagtggggaacgagcacggatcgtcgatggaagggtctatgaggccctatcgaaagatctaattccaagcgctccacttcatgaagacgagtcccggacgctgacgttgcccagcggtatgcggctcgatggcaagggcgaagtgtacctctaccccgatgccaaggcgcgtatgcctcttccgaataaatcgtcggcaccgcttggccaatcgatgcaccatgtccgtctttaccgatggctcaccccgaaaggcgaggtaaaggcaggcgtcgtccgcgtatgggcagcggatctctacgaactcgaggacggcatagaaggagatttgctcaccagtccgctgtcggggacctctcaggcagtcaggcgaaccgccaatgcgagactgcgtgacgcgattcaccaaaacgcagcggagcacgtcggcacattcgttatcggggatgaacttctgatcgacccttacgaatggagaggggcgaacgagaccggacgattcatggatgagtggccagaacggcattggcgcctgagcggctgggaacagttgggtgttgcaaatatcaagcccgtgttgctttccgaggaggggatccgaaagaaggcagaggacacttcggaccgacttgtcgatgtctccacccttacaaagaaggtgcttaaagcttcacttcgaattacggcttctcaactctggtccacaccttcaacgcaggtcatccgccgaacagcaaccggtgaacctcgtcaaaacatttcttctgggttgcctacatcctggtctcccatcaaagcggtatacggagaatgaggtgcgagcccgccaggtggttgatgccacggcattgaccggaaccatccgttcaacacgaggcggtctcgagattaacggcaacaacgttcctcttaccgatgtcgctgtgatactcctgggaaacaaagcaaccatatctggcggtgcgatgacgatgctcgcgaagtatgacatcatactgctcaattgcgactggcgtggagttcccgacctggttgcctacccttggatcgacaattctcgagtagccgctcgacaccgatatcaagctgaactctctcagcctcgaaggaagaacgcttggcagcagattgtccgttctaagatcgaaggccaggagaacaacctgacggctgcaagtcttcccgcagcacaacggctacgagtgattcgcaaatccgtccgttccggcgacccagataaccgtgaaggtcaagcggcacgagcttactggcaggtttatttcggggaagacagtcagtttcaacgcgtcccgggctccgcagatcgtctgaacgctatgctcaattatggctacacgatcatgcgtgggttcgtgatccaggcaatttctgcttctggcctgtggcctacctatggcatctggcatcgtaaccgatccaactcatttgcgctcgcagacgacctgatcgaaccatttcgtcccgcagttgacttcatcgtgcaaaatcttgataccgacgcttctctcgaaataccaacagtgaagaagcagctcgtgagcgtactttcgatgccgatgaatggactcggcggttctaccgtggccacttcgatctatgagcttgcagcgcaactcgcgtactatattgaaaatgatcgggatcggcttgaacctgcagtctgggtaccgcctcaggattcaccccgcttagagtgaaatggctgatccagtgtggcttcttgtgatgttcgatctgccaaccctcaccaaggagcagcgacgcacgtccactgcataccgcaatctgctgctcgatcaaggattttcccgagctcaactctcggtctactgtcgctacctcatcaacggaactgcagcgcttcctgtcatcaacttcttgaaagcgacagtgcccgctgagggatacgtacgcatcctgcagctcacggaccgccagtgggctggtggatggcacttgttcgggacgaagtacatcgaaccggaggccccaccggacacgttgctgctgttctgaccaggtttttgggacgttcaaggccccgagatccgcaccacagtgcggatctcggggcctgatcaagtctagctgggattacggaacgggattcccaactgcggggcgcgctgatcggtggcgtgaacaagtctagctgggattacggaacgggattcccaacaggacggtgacttcgtcgacgtacgcgacaagtctagctgggattacggaacgggattcccaacccagagctgcaggtgacgccgcacatgccaagtctagctgggattacggaacgggattcccaaccgccgggcacgtaggcgttgagggtgcccaagtctagctgggattacggaacgggattcccaacggagtgggcgacgtgggcggagaagctccaagtctagctgggattacggaacgggattcccaaccgatgatcgactggaggttgtcttcctccaagtctagctgggattacggaacgggattcccaactcgacggacctgctcatccgcgcggacccaagtctagctgggattacggaacgggattcccaacccagcacgatgagctgcccgcccgcgatcaagtctagctgggattacggaacgggattcccaacttgaggagataggagaagcggcatgagtcaagtctagctgggattacggaacgggattcccaacgccgcggacgagtacggcgaagcgatcacaagtctagctgggattacggaacgggattcccaactgcaggttggtttcgacgacctggaactcaagtctagctgggattacggaacgggattcccaacaggtcgttcacgacctcgagccgcttctcaagtctagctgggattacggaacgggattcccaactcgccaacggcggacgcttccacgctgccaagtctagctgggattacggaacgggattcccaactgctctcgggcggggtctgggcgctggccaagtctagctgggattacggaacgggattcccaactcgagccagtccttcgcgatccgccaagcaagtctagctgggattacggaacgggattcccaaccctgtgacgccgccaccgcgtcggcgaacaagtctagctgggattacggaacgggattcccaacgggggacagtcacccaaacgagcacccacaagtctagctgggattacggaacgggattcccaacagacgacggactgctcgcgcatcgtcggcaagtctagctgggattacggaacgggattcccaactggccgtcaatgtcctagcgggccgcgacaagtctagctgggattacggaacgggattcccaactgggcgctgaggaagccgcggcgctcgccaagtctagctgggattacggaacgggattcccaacgcggcctccccgtggacgcgttcgattacaagtctagctgggattacggaacgggattcccaactcggcctgccgggcttcgacccggtgtccaagtctagctaggattacggaacgggattcccaactgtggctgacgacggacgtcgacggccgcaagtctagctgggattacggaacgggattcccaactctgaaatggtggccgcccagttcaatcaagtctagctgggattacggaacgggattcccaacaagtggatgccgaaggcaacagcctcgacaagtctagctgggattacggaacgggattcccaactcgatgtatcagcagagtccggccccgtcaagtctagctgggattacggaacgggattcccaactccggggacgcggcgaccatgccggcgacaagtctagctgggattacggaacgggattcccaacgcttgcacgcggatctgctgcgcgaggccaagtctagctgggattacggaacgggattcccaacttgcatgtcgtgttccgcgcagaaatagcaagtctagctgggattacggaacgggattcccaacactcgcagccgaccctgacgttcagcggcaagtctagctgggattacggaacgggattcccaactggtagcccgctgagcgtcacgcgcccacaagtctagctgggattacggaacgggattcccaactgggtgtcgctgtacgggtacgcgtccgcaagtctagctgggattacggaacgggattcccaacacgaggatcgggctgtgcaggaggaggccaagtctagctgggattacggaacgggattcccaactcggttcggcgccgtgcgtcgtggggctcaagtctagctgggattacggaacgggattcccaaccgaggatcgggctgtgcaggaggaggcgcaagtctagctgggattacggaacgggattcccaacccgggtcggggcgggaaaatctcctggacaagtctagctgggattacggaacgggattcccaacgtgggcatgtcctcggggaacgcggcggcaagtctagctgggattacggaacgggattcccaacttagtcgtcggtcctttcgaggagtgagcaagtctagctgggattacggaacgggattcccaaccagtggcagtgcgtgttgccgcaggcgtcaagtctagctgggattacggaacgggattcccaacaccatcgcccggggttcggaccggatcgcaagtctagctgggattacggaacgggattcccaacctctgcccctgcggcgcctcgtgtcgtacaagtctagctgggattacggaacgggattcccaacgacccgaggaacaccctcgccggtgcgacaagtctagctgggattacggaacgggattcccaacgctcctcgagccaggtctcggcctgctccaagtctagctgggattacggaacgggattcccaacgaagcaccccggcgcaccgcgccgaacccaagtctagctgggattacggaacgggattcccaacggctcctcgccgcgaccgaagcccccgccaagtctagctgggattacggaacgggattcccaacatatcgagggcgtcatccgggtcgaggacaagtcgagctgggattacggaacgggattcccaacaggctgtgcagcgtggagccagacatcgcaagtctagctgggattacggaacgggattcccaacgagtgctcggtcgcggtgccggtggcaccaagtctagctgggattacggaacgggattcccaaccggcttttttgatggccgtatggccggacaagtctagctgggattacgggctcttcggaatcaagtgtgtgggtggggcctgaagccactagcctcgagcaggctgcgggcgatgtagttcgtgacccgagcgtggagtctcgaaggtgctcgaggcggccgttgatcacctcggtcggtccgttcgacgtgccggggcggtcaaagaacgcgaggatgtccgcggcacgttgcttcagggcgcgaccgagtctgcggatctcgaccagcgcggcggggaaccctgtggtgagggagtggaacacggcgtgcttcatctgcttggccttggtcttgtcgggttcccggtaggcggcgacgatgcgctggtaggtgccccagatcgcttcgacctcgacatgctcctcggcggcgaacaccgtgtccagccggatcttctgcttctcggtgagcaggctcgcgccgatgtggagggtgcggcgggtcttgtagagcggggcccccggcggccgagcaggtcctgttggacgcggtgccggcaggcatcgagcgcgtcgccggcgaggcggaagacatggaacgggtccatcactgggaccgcgtcggggagttcttcagcggcaacggtcttgaacccggtgaacccgtccatcgcgacgacctcgatccgactcgcccagtcattcgggcgggcggcgagccactgcttgaacaccgccttcggccttctctcgaccatgtccggcagcctggccgggcccgtctcgttcctcgcaagcgtgaggtcgatgatcacggtcacgttcttgtccccgaaccgggtgtgacgccagacatgctcatcgccctcgatcgtggtgacaacgtcgaacctcgccggagcgtcgatcagtcgcctcctgccctcggcgagaatcgcggcgttcgcggtatgccacgacactccgaggcccgcttcggcgcgagagacggtgaggtggtcgaccatgaccgctttcggcacccacccgatcccgccgcgggagatcttcgaccgcggcgccgccaccttcgacgtgtcctgccgccagatgcgtcgacaatgcgcgcaccagtaccggcgcactcgcaccaacagttgtcgtcggccgatgcccgaacggctcatgcgcgagcggaggcgtcgccgtgtcccggggcacaccctcggcgctacacttccggcaccacgcgtcgtcgtcaacgacgcggcactccagcaccacccgatccggctcgagcagctgcccgatcacttcgaggccgagctcgtcgagacggcagaacgtggtcaagtcaggcgcagcgaaggtagcgtggtgcacgtcgaggtcttccggcggatgggcagtatagaaacttccatcctgggagacctcgacgcctatccgcgaaccagccgccgaccctcggctacaccctcaactgcgaagaaccgtaaacgtcatgcctgaggaataccgatactaatctagagcgagccgcaatcgcttcggcacggacctgccgctccacgatgccctcctaagtcatcgcatgtcggtggctcatgtgaaagtccccacatgaacaaacgtatttggagtatcgcaaccggcatcgtcatggcgggagcccttgtcggctgctcgagtacaacggaagcgcctcaagaacgagaagacaccagcgtggcagagaccgaacgacctcgctacacctacgattacgccgagaccgcggaggaagagactgcagtcgaatcggaactcgacacctacgcagtcggggaaacggtagagctcacggacaccatcatcacgatcgactccatcgaacccgtcgagagtttcccgatggagtgcatggatacctactacccgccccaaggacgttccctcttcgccgtgcacgccactgtcaccaatacggggaacgaggtcatctatccggacggccagctcctcggctccacatgggtgacctggcgagccgacgatgataccgagatgaactatgccttccccggctgcacactggccggagaaccccagaacggcctcatgaacggcgagaccgcttcattcccgatgctgatcgaaagcgcaggagatgcccagcccggatgggtggagttcgacgacgcctcgagtgcgtaccccatcgtcatcatcctgcaggaagggctcgaagtcgtattcgaatgacggcctcgccacgatcgcgcgtagagaccgccaccgacgaatccaggggcggcctccgggccgtcccacccctaccccggcaactccgtgaaccgcagcggcacccggtggaactgctcgtggaaggcgatgaagcgcttggtgtgttcctgctccatgtggaagtcgtgcgcggccttgtcgtcccagctctcgatgaacacgaggcggtcggggtcgtcggtgcaggtgaagaagtcgtaggcgatgcagccgggctcggcccgcgtggcagcctgcgcttcgggcgcccgttcgagaatccggtcgcgagtgccgggctgcaggtcgatgtcgatgatgaatcggtacatggccgtccttccgagaatgcgtcgagacgcgtcccacgctagccgcaggtcctctacaactcccccgccgtcagcaccgggatcacgtggtgcgcgggctcctcgtacggatgcgccgccagcgccgcctcgaggatctcccgcgcggcctcccgcggcgccaccgcctcgatccggtcctccggcacctcctccggctcgcccaccgcgccgatcgccggccgcgcaccatcgagcggcgtgaagcgccccatccccggcgtcgaccagctgcacccgcgatagtcgccgatgcgccccgcgccggcctcgtccagcgccctgcgcacctcgcccgcgtgctccgtcggcacgtagatcacgatcacgaccagcgatcccccgcccatcacggctcctctccacgatccgtcccgacccagcctgcccgagccgcctgaccggcacatcgaagacggggcccgcgggaaaccccgcggaccccgtcgagcaccgctacgccccgatgcggagcaccaccttgctgctccgcgacgagtcggcggcctccgcgaacgccgcctcggcgtcctcgagcggcaccacgctcgtcaccacgtgccgcagcccgggatacgccgcgaggatctccagcgcctcgccgatctcgttctcgaaccgctgcgagccgtgcagcgtgatctcccggctgatgatcttcgacagcggcgcggcgagatccccgctgggcaggatgccgagctgcacgatcgtgccgcccgcccgcaccgagtcgatcgccgcgacgaacgagggcagcacgcccgagcactccaccaccacgtcgaaggagcccgccggcaccgcctcggcggtcaggtcgatcaccgcatccgcgccgacccgcgccgcgaccccgagcgggaacgccgcgatgtccgaggcgacgatctcccgcgccccgcgggcccgcagcgcggcgatcgcgaggcagccgatcggccccgaaccggcgaccagcacgcgggcgccggcgatccgatcccgtgcccggtccacgccgtgcagcgacaccgccagcggctccgcgagcaccgccagctcgagcggcagcccctccgggatcgcccgcagctgctccggccgcaccgagatccgctccgcgaaggcgccctgcgtgtgcggcatcgccgccgcgctgccgaaataccgtccctcggccagcaggtgcaggccccggccctcggcgtcccccggcccgggcgcgggcgacgccggatgcagcgccaccggcgtgcccaccggcggcgcatccgcgacgcgctcccccacgtgcgccaccgtgccgaccacctcgtggccgagcaccagcggctcccggatgcggtagacgccgttcgcgcccgtcttcacgtagtgcaggtccgagccgcagatcccgccgtacgcgatatccacgagcacccggtccgcgtccgccgcgggccccggcaccgtctcgacccgaaggtccccggcgccgtgcaccaccaccgcgcgcatcgcctcgccgctcacgccgcgcccccggcccgctccgcgtaccccgggttcgcgaccgccgcgggcgcctcgccccgcagcaccgccgagaccgcggccgccgccatctccagcgtcagcacggtcgcacccgccgagagccccgtcgtgtgcgggctgagcagcacgttctcgaggtcgaacacccggtggtgctcgggcggctccaccgcgaacacgtcgagccccagcccgccgagccgccccgcctcgagggcgtcggccgccgcgtcgaggtccacgagctccgcccgcgcgcagttcacgatcacggcgccggggcgcatccgcgcgatccgcccggcgtcgacgatcgtgccctggccgcccgggatgtgcagcgacaccgcgtccgcctcgcacagcgcctcgtcgagcgaccggttctcgtactcctccgcccgcacgaacggatcgtgcacgagcacccgcatgccgaaggcgtccgcgagcgccgcgatcagcctgccgatgcggccgaagccgatcaccgccatcgtcgcgcccgccaggtcgcccggcacgggcggccgctcccgcgcccaccggcccgagcggacgaactcgtgcgagacgagcgtgcgcttcacgagcgctgcggccatcgtgaacgccccctcggccaccgcgcgggcgccgctgccgggcgtgatcgccacggccaccccgcgcgccgtcgccgcgtcgaggtcgatgcgctccacccccacgccggtgcgggcgagcacgcgcacgttcggcatgcgctcgagctccgcggcgcccaccgcgtaggccgcgcgcacgatcgccgcgtcggccgccgcgaggtccgcggcatccggctcggccgcgaaccgcgcgccctccggcagcagcggcccgaccaccgagccgtccaccggcccgagcccgaccacggtgaacccgctcatcgctccccgcccaccttcgccgccgcgcggctcgaggccgcgagcatcgacgcgtccgagccgatgccgatgaaccggaagccctgctcccggcgccgctcggccacgaccggatccatcacgaggatgcccgccgccttgccgtgcgcctcggccgcggccacgacccggtcgagcgccgccgcgaactccggatgctcgtactgcagcggcaggccgagcgcgtagctgaggtcctgcggccccacgaacagcacatccgcgcccggctccgccgcgatctcctcgaccgcgtcgagcgccgcgcgggtctcgatctggacgatccgcgtgtgccgctcccccgcgcgccgcagcacggccgggtcgagcgaccagcgcgcctgccggttgtaggaggccacgccgcgcgtgcccgccggcgggtactgcatggcgctcgccgcgtcgcgcacctcctcgacggaggagacccgcggcaccatcacgcccgcggcgccggtgtcgagcacccggccgaggcggatgcgccgcagctcctccacgcgcacgagggtggctgcgccgtacgcggcc

SEQ ID NO: 4456 - DNA, 11275 bp, synthetic construct
  misc_feature 1..11275: note = Synthetic
  variation 9562..9563: note = note, n is a, c, g, or t
  variation 8804..8805: note = note, n is a, c, g, or t
  source 1..11275: mol_type = other DNA
ccaacacgcggctcgagcgcgacgcgctcctgggggtgctgcagcagccggagtccgtcggcggcgatctcgcgcgccgcgcgctcgactccgtgttcggcgacgcgagcctctccgtcgtccgggacgccgtcgcggtgcacctcgacgccgcggggcagccgggatgggtcgagcgcgtcgtcgaagaggcgcccgagccctatcggacgctcgtgcagcagctcgccgtcgcgcccctgccgggccgcgcgggggcgatggcggccaccgtgcgcgggttcgcggtctcgctcgtcgagcgcgacctgctacgggagaagcgcgagctgctcggcgccctccagcgcgtcgacgccgcggcggatccggagcgctcggcgagcctgcagcgccggctcatggcggtcgaggaggaccgcagggccatccggggggaatgaactacggcccctgagcgaggcgaagccgagtcgaactgcggcgatcggccggtaggctgaccctcggattcgcaaccggagggagcgcgcgtgacgcaggagatccccgccgtcgtcgcgagcgacctcacgctgcgctaccactcgccgacccaggtcacccgcggcatcgccgtcgacggggcggacgtcgagatcccgatgggctcgatcctcgcggtcgtgggggagaccggttccggcaagtcgacgctcgctcgcgccgtcgcactccaggcggacctgcgcgacgaccgcgcgccgtcgatcaccggcggcagcctgcgcgtgctggggcaggaggtgcgcggcatctccgcgcggcagcggcagaggctcgccgtccgcgtcggctacctgcgccaggaggccggccagcacctcgcgccgcggctcacggtcgaggagaacatcatcgagccgatcctctcgatcgaccggcgcttcgaccgcacccaggccgggatcgcggcggccaccctgctcgacgaggtgcggctgccgctgcggctgctcgacgcgcttccccacgagctgagcaagggccagcgccagcgcgtcgcgatcgcccggtcgctcgtgctcgagccccagctgctcgtcgccgacgaccccaccgccggcatcgacgtgaccgtgcgctcgcagatcctcgacgtcatcgcggagatccagcaggagcgctccttcgccgcgctcatcgtcacggccgacctcggcgaggtgcgccgcatcgcctcacgcgtcgcggtcatgatgcggggtcgcatcgtcggcctcggcgagctcgacgaggtgatcgagaacccgttccacccctacgtgcgccggctcgcggagtcgctccaggcggcgtccgtcgtgcccgcgacacggaccggcacgccgttcgggtgacggtcggagcgcctcgcggagtttgctagagtagtcgagcttcatgcgatcctcggtagctcaattggcagagcaatcggctgttaaccgataggttcgtggttcgagtccacgccggggagccagactgacgccctgttccgggtgcgcttcgacccttcgacttgctgcgctcgctcaggacaccgttcggctccgcctcgctcagcgaccgagtggcgggtcgtcgtagggtgagccctccggagtgtcgcgacccggcagccaggacagccccgggctgccccaggactgcttgcggatcgccttctgcgccgccttcgcgtgggggtgctcgagtcgatccgcatagagcacgccgtcgaggtggtcgtactcgtgctggaagatgcgggcgagccagccgtcggcgacgatctcgaagcgctcgccgtcgagcccgcgggcgcgcaggatcgcgccgggatggcgacgcagcgggtagcgctcgccggggatggagaggcagccctcggagtcgtcgtcctcgtccggctcgccgggggccatcggcgcgagccacagctcggggtcgatcgcgacgccctcgtgcaccgcgtcgtcgccgtcggcccagttccagacgaacagccgcaggccgacgcccacctgcggcgccgcgagtcccaccccgggtgccgcgtgcatcgtctcgaccatgtcggcgacgagccgccggatcccgtcgtcgatctccccgacgggctcggcaggacggtgcagcacgggctcgcccgtgatcacgatgggtcggatggccatccctccacgctagcggccccggcggttcgggccgttcgtcggggccgtcgccggtagattcctagggtgagtcccgacctcaacgatctcgccgagcagctcacgctgagctcgcacgcggcgatcggcatcccgctcgcgctgctcggcgcggtcgcgctctcggtcggcacgcagttccagcaccgcggcgtcgcgaaggtcgaggcgctgcgcggggccacgggatctgggatgtcgatgggctcgatctgggcgctgctgcgccggccgtcctgggtcgtcggcacgctcacgctggggctcgcgatcgtgctgcagctgatgagcctctggttcgccccgctcatcgtggtccagccgctcggcgccgtcgcgctcgtgatcaccgcgatcctcaactcgaagctctcgaagacgccgctggaccgcccgacgatccgcgcgatcctgctctgcgtcggcggggtgggcgccttcgtcctcgtcgccgccttcttcgcccagacgcatccggtcaaggagcagcagctgacgatcgtgctcgtcgtgctcgcctgcgtcctggtggtctggggcgtgctcttcgcggtgttccggcaccgggccagcccgatgttctacatcatcggcgccggcatgctctacggcttcgtcgcgaccatcgcgaaggtcgtgatggggcgcatccagaccctgctcgcctcggagttccagctcggctccgcggagtggctcacgatcggctgcctcctcgggctcgtcgcggcggcgctgctcgggatgtacttcgtgcagtccgcccacgccaacggcccgccggacctcgtcgtggccgggctcaccgtcgtcgacccgatcgtcgcggtcgtgatcggcgtcaccgtgctcggcgaggcgtccggcgcgccgtggtgggcgatcctcctcttcgcggtgacgggggcagtggcggtgttcggcgtcttccagctcgccaagcaccatccgcacatgcaggacgagcccgtcgcgaaggtcgccgacgcgatcgaggatcgcctggagcacgtgatcgaggatcgcccggaaggttgacgggttcccgagcgaccctggggtagcgtggtccggtgcctccccgatcgccccaccacggcaagccgaggctccggatcctcatcacgaacgacaccttcgctcccgaggtgaacggcaacgccaccttcacggtgaccctcgccgccggcatggccgagcgcggtcacgacgtgcacgtcgcggtgccctcgttcaccaaccgcgagctcggcgcgcggcaggagacgcacctcggccagcggctgacggtgcaccgcatctactcctggcgctggtacccgcatccgtggttccgctacgcgctgccgtggcggatgcgggcgaacgcggcgcgcatcctcgacgaggtgaagccggacgtgatccagttcaactcgcagatcaacacggggcgcgggttcacgatcgagggccagaagcgcggcatccgcatcatcgggacgaaccacatcatgcccgagaacatcacggactacctctggatgatcccgccgttcctgatggacctcgcggtcgggaccctgtggagggccgccgagcgggtgttcgtccgcgcgtcgcggatgacgacgcccacgcgcaaggcggccgagtacctcgaggcgcatacctcgatcgacgacgtgctcgccatctcctgcggcctccacgtcgaccggtaccgcccctcgctcgagccgaaggagggcaacggcatcgtcttcctcggccggctcgtcgaggagaagaagatcgacgtgctcatccgggcgttcgcgaagctcgacccggcgctcggggcgaccctgacgatcatcggcgagggcgatcgcgccgcctcgctcaagcacctcgcggagcgtctcggcgtcgccgaccgcatccgcttcgccggcttcgtcggcgacgaggagaagcgcgagatcctcggcgcgggcacggtgttcgcgatgccctcgatcgccgagttgcagtcgatctcgacgatggaggcgatggcctcgggcctgcccgtcgtcgcggccgacgcgatggcgctgccgcacctcgtgcacgacggcgagaacggctacctctatccgcccgaggacgccgacgcgatggccgaccgcctcgagcgggtgctgcggatgccgcgcgaggagtacctcgcgatgcagcgcgagagcctctccatcgtcggcggccacgacatcgagcgcaccctcgacgtcttcgagacgctcttccgtggcgaagaggtcgacgaggcgatggtggtgcgcccgcgcgcggtcgagcgctgacggggcccgccctcggcggccgctatcgtggagcggtacggggcggtagctcagttagttagagcagcggactcataatccgtcggtcacgggttcaagtcccgtccgccctacggtgtgatgtgctacttcgcctgatgggtgccattcggcgctcggttgatgggtgactcgcgtcggactagactgctctctgaacgggattcccaataagcggttagccattcggttgtagccgtgatctctcgccctcccccttttcgggggagggcttcccgttttctggaccttcttcgagctgtccggtagacaagtgctcatggggttagttgaggggaatcgtctgctcgtcggcgtcgacgtaggagagaactcggttggactgattgcgctcgagtgcgatacggaactcatccctcagcgggttctccgcgctctggtcgtgctccatgacagcggccgtgatggtatggcctcagggaactccgggagcaagagtcgcaagagatcggggggcgaggcgaggcgagttcgacggctgctgaggaatcggagacgccggacgatcctcctcgaggagcaactggccgcgcggggatatcccgttggccctcgcgatgcacggggcacctacgaaccgtgggatgcgcggctcgacctgcttgacgggttcatcgaagacgatgacgagcgtcgtcgtcttctggcgatcgccatccggcacatgtcgaatcaccgaggctgggcgaatgcgtgggttgatttcgagacctatctccgcaaagaggagatccagtcctccgaggagttccggatcgctgtcgacgcagtcgttgccgccgatgcattcggagagctgtcgacctcggacctcctgtatcaagcggaccttgcggcgacgggactgaacacgcagtcgcggttgcgcccgcgcaatcccacccggccgggagcgaatgcggtaaccgtcgctcacgtcctgggaagtcagcggcgcgtggatgtcgcgcgcgaatggcaacggatctgccgggttcaagaggtacctcatgaggactacctcgccctggcgcggatcgcgttcaggcaggagagaccgaaggtgccagtcgagaaggtcgggttcgattggcttccggagcaccgacatctgaggcgcgcgacgatcgcttcgctggagcaccaggagtatcaggtgcggcagacggtggcgaatctcgcggttcgcactgatcggctggaccggcatccgcgtccattgactgttgatgagcagacactcatcgtcgatcaccttctcggagtgaccaagaaggacgaagctccgagttggcggcacatcgccgaggagtttctcggcatcagtcccgtccggctggtccactccgaaccggatcagtcgctcggaggagcagctccgattctgcgatcgaccgcagcgatccactcgctgaagagcacgcatccagtccggcagtggtggatccaggctcctggtgcgttgcgcagcgacttcatcctctggctcgcggacccggcgaagatcgagatccccgaggagtcggtcgcagagttcacgacgctcttcgagtcctttgccgatgatgagaaactcaacgatgaggtgctgaagctccggtttccctccgggcgatccgcgcattcgctcgaagcgttgcgcttgatgaacgcggagatggcgaagacgggtgagcggtacgtgcccctgcgcaaccgtctcttcaacgggggacacgatctacggccgatggatctgcagacgctcgattctgaagccgaccatccgacgcttcagcggattcttccgatcgttcgacgcttcctgctcggcatcgagcgacagtatggcgcccccgagcgtgtggtgatcgagcacgttcgaggcgcctttctcggattcgaggcgaagcttgaggcggcacgtgacatggggcggaatcgcgcgtcccgccaacgcgtccaacaggatgtggtcgacgcggggctggccaccaacgccgccgacgtttctgacggcgtcgtcaagaaattccaggcaattcgacggcaaggctcggcgtgtctctactgcggctggtcggcaccgggtttcggaggatggggcatcttcgagctcgaccacgtcgttccgcgggattcgggcggcaactccacgcgggcgaacctcgtggccgtttgccgcgactgcaacgctgcaaaggggaagcagaccttcgcgacgttcgccggctcggggagaaggcccggtgtctcggtggaaggagccatcgaacgggccaagagcatcaacgatccggacgtccacggcaaggctgcgttccgactacgcggtgaactgattcgcaggctgaagcagacggaagaggatgatccagtcgacgagcgcgccctcgcctccacggcctatgctgctgtcgacctggtccgtcgggtcaatacccactatcacgacgatcctgcggcgggacgaaccaaggtctactcggggcgcatcatctcgatggcccggcatgcgtccggtatcgacaagagagtccctgtccgcgtcggcgttgatgtgaaaagccgtttcgatcgacgtcaccatgccatcgatgctgcggttgctgcgttgctcaacccctcggtcgcgcggaccctcgcagagcgcgatgacctccgccgagccgcgctcaccgaggcgcaggctaccgggcaggaggtagatcagggctggaagatctatgaggggtcgactccggcggcgtgcgagcggtttcaaacttggaaaagcgccatgcaacggctggcggatctgctcgagcaagagatcgagcgggaccagatcgtcgtagcgcagccggtgcgattctctgccgatcatgcggcgctgcacgaagatgggcgccttccgcacgcgctgaaggcgctcggatccccatggaccagcgacgagcgtgctcggatcgtcgacgatcgcgtctattcggcggtttcacagggggtcaggccgagtgcagacctgcaaagtgatcccgagcgtgtgctgattctccccagtggtaggcagctagcggctgaggatccggtcttcatctttcctgacacagcggctcgcatcgcgcttcccaaccaatcctccgcaaaactcggacaatcgatgcaccacgcgcggctctatcgttgggacgatgcgaagggccggcgccaggccggagtcgttcgggtgtgggcttccgatctatacgatctggttggaggtatccgcgttgacctgctttccgcggagctaccggagagttcgcgtgccgtaagacgagcgcatccgaagctgagagatgcgatctggtccggtgctgctgagcatgtcggaacgttcgtcgtcggcgacgaggtgctgatcgaaccggcggagtggatggggaacaacgaaccgggtcgttttctcgacgagtggccggaaaagcactggaggctcgcgagcctcatgtcggattcacagttccggatgaccacgatctacctggcgcaggaagggattgcccctcgcgaggacggcgcttcggaagatcgtcgccttgtcgcggtctcgcccgtggcgcgcaaagtgcttgagagctatctgacgatcacctcctcgactctttggaacacgccatcgacccagatcctgcgacgaactgctctcggctcgatccgtactgatcctcgttccgggatgccgtcgtcgtggacgccctatcaggcggtgtacggggactgatcatgcgcgcccgacaagtgatcgatgcaacccgcatggaggggtcgatcacggcagttcgtggcggaatcgagatccaggggcggcgtgtgccgctcgaggtggttgcggtgctcctgctgggcaacaaggcgaccatcacgggtggggcgctctcgatgctgtcccgatatgacgtcgtggtcctcaattgtgattggcgcgggatcccggactttgttgcgtactcctggatcgacaattcacgagtcgctgcacgtcaccgaatgcaggccgagctgagtcagccgaaacgcaagagtgcgtggcagtcgattgtgaaagcgaagatcactggccaacgaaggaacctcgagttcctcgaacttccagggtctccgcgactcaaggtgctgactaaggaggttcgttcgggcgatccctcgaactgcgaggcgcaggctgcccgggtctactgggaggcgctgttcgggaacgaggagtatttcaagcgggtcccaggtgcccaatcctccnnggtcccaggtgcccacgatcgggtgaattcgctgctcaactacggctacacggtcatgcgtggatttgtgattcaggcgatctgcgttgccgggctttggccgacctatgggatttggcatcggaaccgaagcaactcattcgctcttgccgatgatctgattgaaccgttccgtcccgcggtcgatctttgtgtgcgaaacatgagcgcggacctcacgctcgccgttcgcgaggtgaagaaggctctggttggcgtaacctcgggaccgatggacagttccggtgcgactgttgcgacacggatctacgaactcgccgcttcactcgctctgtacatcgagggggagaaggagtcgttggctccacccgcgtggcgcccgacgatggaccaggaccgtgtgacgaatggctgattcggtgtggcttctcgtgatgttcgatcttcctgttctcgaaccagagcagcggagagaagcaaatcgctatcggaagctccttctggatcgagggttctctcgagctcagctgtcggtgtactgccgctacatgatcaacgccacggcagcgcttccgattctcagcttcctgaaggcgacagttccggacgaagggtatgtgcggatcctccagctatccgacaggcagtgggcgggtggctggcacctctacggagccaactacctacccgtggaagagcctcccgagcagctcctactcttctgaacaagccactttttggactgtcacatcggccnngatgctcgagtctagttgggagagaagaacgggattcccaaccccgtctacagcgaggtaccgagcgacccgagtctagttgggagagaagaacgggattcccaaccgagatgctgccgcctgcatctgccgcgcgagtctagttgggagagaagaacgggattcccaactcgcgaagatccgtgcgatcgtgcgccgcgagtctagttgggagagaagaacgggattcccaacttcgtctggatcgatcgggccgacatcgcgagtctagttgggagagaagaacgggattcccaacgagccgtggacgagttgttctcgtctaccgagtctagttgggagagaagaacgggattcccaacgccggtccatcttctcgaacgcgcgatccgagtctagttgggagagaagaacgggattcccaacgtcgctgcgacctccagcagtgatccggcgagtctagttgggagagaagaacgggattcccaacgcagcgtagtcctgttgaaggtgagcgccgagtctagttgggagagaagaacgggattcccaactaggttgcgcgttcgagtcgcgccggggcgagtctagttgggagagaagaacgggattcccaacgatcgaccacagcaccgacagcggccagcgagtctagttgggagagaagaacgggattcccaaccccgaacctgctcatcagttggcgtgtacgagtctagttgggagagaagaacgggattcccaacgggccagcggccgcccgtctcgcggccgcgagtctagttgggagagaagaacgggattcccaactgggcggcgcactcccgctcggcggcgacgagtctagttgggagagaagaacgggattcccaacgccgccgcgtcgaccaggtcacgctcgtcgagtctagttgggagagaagaacgggattcccaactcttccagcggccatccgactgcgaggacgagtctagttgggagagaagaacgggattcccaacgcatgggcgattcgccattcgacacctccgagtctagttgggagagaagaacgggattcccaaccggtcatcgcccggacccattcactgtgcgagtctagttgggagagaagaacgggattcccaactgccgccttggcctgatctccaccaagccgagtctagttgggagagaagaacgggattcccaacaggctgctgtgcaccgcattcagggctccgagtctagttgggagagaagaacgggattcccaaccgatcagccggcccccgcgccggcaccccgagtctagttgggagagaagaacgggattcccaacgtcaccgaagttccaatcgcggacgccgcgagtctagttgggagagaagaacgggattcccaacactactggaagctgtcgctcggggcggccgagtctagttgggagagaagaacgggattcccaacgtggtcacgaccgacccccgagtgctcacgagtctagttgggagagaagaacgggattcccaacagagtcggtctgttgcggtctgaaacgccgagtctagttgggagagaagaacgggattcccaacacggcgaggtcggccagcacgggcaccacgagtctagttgggagagaagaacgggattcccaacgccgtcgcggccttgcgccgtatcccgccgagtctagttgggagagaagaacgggattcccaacctgccg

SEQ ID NO: 4457 - DNA, 18857 bp, synthetic construct
  misc_feature 1..18857: note = Synthetic
  source 1..18857: mol_type = other DNA
ggcgccagctccttgtgcgcccattctgtcaggtcgggtgtttcggacgtataaatggtaatccgatactttcctttctcagcctcgaaggtttttccatactgcttcgtggcctgcgatgctacaaccaccggcgcgttaggcttgactacgtcgatttcgctgtagaacgtattgccgaacggatcggtcctttccgtacgggaaatgtcaaacagcagatagtgatacttgccgattatgccgttggaatcgcggatgctgactccgtactgcccgccgcctggtctctctttcggtcgtgtatcaatcctcgctaccaatttccacccacacgccctcgggtcggttcccttctttggctgaggattaaaatcgtcggcttttccaccgctggcatagagattataaacctgtggcccgcgcgtgtttggatgccacgaatacgtgttaatctgcttgatatcgattgtgccccgcaggtcaacaagaagccggcccccttcggtgccggcgttaaagaaaaaattctcagatggctggtcttcctcggtgggaattttgccgtcgcacagtttatcgatggtgccgccgttgcggtccctcctgccgtccacgatggtaaacctaacttttgtggccgcgtcgcttttggacggggagggaacgttcttgaacttgaaatcgggcgtagcgtattcgttacggttatggtaggcaaaggttttgggctcggcctgcgaagctattgcgaatatcaggacaattaaagctccgatgaaaaatattatgcgagatttcatacaatcctccatttattttatctgcgatttcccatataaccttgtataaccttcttcgtctacgctcccgagcctctttactaacatactaccaaatctgtcctgataactcaaggtttccggctgcaacattatgacatttgccctgccatcctgaagtttactcaaagccgcctcagaaaaaccgtcactccttgttcattacctcaacaacataaatcatcgtaggttctcgcggattttccggcttgcggtcacggttgggtgggtctgtttcctgctgcatataatgtatagagcctcgcggcaacagcccctgattgacagctcggatatgtggtatagccgaatgagtagcttgagctttctgaataggatattggccgggcctcatactaagcaactgttctcttgtgagaatcaactgtccctttttgggcttggcatagatattgccgtacgtaactaagattttttgtcccgttgtgaccgagagtctggggacagggggatattgtggaatcgttccccggccatgaaaataaaaacggtgtttccagtcggtcagttgaatgattttccatttcgcaccgaccggcgtagcaatataaatttgattatggccgttctcatcaaagcgtgtatagccaatatgcggtcgtcctttgttatcgaccaccagcgttccaccatttatcaacccgcttttctgctcgatgtcctcgactacgtatgcgttttcaggtgtgataggcagttccgaatcacgtccatcccagcctttccaggttcgtccacggtcgaggcttttggcataacaaatatcaaaattcgttatgacatccggcgtttcccgccagcaccacgcaatatgccacgcacctttcttgtcctctaaaatgcctgacttgggtattttgcccgccgagtcttctgccacgacaccaaaaggataggcgttacaggttggattccggtcacggccattcgtcagagccggtacggcctttgtccattgctggctctcttcgtcgtaatggactaaaattcgcatcccgtttccactgccgccgtgccggtacaagatgtagattgagccgtcgcccagtttcaacacgcttggatatgtaactctgttttcataatcaccgctccacttgtgaatggcttcgaatgtgtgtatgttcgcgccggctcttgttcgataataccgcaaacctgcgcagtgcatattgcctgtaatgtgaagatggccttttctgtcctgaaacagtataacccggttatgtgtgtcccatccaacccgttccggcagtttagcgaactcccattctgtttcacccagtttccgctttcccacggtcatctggtggtcgccgtcatagaaagcgatatactggtatttgccgtccgaaatcaaacatcgaccgccgttcaccggatgtgaggccaaaccttttgctaccggaattttgcgtatctccatctcctcggcgacaggaaccgccgaacaaccggacagcatacaacaggatataagaacagataccaaacgtcgaataaacacgatgctcactccttcagactattatttccatatcaactatgctcagccagcaggttttcgcctcgtttgtgtctaatatatcaaattattgttgccaattatagcaatttactgcgcttttaggctatcgccaacaggtttgttaatatgttttgtttctcctcttacaattcggcgggaggcgaccaggttcaatgcatcagttggtaggcataatacgtgctgacaccggcaggcccatagttcgcggacttttgtggctgaacgtaaccagccgttcccatactgcgggcatcctcgtgttgatgctcacgcgaactgcctctgagagattggtgctgctcataggcacacgtttgacgtactcggctgcaaagtggccgggaacacggccgtacttatattcgtaggtgaatccaccgctaaccgtcagctttacaccggccggggatgtgttaggcaccgaaatgtagaactcatccgtggtcaggatagattcaccggtcttgttgatgagcagtcctgcagcggcgaggctttcataaagctgggtggcagtaagttcggcagggtcgatgaagcaaagctgtgcggaaatcagattcttgtagggctcgtcgccatccggtttgcggaaattacgcagccgtccaaacgatgtcgcgatgcggtccatctggtaaggaaagtgtgtgcagcctaatattacggtgctgattggctccgagctgccgctccggcggtaccgttccacaagggacgtcgtatgatagcggacgtaattctctacagaattaagacgccaggtaacaggagagtcgaggtctcctaaaaatcctttggtctcgaagccatattgggcaaacagcgcagggtcaatgctcgccgccttgttacccactgccggcccccggtagtcctcgcttgcagccgcttcgggcgatgtaatatatgatgggtcaccttcgatgacaccggcaagccccaggcatccttgctgaacaactactggcggcttgacgccggcttcatcggcggatttggcaatcgcgtgcacgtagccacggcttttgcaagtgccaaccgtggctaagacagcgacagccccccctttgtcctcatccgttatggccccaatagcaccgtccgcaccggcttcgacaacaccaaccacctggaccggcaggccccactgattcagtgcaccacgtatgtcttccagaccgtaggcagtagccgtgttgcaggcaatgacgatagctttgaccggcggcttatcatactgcggctgttccgcagtagcacaaagccagtaactctcaccgagcagaaacacgacatccttgatgattagctcgcgcaggaaatcaaccttctcctcggatgggtaattaccgtagggcatgtttgcctgatcgcccaagtacacgaaccgctcgtgctcgaagtcggctcggccgtccggcccagcctcgccagtaacgttgttaaaggcatcgagttccaatatagctgccagcactgtcagcccgccaataccggagtcaaataccccaatgggaagccccttcgtctcgacctcccagcggtcaaccggcacggtaaagacctttgactcaccccgtttcactaattccacgaggcaaggtgcattttgcttgatgtcctgttcgcttcgcttcgtgcacgtcgtcagcaatatcgaaccaaacactaatacaagcaatatggatatgttcttttttatggccgttcctttctcatcactttggcaaatgttttagctgccacgcaggtattatgacctgcctgtccggcattgttaaatataccgcacttttcagggagtgggaaagcaatagtttcgcgggaacggggaacgccgatttcccgggcaatactgccatcagctttcaatataaaacgtatcagaagccatcaaaacgccgacgccttattgattattgtaggtttaagtctcaaagttcacactcgcaaatcggacgtgatatggaattgccggcttggccgcggcgatggccggaaggggtaacattcttgtcttaggaagcagtcagatgttgatacaggagttgaaaataattgaggaatgtttcaggaaatcattttttcacacgactctttttccttctcacgatgctttttccaattttctgtttttccgactacgcagggactgattggtttatattctccaaaatagtcttcgtttagtattctggctgtttcggaagccgatatatccgggcgtgaagacctcaagagctcaccgacttgctgattaagtacaccttcaggacgcttctctgctgcttctgcctgcttttgggccgctaaatattctcttgtcagttccgctatatgtcgaaggctttctacggttgggaccgctattgtatcgaaaaaattgacacaccaatacccaaggtcatgattatcctctaccctgttcttgtccctttgaatttgtcgcataaattcgctgcagtgcaggaaatcgttccgtattaccttcagcggttcggcaatatcagggatatacaagcggaacgtatctacgatatcgccaaactgctttttgtgtaccgtgtccctgaacaattccataatgagaaaatctgagaaccagcgtgaaatccactttttgcggaaagctgtcgttgtgtccttaaatctgtccctttgttgcccaatccactcgtccatagcattggcaatctgctccaatgattcggctgcacgccttaattcattatcacgtttttctttgggattttctctatcttctacaattttgcgcgagaaaatccttcgaattgccaaaaggatgatagcaattgcccctgcgccggtaatactcagcataataataagcagtgtctgactcataacgctgtgtccgactcacaatctcctacctaaagtctaagaaatgcaccgaagaatgcaaaggcacctcggtatcaaatttgttaagaccgataaagagctcctcctgtttctcaatttattgtgttttgtacaccttccctcgacttcgctcgggatggtgagggcttcgactgagcaccgccgaatgtccctgtcgaaccatttcatggccaaataatccgttgttccttgcctgcttttcaagaatgtcccgagctcaatcgaggcgtaggtcctgttatcttgtcctaatcaatgacttgcgtcttgagtcttgcttcttgagtctgttcctaatccgcgtctaaaaaacagacctacttcaaagcgggcggcaaatatcaatattgacatttcttcaaacggctgttctaatgctcgcactatgaatcgtaaagtcggcaaatcgcgagcctcgagattcaaaaatatctccataatcggcgatggtgcgatggccaccgtgatggccttgctgctctgcgaaaagaacatcagcgtgcggatgtggggctatgaccgccggcagttgaagcagatagaatcagccggcgaaaacaccaaatttctgcccggctacaaactgcccgtagccctcgtatttgagccggatgatgagcgcattatggccggtgccgacctggttgtctccgctgtgccctgtcagtttgtacgccgggttttcaagcgattaaaagactatgtccccgagggcgttcccatcgtctcgaccgccaagggcattgagaacgatacactgctgcgtccgactcagatactcgccgacgtgctggcggaaaaactcaaaactgccgtcctctccggccctaccattgccgatgaattggccaggcagcttcccgccaccgcctgcgccgccgcagccgatgagcggttggccaaagacatccaatgcaccttcaattgctcttggctccgcgtttatacaaataccgacgttgtcggcgtcgagctcgctgccgcctgcaagaacaccattgctatcgccgccggtatcatagatggcacaggggccggcgataacgcaaaggcggcccttttgtgccgcggactggcagagattactcgcctcggcctcgcctgcggcgcaaggccgcagacatttgcaggattaacaggcctcggcgacttggttacaacctgcatctcgcccaagggaagaaaccgctcgttcggcgaaaggataggcaaaggccggaccgtagaggcggcccagcgggctactgaatcggtgattgagggcatcgcaacctgcaaatccgtaattgctcttgccgagcgtttgcatgtagagatgccgattacgcaggccgtgtatgaggtgttgttcgaggataagcccgtccggaccgcaatcgccgacctaatgactcgccgcctcaaagccgaatagcacgcatatttcatactcactctgatgaccaaataaaaaaggctgcaagcgcaacgcccacagccctttgtataaagacttcaccgatgtccagaactaacgctggtcgtgcgggaccgtaaccgttgcgctgctttcagtagcatttccgcagtcatcaactgccctgtacgttatagtgtaaaccctgtcgttgcctttcccactgcgttcagcccttagatatatagagccatcatcgcctatttgaatatcatcggttgtatgcccgctgcctgttgcttcgtcgtattcgttcatcgtgatgcttaccagcgaaacctccggcgagtcatcgcagatatcactcaccgtccaggtgggggtaatcagaaccatcttatgatttgccggccagagcaccgtcgggctgaccgacaatgaaaattcaggtggcgtagtatccacgaccgttatcgtctgcacacagcttgaactgtttccgcactcatcggtggccgtccatgtacgcgtcagtgtccctgtattgccacagcccgcctgccactggtcactgtgagtaaccgtaacggttccgcagacatcgccggccgttgccgaaccattcgcctcaacactaatatctgccggacattcaagcgtcacatttgcaggacaggtgataaccggcagcgttgtgtccacgatggtgaacgttgccgagggtgtggtggccgtgttgccggactcatcctcggcggtccaggttaccgttgctgagcctgtcgcaccgcattcgttcaggatgcccacaaagtcgttcgtaatcgtaacgtctccgcacttatcgacagcggttacaccggccagccaggcattgagttcagctacattgtagttcccatcgcactcaacggttaaatcctgcggaatgttcgtgaataccggcggggtcgtgtcctggacaatgacggtcagctcgtcgatatcagatgccccagccttatcgaccacttcgaggataataatgtgttcaccgaatgggaggttgcagtctataatctcgccgctcccaaggaaatcttcgatgtcagggtcgcaaggatcgactttgtaccaatcgaaatcatttatatcgttatttaaggggggaatagaatcggcatcgcttgagccggagccgtcgagggtaacagtcgctccccagggagcttgtgcctcaaaagtctggtccgggccggcatcggccactggaatatgattaaactcataaggtcccatatcaatacggccgccaattacgcgaggtttgccatccatatctgttgtcggaagcccccctggcggagtatttgtcccagcgtcaatacacggcgaatcaggaagcaaatgataattgccttctacccagaagggaccgcccgggtgaccagggggcggaacaacccagtatcccagccgaacgaaacgcgggtcggcatttatgttgcctatgccgggccagccgccctgaacatcgctgtagctgacagttgccgaactcgtcccatagttgtgtatctgtggcccagttggcgcggcattgccccacaggatgcagttggccaacgtcgggctgctgtagtagttgaacgtcccgccgccgtcccagccagctgagttgccgctaaacgtgcagttggttaccgtcgggctgctgttgttgtcgttgctcatcccgccgcctctgttcgccgtgttcccgctgaacgtgcagttggtcaccgtcgggctgctgtggtcaaagttggacatcccgccgccataggtcactgccgagttgcctgtaaacgtgcagttggtcaccgtcgggctgctgttctcccagttgcacatcccgccgccggtttcggccgagttgccgctgaatatgcagttggttagcgtcgggctgctttgccagttgtccatcccgccgccagtgtcagccttgttaccagtgataatgcagttggtcagcgtcgggctgctcccccggttatatatcccaccgccgtcatatctggccgagttttcgctgaacgtgcagttggtcagagtcgggctgccagtataattatacatcccgccgccgttcgcatatggagaaggataatcttgattcgcattacctgcagtaattgtgaagccgtccagcactgctgtagcgtccgtcccgctgccggtaactacgtgcaagctgttctctccgttattggtaaagcccacgtcgtctccgttgaggtctccgctcagaatggtctcatacacctcgacatcccgtgcatcggggtccggctcaccagacccggcatagccgcccttaacagccacgccatttttgagccggaacgtcgccgttcgcgagccggtcccattcggatgggcactgtcctcatccggcttgtaaatgccatgagctacccggatttcgtcaccggagatggccgcagtcagcgcatcttgcagatacctgtaaggcgtcgcccaggtctggccgttaccgccgacagaggcatcatcatccacatagatgacggctcccgcagccgtacacgccattgccatcaaaaatactgccattaacagggacgttctcagatttgttgttccaaccattttttgtcctcctgaaaaaatgtgtcaatttttgcgacttgcgcatcgtaaagtttcgctggttttatggcaatccgagagggagtgctaaaagaaccgcattttagccatcctccgcccggatagcctaaaatatatcagtgtttgtactataccggccttttgtctcatttgcaagaaaaaaatgtttttttagcctcccttatgccgcattttctgccccaaatcacccaaaatccaaatccagtcaacataagaagttccggctcaataattctctcttatgctcttatgcacttatgctcttatgcacttttttacccttgccttttccatccctccatgctaatattatcataaatctgcctatgaaaaacgacatctggagaaacagcaaaatggcggaaattcttatgtttacggaaattgtgtaatggattttgcgtttgagataaaaaaagccgtagatactgttttcagtgctacggctggtctcgcccgaaggcgtaggtgcctgcgaatctttcatcttgttgtgaaaaacacacaagcacggatcagttacaactaacaatagagtatttaaaacaaaaagagcagtcaagagaaattttgcaaattttttaatatttttatgggagaaaaaatatgaaactccttggacttgatattggttcaaattcggtcggttcagcatggattgatacagaagcagaatccataaaaatgggagtgagtgttttcccggcaggcgttgaagaacaaacagacaaaagaggtgcgccaaaaaatcaagcccgccgctcacaaagacaacaaagacgctcaatcgaaagacgagcaaaacttaaaagacgacttcgccaatatctcataaaaaagagctggataccaacagagagaaacaaacttaaagtatgtcaaaatctcaatccgtggattttaagaaaagatgctctacatagagaattaaatgaactcgaattcggcagaatcctgctgcatctggcacaaagacgtggagcatggtggtttgatgaagaaccagaggaaccagaggaaagaaagaaaaagaaaaaagacccggcagagacacccggaactgttgaatacactaaaagaataatggaggataaaaaagccaaaacattcggtgagctcatagcaatagaatatgaaaaaagaaaaacagcaaccggaaacaaagataaaaaaagaaacgacagaattagaaacagaaatgatgcttttggtgacaaagtatcagagtttgtagctgataggcatatgatacttgtggaatttcgtaaaatatgggaaacgcaaaatagtttcggaggacaacttgcgaagcaattaacagatgattgcaaaaaagagatttataatcccaagaaaacggagacgtggaggtgtcaaggagtattatttagccaaaggaaagcatactggaatctgggaacacttggaagatgtgatttagagccgacggacatgaaatgtccgaaggcagatatgtatgcgcaggagtttttggttttgacgagtgttaataatatacgtatcactccgccaacagaagcaagcagaaagttaacagaagaagaaagagaaaaagtcgtaagtgcagtaagaaaacaaaaaactgcaaccgaaagtacaataagaaaagcgctcggcatagacaaaggcaaaaataaaacactctacacgctgaacactgaaggtgataaatttacagtaaatggtgattggttttattctcaaatagtctgcaacgttttcggtgaagatacatggctctctttcgatgatggcaaaaaagactctgtgaacagagcaattctaaagtttgacccaaaagatgaagctaacgaaaacaaattaaagacaggctgtaaggagtggtggaaacttgatgacaaacaaactgaaagctttttatacgcctggaaaaagagacccatgaaagaaagcagggtaaatctttcaagaaaagcaattaaaaatctattaccttacttaagagaaggctggagtgtaacagaggcaagggatatgtatgccgaagacgcatcgaatgatgcgaacgacttgacaaggagaagatattcaaccagagaaattgtaatcaataagcaaatcaggcattttcaggataaacatcctaatcttttgcctccggtaacagaagggatctcaaatccggttgttagaaaaagtattcatgaggttaaaaagcatttgatggaatacatcagacaattcggtaatccgccggatagagtggtaatagaacttgccagggaagcgaggcaatctgaaaaggttatatcaaaaaggatacagaaaaacaaagctattaatgctcttaaaaaagagataagtgaaacacataatctgaatgaccctggtacaacaagcacacaaagagaaagggcaattcaacgtgttagattatgcaggcagcaaagagaaaattgtgcttattcggacgcaactataacagatgtgatggctgtcgatggaagcggacttgaggttgatcacatcgtgccaagaagtaaaggcggcaataacgggatgaataatttggttttatgttatgccacagctaatcagggaaaaggcaatagaacaccaattgactggttaagcaaagaagatttcagacaattagaactaagattcaaacacttagaaggcagcaaaaaagacaaatctactataacgaaggataatgttgatatgttggataatgcgaaatggaaaaatcttcaccgaaaaacacccaaagaaggttttacagaagaacagctttgctcaactgcttatgcggcaacacagacaactgattggataaacaaagttttgtatggcagtagagacagaagtaaaagatatgtttttgcttcaagtggtgcttataccggcatacttagaagagactggggattattttttggtgaagacggcgaacgtagtgaaaaaggaaggaaaataagaggcgaccacagacatcatgccgtagatgcggcgatcatagcgatgtcaacgccgcagcatttgcaagaaatcaaaaagtcgtttattgattttgaaaaacagaatgaaaataagaatgtgaaaccacggtggaatactgtagaggagccgtgggaaggattcagtgaacagattgccgatgaatacaaaaagctaaaggtctcacatcgggcttacaataaacaaattgccggttacctgcacaaagatacaatttatggtcccgctgtagtttatgaaaaggatgaaaaaggcgatgtaaaaatagaccaagatgggaatcctaaactaaaaaaaggtttatatattaaaagcatttcaacaataggaataaaacaaaatcacttgcgtatgcctaacggttgggacaaattaaaagaaaaatacaaaaatgcaactacaaaatcagaaaaaaagactataagaaaaagaatgctggcccttgaagatgtccctccgggaaaatccggtgttatcagagatatagagttaagggacaagatacgagattggctaaaagagcataatttttcagatatggcagaagcaaaaacatatattaaggaaaatagccttattatcaatgggacacccgttagaaaagtcagagttctttggaagttgaaagaagttaaagaaattccaagaaataaatttaactatgaaacgggcaaaatcgtgaaggacgataactataaatcattgcgtgtttaccagacacaaaataatcatcacatagaaatacgtgaaaagacagacaaaaaaggtgtagttaaatggtcgggcgaagttattacaaactttgatgctgcaagacgggtaagagcggaaaaaaaggccatcgttgacaggagtgaaaataacaacggaaagtttataatgtctcttgcaagaggtgagatggtgcatatgagacaccctgttacgaaagaaacaaattactttgttgtattcaaaatagacagcagtaaatcaattcactttacaccacacacagatgcaaatcctgcaagcagcaagaaagaaggtgtaaaacttcgtgaggatattcctttggtgccggatatgttacggcaaaatatgatattttatgaaaacggcatgccggaaaaagtgaaaatttcgccgattggtgaggtgaaggtattagagcgagattgaaatagcgaaagtggactctgtaaattgccgataattagtatcggtttggcaaaggcagcggagttcacttatgattaagcggataatagagatttcgcaggcaaggacgcatttatcaataaaatacggccaattgattatcaaggaggcaggcgaacaagtcgcaagcattccctgtgaagatatcggagttttgttagttgaccatagaggcacaacatatacacactgcgttttcaccgaacttttaggttgcggcgcagcagttgtgctgtgcggtgaaaaccatcacccatccggtatgcttttgcctcttgaaagtaacacactgcaaactgagcggtttcgctggcagatagaagcgaaagagcctgtcaagaaaagattgtggaaacaaatcgtacgcgcaaagattaaacatcaagccaaacttctcggaaaagacagcgatgtttacaggtcactaatgacattgagggacagggtgcgcagcggagacccggataatatcgaggcgcaggccagcaggaaattctggccggcatatttgcaggatttccaatttcgaagaaacgtaaacggcccaccgccgaataatatgctcaattatggttatatggttatgcgcgccgctgtagcacgtgcgttgtgctcggccggtctgctgccaagcttaggcattcatcatagaaaccgctataacgcattctgtctggctgacgatatattggagccgttcagaggttttgtcgaagcaaaggtaagggaaatctgcgagagtgaatcagtgccggatgtgcttgaccagcagattaaggcaggacttcttgaagtattgtatgagacggttgttataggcggattcaagggtcctttgatggttggcctgcatcggacaatggcttcacttcagagatgttttgcaggtgagcagaaagagctggatttaccaacaatatgattattagtggatacagggccgtgtggatttttgcgatgttcgatttgccgacagatacaaaaaaagcacggaaagattatactcatttcaggaaaaatctcttgaaagacggctttagtatgctacaatattcggtgtatgtcaggcattgtgcaagcgaggaaaacgccgatgtccattacaaaagaattaataattttttgcctcctgatggtgaagttcgcattatcaccatcaccgataagcaattcggccgtatgcagactttttgggggaaaatgcgaaaaccggcccctccacaaccaaaacagctcgaattattttaaaaatttcgcctgcaaacccttaaaaacaaaggccttgcaggcgaaccattgtaactgatccgtgcctgagtgcaagccacaacttgctggcagcgatgatgaatctatcatgcattgtaactgatccgtgcctgagtgcaagccacaactgttgtgttgcaactggcccaggaccagggattgtaactgatccgtgcctgagtgcaagccacaacatcggacagccttgcctacaaaagtttttgattgtaactgatccgtgcctgagtgcaagccacaacattcatcacttgcgggccaaacaagtcgaaattgtaactgatccgtgcctgagtgcaagccacaactgatgaagtgattgaagcctgtaaggaagaattgtaactgatccgtgcctgagtgcaagccacaaccacggctgaatggctttgtaggcaattccattgtaactgatccgtgcctgagtgcaagccacaaccgtggtagatttgctgccatacaggcgttaattgtaactgatccgtgcctgagtgcaagccacaacagccgcctgagaatcaaccagtccccacatattgtaactgatccgtgcctgagtgcaagccacaacatctatcgaatagtcatcagcctggtgaagattgtaactgatccgtgcctgagtgcaagccacaacgggccgaccatcgatggaaaatacgaaatcattgtaactgatccgtgcctgagtgcaagccacaacttgctgatagcctcgtcgcaggacgcaagaattgtaactgatccgtgcctgagtgcaagccacaacgcgtctccgccgagggcggctctatcagcaattgtaactgatccgtgcctgagtgcaagccacaacccggccgtccagggcacgccactgccggggattgtaactgatccgtgcctgagtgcaagccacaacgtctgccacctgtttgacaaacgaccggaattgtaactgatccgtgcctgagtgcaagccacaacctcactgagtgactcaatgccgtcaccgcgattgtaactgatccgtgcctgagtgcaagccacaacctatcaacctctctttgtgcttcaagttgtattgtaactgatccgtgcctgagtgcaagccacaacaccgtcagacagggcaataaccgcctgttaattgtaactgatccgtgcctgagtgcaagccacaacgggccgaccatcgatggaaaatacgaaataattgtaactgatccgtgcctgagtgcaagccacaacttgaccttagggtagaaaaacttcagtttaattgtaactgatccgtgcctgagtgcaagccacaaccgcccagggtgtgcttggcattgttctgcaattgtaactgatccgtgcctgagtgcaagccacaacgagtcgagtcaagggaagacggtgtcgcccattgtaactgatccgtgcctgagtgcaagccacaacacgatgcggcaacgctgaaacttattaccaattgtaactgatccgtgcctgagtgcaagccacaacgtcaccagtcagctcgtaaaaaagaacaatattgtaactgatccgtgcctgagtgcaagccacaacagctcggcggcctcggcctttgcgatttcgattgtaactgatccgtgcctgagtgcaagccacaacacaccgccggctggggtcatctccgggtcattgtaactgatccgtgcctgagtgcaagccacaacactatcatcgccgtgattgtctcacacaacattgtaactgatccgtgcctgagtgcaagccacaactgcctccattcaaggtcaataaatccaatgattgtaactgatccgtgcctgagtgcaagccacaactgcgtgccttgaaagggcctcgcatggcctattgtaactgatccgtgcctgagtgcaagccacaacaccgtggaattcggcctgacgccgactactattgtaactgatccgtgcctgagtgcaagccacaacttaccacagtaggttggaattgttttggtattgtaactgatccgtgcctgagtgcaagccacaacttttgtgtgcgggacaagagctttataaaaattgtaactgatccgtgcctgagtgcaagccacaacttaaaaacgtttctaaaacaatctccctcgattgtaactgatccgtgcctgagtgcaagccacaacacaccgccggctggggtcatctccgggtccattgtaactgatccgtgcctgagtgcaagccacaacctgatagcgagcaggtgcttgtcgaaataaattgtaactgatccgtgcctgagtgcaagccacaaccaatgtaccgcaaggagctgatcgacctggattgtaactgatccgtgcctgagtgcaagccacaacgcgatatcgtcactttatcacatgaccacattgtaactgatccgtgcctgagtgcaagccacaaccatcagtccccggcctccagccacttaaagattgtaactgatccgtgcctgagtgcaagccacaacatacttaccatacggtcaagatattgtccgattgtaactgatccgtgcctgagtgcaagccacaacgtcatcggccattcgcctccggcatctttcattgtaactgatccgtgcctgagtgcaagccacaactgactcgccgcgatgatgaatctatcatgcattgtaactgatccgtgcctgagtgcaagccacaacgagaaaacgtccttggttccggtacgactgattgtaactgatccgtgcctgagtgcaagccacaactacacaagctgtacattagattgaccaataattgtaactgatccgtgcctgagtgcaagccacaacgttccgaccaccgctggcttctttcgaccaattgtaactgatccgtgcctgagtgcaagccacaacggcacggccaagctacgtctctcatcacgaattgtaactgatccgtgcctgagtgcaagccacaactctggcatttttgcgggcaattttaaggtaattgtaactgatccgtgcctgagtgcaagccacaacagtatactataaatcctcaaagccgcggcaattgtaactgatccgtgcctgagtgcaagccacaacagactgattcatatcgacccctggaaaaaaattgtaactgatccgtgcctgagtgcaagccacaaccaagtatgatgacttcattgacaggttgggattgtaactgatccgtgcctgagtgcaagccacaacagtggacaacacacaaaccaaatcgtccaattgtaactgatccgtgcctgagtgcaagccacaacaaaagtggtgtagcccccgccacgcgaaaaattgtaactgatccgtgcctgagtgcaagccacaactgacagacgtccgcgctcgtgtcggtctccattgtaactgatccgtgcctgagtgcaagccacaaccgaaccaggtccgcacaaagtacagccaggattgtaactgatccgtgcctgagtgcaagccacaacgcatgccggcgtctatataccgcagcttttattgtaactgatccgtgcctgagtgcaagccacaacatgaaaaaatacgaaaggattatcgtatacattgtaactgatccgtgcctgagtgcaagccacaactgtgtcgggcattccatctgattctcagcattgtaactgatccgtgcctgagtgcaagccacaacgacggcgtccagctcaactactttacttgcattgtaactgatccgtgcctgagtgcaaaccacaactaccggccaataaaatatacccaaattttctaaatttatgtgcttataaagcactttttggtcatttttttgtcacttttgtgcattttggtagatatcctctctaaaatgaaaaaaattcttctctaacttcaccaatgctgacaacgtcagcaacttagacaaactccgcaaaccgaacgcacaagctcgcttggagtacggctgcgagtttgtataaacaaggccgtccacaccacg

SEQ ID NO: 4458 - DNA, 14833 bp, synthetic construct
  source 1..14833: mol_type = other DNA
  misc_feature 1..14833: note = Synthetic
caagatggtttttaaatgggctgtttcgcaagagctggttccaagctcggtatatcatgcacttataacagttgctggacttcgtaaaggccgcagcgaagcacatgaaacagatccgaccaaacctgttccacaggaacatattgatgcgactaaaccacatgtaagtcgtcatatctgggcaatcatacaattgcaacttcttacagcttcccggccaactgaaatattaacgttgcggccatgtgatattgaacgcagtggaagaatatgggtttactcccctgctgaccataaaaccgcacatcatggtcataatcgtaaaatatattttggccctaaagctcaggaaatcctagtaccgtttttattccgagatccgcaggcttattgtttcgctcctactgatgcacatgcagaaaggttgaccaagctccatcaaaaccgcaaaactccattatcgtgcggaaacgtgcctggggcacgtagaaaagatgagccaaaatggaaaaccggagattgttacaacgtggcagcatatcgcaaggccgtaacgcgagctattgagctggcattccccgcgccagaccatttacggcagcgggatgatgaaacgaaaaagcaatggcgtaaacggctgacgaaaaaggaaaaagccgaattaaaagcttggcacaaacagttccattggcatcctcatcaattgcggcataatgctgcgacatttttgcgtaaagagtttggcattgatactgccaggataatattggggcacaggtcggcggttattacggaggtatatgcggaaatggatcagcagaaagcgatggaggcagtggtcagagttggatagcttgttgattttcgaattaaagtattgatattgaatcgaacgtgaaaaaaaattacgcccattgctgacataaagggggtgcaatgtaataattgccgttataccgaaaaaactttaattttatggacaagatgggtagtttatggtagcatttatatattcgttatacagattaataatctttttacaggaggtaaaatttcgggtggaactaattaaaaaaaaagccgcagaaccgtgggttgcacgagctgcagcggtcgcctttcggcggtgcctgcgaatttttcttgttgtgaaaaaacgaggccgagattaattacactgatgccattataaaacaactaatgtaaacattgcaagagaaatttttgaattaggaggatttaatgaaattattaggattggacttagggacgaattcagtcggctcagcgtggatagataccgataaaaaaataataaaaatgggtgttggtgtatttccggcgggagttgaagaatcagaagataaaagaggcgctccaaaaaatcaggatagacgtaaaaaccgacagcaaagaaagtctatttgtagacggtctatgctgaaaagaaatcttcgccaatatttaatcaagaaaaagtggattccgacagaaaaaactgaactacaagagtggtataatctcaatccgtggattttgagaaaaaatgctatagaaaaagaattaactgagtatgaatttggcagggtattactccatttcgcacaaaaacgaggagcatggtggtttgatgaagaaccagaggaaactggagacacaaagaagaagaaaaaggatttgtcagaagtgccggggacagttgaatataccaaacgaaaaatgaaagaaaaagatgctgaaactttcggtaaacttattgccatagaatacgaagcaagaaaaacagatacagcaaataataaaaaaaggaacaacagagtaaaaaacagaaataatgctttaggcgacaaggaaatggaatttgttgccgacagacatatgatacttgatgagtttttgaaaatatgggcaaaacaaaaaagtttcaatggtgaacttgcaaggcagctaaatctgccagatgctcaaaaagaaatttataataagcaaaagaccgatatatggagatgtcaaggcgtattattcagtcagagaaaagcatattggaatttgggaacacttggcaggtgcgaattagagccgaccgacgaaaaatgcccaaaggcggatatgtatgcacaggaatttcttgttcttaccagtgttaataatattcgcattactccaccaggacaagaaacaaggaaattagatacaccagaaagagaaaaagttataaccgctgcaagaaaacagaagacagtttcagaaagtacagtaagaactgctctcggaataaataaaggtgaaaacaaagcgctttatacgctcaatactgatggtgataaattcacagtaaacggcgattggttttattcgcaaatagtgcatgatagctttggtgaaaatgtatggaaatcctttaaccagaatgtaaaagattcggtcaataacgctattttaaaatttgaaccaaacgaggaggaagatgaacaaaaacttgtagcaggctgtaaaaaatggtggaatttagacgatgcacagacaggaaaatttataaatgtctggaagaaacgtcccaagaaagacaccagagtgaatctttcacgcaaagcgattaaaaacctgctgccttacttgcgggacgggtggagcgtaactgaagcaagaaatatgtatgctgaagatgcaacaaatgatgcaaataatttaaaaagaaaacgatattccacaaaagaaatagcagttgataaaaaaataaggcatttcctgaagaagcatcctgatatgctgccgccggtatcagacgggatttccaatcctgttgtaagaaaaagtattcatgaagttcgaaaacatttgatggcgcatatcaagcaatttgataaaccagaccgcgtcataatcgagctatccagaaagacaagacaaagtgaaaaagttattgccaaaaaaatgcaaatcaacaaagcaatagacgcacttactaaggaaataattgaaaagcataatctgaatgatgggactattacaagtacacaaaaagaggcggctattaagcgtataaggttatgcagacaacaacgatatgtttgcgcttattcaggagtaattgaagacaaaccatattcctgtgcatattctggaaaatctataacagaagagcaagccaaaactggcgaaggattagaaatggatcatataatcccaagaagtaaaggcgggaataacggtatgagcaatttagttttgtgttattccacaactaaccaaggtaaaaaagatagaacaccaattgattggttgaccgaagaagaatttggaagattagaacaaagatttaaacatttaaaagatgaacaggataattatataacaaaagataatgttgacatgtcggataaagcaaagtggacaaaccttcatcgcagaacaccaaaagaaggttttacagaagaacaacttagttcaagtgcctatgccgcaacgcaaacaactgattggataaataaagttttgtacggcagtcaagatagaaataaaagatacgtttttgcctcaaacggtgattatacaggcatacttcggcgggattggggattgtttttcgatgaagaaggtaatcgcagtgagaaaggcaagaaatttcgaggcgaccacagacatcatgctgtggatgccgttgtgattgcgttagctcctttattctttcagaaaattaaagaatctttcattgattttgaaaaacaaaaagaaaataaaaacataaaaccacaatggaaaaccattgcagagccatgggagggatttagccagcaggttgcagatgaatataaaaaactgaatgtttcacacagggcatataatcggaaaattactggctatttacataaagattcgatttatgggccagcaattatttatgacaggtatcaaaaggataatgagaaaaaaggaattaaaaagggcgaattaaaaagggatgaaaatggaaatttagttttaaaagatgggatgtatataaaaagcattccggttataaaaatagagcaaggtcatttgagaatgcccaatgattggcatagcttaaaagaagaatacaagtctgcaatggccaacaaaaaagaaataaagaaaaagatgctggctttggaggaagttccgcctgcaaaatctggtattatacgagatattgacttgagagataaaatctgtgattggctcaaagacaataatttttcggaaatgaaagaagcaaaaaaatatattcaggaaaatggtttagtcataaatggtacacctatacgaaaagtgcgagtgctttggaaattaaatgaagttgtggaaattccgagaaaaagttttgattatgaaactggcgaatttgtaaaatgcgaagataggaaatcattacgagtttatcagacacaaaataatcatcacatagaaatcagagaaagtataaaaggacaatggaatggggacgttattactaattttgatgctgccaagcgagcaagagttgacaaaaaaacaatagttgataggaatgataccgaaagtggtagattcattatgtctcttgcaaagggtgaagttgttagcatgagacatcctgcaacacaaaacgctaactactttgttgtgttcaaaattgattctacggggactatccattttacaaaacatacagatgctaatccggcaagcaccaaaaagaaaaatgtgcctatccgtgaggatattgatttaacaccacaaaaattgcaaaagttaggagttgctccaggttctgtgccgtacaaagttaaaattagtccgcttggagaagtcagagaactgattagagattaaaattgatcaaaaagataattgagatatcgcggcaaaggactgctttatctatacgatatgggcaattgatactcaagcgagaggatggcgagaactctataccctgcgaggatattggcatactacttgttgataaccaggcgacagtttatacgcatagtgtatttacggaattattaaaaaatggcgcagcagttgtgctttgcgggaatgaccatttgccgagcggatgtttgctgccgattgaaaacaatacaattcaaacgcagcgatgtttgcaacaaataaaagtaaaagagccggttagaaaaaaattatggcagcaaataatacgtgccaaaatcaggcatcaggcaaaaattgtcagagataacacaacgattcataaagcattgatggaattatttagccaggttcgaagcggcgatccatcgaatatagaagcgcgggcgagtaaaatattttggggggcgtatgtccaaggaattgattttaaaaggaacgcagaaggacagccgccgaataatttattaaattacggatatatgataatgcgagcggcagttgcgagagcgatttgcagcgcagggcttttgccatcggtcgggcttcatcataaaaataaatacaatgcgttttgtcttgccgacgatttggtcgagccgttcagaggatatgtagaaataaaagttaaagaaattgttgcaggcggagagtgggaggaattgacgcagggaataaaagcaaaattgcttgaaacattatatgaagaagttgagatttcagattataaggggccgctaatggtcgggctgcataggatggcagcatcactggtgagatgtttttgcggagagcaaaaggaaatagatttaccaaaattgtgagccacagagttatagattatatctttgccacatagttcacagagatatataaaaatgataataagcggatatagagcggtgtggatatttgcgatgtttgatttgccgacggatacggaaaaggcacgaaaagattatacgcattttcgtaaaaatcttttgaaagatggctttgcgatgatacaatactcggtgtatgcaaggcactgtgcaagtgaggaaaacgcagatgtacattatcgcagaatacagaattttttgccgccggacggcgaagtccggctggttactctcactgacaaacagtttgagaggatgcggattttctggggaaaaatgcgaaaaccggcaccgcctgcgccaaaacaactcgaattattttagagtcattttgacgcaagtcctttttcgacagcaggtaacggaaaaggtagtgtaactaatcccgacctgatgtcaatccacaaccacaggatggctcgtaactgacgacacggagtgtaactaatcccgacctgatgtcaatccacaactgattgcctgatcgggtattttctttatgagtgtaactaatcccgacctgatgtcaatccacaacgttggcgattgccgatataattttgtgcctagtgtaactaatcccgacctgatgtcaatccacaacataagaccttggcgatacgcttcctgtccagtgtaactaatcccgacctgatgtcaatccacaacataattcctggcgttgtccgcacgttggccagtgtaactaatcccgacctgatgtcaatccacaacaatgtgtgcggcggtacttgttcatatctcagtgtaactaatcccgacctgatgtcaatccacaacgtgggcgtcgagccatgccttcagctctatagtgtaactaatcccgacctgatgtcaatccacaacacgaacatgatgtttaacctttcatttcttagtgtaactaatcccgacctgatgtcaatccacaacagcatttttcctttgcgctgctgctttgtaagtgtaactaatcccgacctgatgtcaatccacaacagcttttgcctggtgtaactttcgtttctcagtgtaactaatcccgacctgatgtcaatccacaacatcaatttgattattcagttgctgaaaattagtgtaactaatcccgacctgatgtcaatccacaacttaaagcatagacatcctgaaacaactttaagtgtaactaatcccgacctgatgtcaatccacaacaatttttttagaggtgcaattatggcgtttagtgtaactaatcccgacctgatgtcaatccacaacttgcgatatgcgaggcccagggctggcagaagtgtaactaatcccgacctgatgtcaatccacaacatctcgattgtatcttccttgcacggccagagtgtaactaatcccgacctgatgtcaatccacaacaagaatgttctattaatagcgacgattttaagtgtaactaatcccgacctgatgtcaatccacaacatgccgatgcactgaggattattacaacaaagtgtaactaatcccgacctgatgtcaatccacaacgggcggctttataaagagtagtgggtacaaagtgtaactaatcccgacctgatgtcaatccacaacatcaggtaggcacgcaacgaaaatgggaaaagtgtaactaatcccgacctgatgtcaatccacaaccatacaatccagtttcagttttgcgattatagtgtaactaatcccgacctgatgtcaatccacaacatagctttatggattgcggttaaagtcccgagtgtaactaatcccgacctgatgtcaatccacaacatcaggcattgcttctcaattactaataaaagtgtaactaatcccgacctgatgtcaatccacaacagttcgtcaccgtctgccattttctgtatgagtgtaactaatcccgacctgatgtcaatccacaacataggtatctgcgctagagtcgataggcttagtgtaactaatcccgacctgatgtcaatccacaactgatagcgatgattgggcttttggttcaggagtgtaactaatcccgacctgatgtcaatccacaacatatgacctacactctgttggtcgaaatgtagtgtaactaatcccgacctgatgtcaatccacaacacccgaacttatcagcgaagatacaagcgaagtgtaactaatcccgacctgatgtcaatccacaacaggtttcatagtcgctaagttcgttgcgatagtgtaactaatcccgacctgatgtcaatccacaacggacggccaaaaggcctatgaagaaacttgagtgtaactaatcccgacctgatgtcaatccacaacacgccattagatttaaagtggatcgccgccagtgtaactaatcccgacctgatgtcaatccacaacatacctattttatatatttgttcacatgcccggcatatagattccaaaatgattataagttgtaggaaaatgttaaattcacagcttcatcaaatttagtactttatttggagtagagttcattcgtcaaaaaaagttttttatgcgttttctatcagatttcctgttatttgtttaaattactaatattttattggaccttgctcttgcaagaaattacaaaaaatggtatattttctattaagtacagtgaagtgagggtcgaaccgacctaggccatttgttggcatgtcaaacctaagccccagaattataaaaactaattttttgcattaatgtttcgatgtctaaagtttaattttattttttaataggcagattcccattaagtgttaaacgtagcggatacgttatcagtctgaaactctgtctatagttcgtcaatatggagcaaaggaaaatggaagatcgggcgataggtatagcaacaggcatacaatctgagtatgaagattttaaaaacatccatgagcttttctcatacctatatgatcacaggttcgagcagataagcaatacttacacaaagcaaacccaactaattgaaaatgctaattatttttggtctctcattatcaaactatgcaacaaatttaaaattccacttgtaataggtgcccacgatattgaaaacctttttcatggatttgatactgaaacaatagaggaatttcgcaaaagcaaaaggtattttggcattcatataaagaaaattattgctgtagaagaagatctactgattcattcgataaaatcgatttttgatacgttgctggctcgtttagaacttgaattgaaaaagggatcacaaaaaagcattgaacatccgcacacacaaattgaacaatatactgattcactcgccaattgtcagactttaactaatacagatacgaatattctgatggcgatgaacagcaatccccaaaaatccatgctcaaagtagatatcataatagctgccggtcatcaaaaatatgccgtgctgcaaagcctcaaacgtcttgaatccatggggatggtctataaaccagaaaatgctaaacgcaaaggatgggctcttaccgacaaaggcattttaaccgctgacaatttataatttcaataccagaatcagatttaacacagagattctctgtcatcagatttatttattttttatcctcatagcaaaactcatacctaaaaacaaaagtttttcaaaatcagcccttaaccagaccttagcatgcaaaattggctcttaatcagcccttaaccaaaatttgccataaaaactcacatcaaccctcgcaaaatcagcccttaatcagcccttaattggctcttaatcagacccaagcgtttttcttttatggcaaaatggccctcgttgaaaggtttataacgatggcgattgattggaaaactgaagaaattatctgtttgagcgaagcggcaaaacggctcaaagttgataactccactgtatggcgatggtgccatcgcgggcttggcggtatttacctggaatataaaagcgttggagtccaaacatttaccactatcgattgcatagaaacgttcttaattgcattaacagagaaaaatattgattaccaccagaaagttttttcacagcggctaaaaattaagaaaactaaaagagcatcgcagcatcagcgggaggctgacagcgccaaagcaatccttcttcgcgcaaaaatccttcgagatgacaagccaaaggcggcatctatatgaatacgcaaaagagataaaaactaatttttaatacgaaaggtcatttttatgaatgtatttgaaaccatacgaacaggcaaacgccaatcaccaccgcgaatattactttacggtacagaaggaatcggcaaatcaacatttgcatccgaggcaccaaatccaatctttattccgaccgaggatggcctggcagaaattgattgtgcatcatttccagtggcaaaaaaatatacagatgttgaaaactatttgtccgcactaattgaccagccgcatgactatcaaagcgtcgtaattgacagctgcgattggcttgagcagcttatctgggatgagctatgccagctatctcactcatctactatcgaaaaagtcgacggcggctacggtaaaggctatatcgctgccctgggcttttggcgtcaggtcattgacacgattgatactcttcgcacgcagcggaatatggctgtgatattgatttcacatgccaaggtcgaaagattcgaagaccctgaatcatcttcgtacgaccgcttcgcaccaagacttcataaacatgctaccgccctgcttacagaatggagcgatgcagtactgtttgccgctcgaaagttccgtaccgaaagcgaagatatcggtttcggacgagaacggactatcgcagttggcattggcaaagatggcggcgagagaataatccgcaccgttggcggaccatcatgtatcgcaaagaatcgctataacctaccgtatgaacttcctctatcgtgggatgcattcatcggttcattaactacaaccaatttatcagaaaaggaaaatcactaacatggcaaatttaaatggctttaacgcaaacaacgtagaaccggcagctgattttgatccgatcccggcggcaaaatatctggctgttataaccaattcggaatttaaaccgacaaagaataacagcggcaattatctggaactaacatttcaggtcatcgagggtgagtacaagaacaggcttttatgggccaggctcaaccttgatcatccaaacgaaactacctccaagatttcacgggggcagttggctgcaatatgtaaatcgatcggcgtgatgacgcctcgtgacagtgccgaattgcacaacctcccgctgatgatcaatgtcaaactaaaaaaacgaagtgacacaaacgaattggtcaatgaaatacgcggttattcagctaaagaaactgctgctgttcaaaacagcagtccagctgccagaggtgtcgcaccctggaaacgctgacaataacgctgccatatccgccaagtattaatcattatttcaagcggcgtggaaacagaacgtttatagggcatgaaggcatgatatttcggaatcgtgtttgcaatgcccttatggcggcaaaggtaactccgatgatgggtatgctcgcaatgaaggtccgggcatacccaccggataaacgaaaacgcgatatcgacaatattcaaaaaccgcttcttgatgcattggaaaaaggcatggccttttataacgattgccagattaaacatctgactaccgttatgaaagatccggtcaagtatggcaaaacaatagtaacgataaggaagatcaatgatagagctccggggatatcaaaaacaggctgttgaagcctgttataaatatttaaaagaacgcgatggtaacagctgcattgtattgccgacaggttcgggcaaaagcgtagtccttgcccaaatatgtagtgatgcggtttcattatggaaaggccgggtagttgttcttgcgcacgtgcaggaacttatcgaacaaaatgccggaaaaataaaacattttctcggcgataattttgtcggaatttattctgcgggcttaaagcagaaagatatgcaccagcctgtgatagcagcttcgattcaatctatatataaaaaggcatttgattttgagccatttgatttaatcataatagacgaatcgcatctaatttctacgaacggtgatggtatgtatttatcattcctcagcgatgcgaaaatcatgaatccgaatatcagactaataggctgtactgccacaccataccgcacagaaagcggaatgatatgcgggccagataaaatcctgaatgaaatctgctacgaagtaggaattaaagaattaattcgtgacgggtttctatgccctttgcgcagcaaagcttcaaagaccaaggttgatacaagcagtctgcatattcgagcgggagaatttatagcagctgaaatgcaggatcttatggatacggatgcacgagtaaaaaccgcgtgttctgaaatactcgaatatacccaggatcggaaagcggttcttatttttgcaacaggtgtagctcacggcaagcacattcaaaaaatattgcagcaagagcacaacattgaatgtggatttgtttcaggtgatagtcccgatggctggcggagaaagatgattgatgattttcaaagcggcgcactgaaatacttatgcaatgtaaatgttttaaccacaggctttgatgcccccaacatcgattgtattgcaatgctgcgtccaaccatgagtacagggctttatgttcaaatggtcgggagaggaagcaggatttgtgatggcaaagaagattgcctggttctcgattttggaggcaatattctccgccatgggccgattgattgtttgaaaataaataaagtattttcaaaaggtagtggcgatgccccggcgaaagaatgtcctgagtgcaatgaaattgttcatgccgcatattccaagtgcccatcatgcgggtacgatttcccaccgccggaaaaatcaaagcacgataccaaggcaagctctgaaagcgttctttcgggagaagtaactgttgaagagtttgatgttcaagaggtgctttataacgttcatacaaaaagaaaagctgatgaagatgcgccaaaaacaatgcgtgttcaatataaggttggcctggaaagatatattcctgaatggatatgttttgaacatagcggttatgctcgtcaaatagcagaaaaatggtggatacaaagatccaatgaagatgtgccggagcaatctgacctcgctgtattttttgcacaaaataggagattaaaagagcctgtaaaaataatggtaaaaaaagtttcgggtgagaagttcgaaagaatagtcagctaccaattcgaagatccgcaagtttcagattggcaatttgaaaagcaagttcctgattatatttatgacaacaatgatgaaatccccttttagcaccaggagaaactatgcccaacattagagaaacttctttagcttacctccaggcaggtctttgcgttttaccggcgaatgtgcagctaaaatttgccgcattatcagggtggaaagaatttcagcagcgcctgccgtatgactgcgaattaaacaactggttcggcaatggcaatactggcgtatgtattgtaaccggtaaagtctccggcaatcttgaaatgatagatttcgatctgaaggcccaggcatacaaaaaatggtacgatcttgtgcaaagccagtcaccgggcctgattgaaaggatagtaattgaaagatcacagtcaggcggtttgcatgtaatttaccgctgccaggacgaggtatgcggtaatatgaaacttgcgcagcagaaggttatcctgccctcagagaatgaggctgaggtttgcagtaaaaaatataaaccgcgcagggataaggatggaaactggtttattattcttacacttattgaaactcgcggcgagggtggattatttttatgtgcgccctcagcgggttatgaattaatccagggcgagtttacatcaatacctgttttatctactgaccagcgtgatattttactacaggccgcatggtctctaaatgaattcataccggaaccgcagcctgaacctgctgcaccaatttctaataattcccttcggcccggtgatgattacaacgctggcggcgattttaaagctgttctcgtttcacacggctgggctttagcccaatcaggagaaagtgagcgttggcggcggcccggaaaatccattggctggtcggcgtcaatcaaggatagaacattttatgtattttcaacaaatgcatatccatttgaaagtgaaaaggcatattcacctttcgggatttatacgctgctggaacataatggtgattacagcaaggctgcaaaggcactggcaacgcagggtttcgggaaaagtgaagatacaagcggagttgatatttccaatatcacaagtgaggataccgcttatgataccgaacctgccgcttccgatccgggaccgatgccgcatgaattattaaatgtgcctggatttgtaaaccaactgcgtgattttatgatggagaccgccccgcacccggagcctgtactatcgttttttggggcacttggccagcaggcacatttggcaggcagaaaggtccgggacgataatgataaccgcactaatttatatattttaaatctcgcatatcccggctgcgggaaagatcaccccagaaaagttaacagcaggattctgcaaaccttagggcacgacaccacaaccgctgacggttttgcaagcggtgaaggtattgaagataaattatttatgcacccggcatcgctgtttcagaccgatgaaatagattcccttattacagcgacatcaaaaggcaaagattcacgaatcgatatgattatgaacatccttttaaagatgttctcatcctcaaattcgatatatacaacacgattaaaggcaggcaaaaaggatggtggaactattgacca

SEQ ID NO: 4459 - DNA, 8138 bp, synthetic construct
  misc_feature 1..8138: note = Synthetic
  source 1..8138: mol_type = other DNA
ataaaatcattagcgatgcgccgcaaactacagtttttttctcttgtatttgcacaatataatagatgcggcattaaacactgattttgatgattttttcgagtttttagggagtttttttagccacaaagacactaaggcactaagggaaattagccacagagttcaccgagcgacacagagaatttagacacggatttacacagattaacacggtatatttgctttaaggcgatgttttgcaaacaccattaaattcaaaccgagtgccttgcttacaagcgacccgttcgacttcgctcagggcagggcttgacgccggcacaacattttgaattttactgctttgcagtagtgccttaaagcaaatatacttccttcatcataaaagaaggtttgaccccgcagcgagtaaagaataataagttaagtgcgggattgacaaagagataaaaagcgtagagaatataagaaagaaggcagattatagaaagtgaaaagttaaaagtgaacagtgaaaaggtgaaaaatgtgcgtaaaaaaggcgaggcctctttcgattcctcgccaggatgctccgtagagctgccccaccttttgggcgggactgcctgcaacttttcttttgttatgaaaagatagagcaggtcgggattagttacacaatttatactataaatttttttctggacaagtcaggtattttttggtagtattccgatggacaaacttgcagcggagaaaaccttattttcttaatgggagtgagggtttcgagtactaatcctgatgatattgatataaaaaaagccgcagaatcgtgggttacacgagctgcagcggtcgcctttcggcggtgcctgcgaatttttcatcttgttgtgaaaaaacaaagcaggccgggattagttacactgcccgtattataggttctctgataaatattgcaagagaattttttacataaaattaggagagttttatgaaattgttaggattggatataggaacaaattcggttggttcagcgtgggtcgatacagataaacatttaataaaaataggcgtgggtgtatttcctgccggggttgaggaatcagaagacaaaagaggtgcgccaaaaaatcaggcacgacgatcacaaagacaacaaaaacgttctatcgatagacgagccaaactaaaaagaaatcttcgccaatatctaatcaagaaaaactggataccaactgaaaaagttgaacttcaaaagtggtgcaatctcaatccgtggattttaagaaaagatgcccttcatagagaattaacagagtacgaatttggcagaatactacttcatcttgcacaaaaacgaggggcatggtggtttgatgaggagcctgatgaatccgaagataataataggaagaaaaaagatttgtcagagatgccagggacagttgaatacaccaaaagaataatgaaagagaaaaacgctaaaactttcggagaacttatagcgatagaatatgaaagcagaaaaacaactaccgcaaaaaataaaataagaaatgaaagggttagaaatagaaccaatgcttttggcgaaaaagaatctgaattcgtagctgacaggcatatgatacttgcagaatttttggaaatctgggaaaaacaaaaaggtttcaatggaaatttttcaaaacaattaacagatgaagttagaaaagaaatttataatccacaaaagaccaatacttggagatgtcaaggtgttttgttcagccagagaaaagcgtattggaatcttggcacacttggaagatgcgatttagaaccaacagacgaaaaatgtcccaaggcagatatgtatgcacaggaatttcttgttctaaccagtgttaataatatccgcattactccacctggtcaagtaaccagaaaattggatgttcctgaaagaaaagaagtaataattgccgcaagaaagcaaaaaacagtctctgaaagtaccgtaagaacagctctgaaaataaataaaggtgaaaacaaaacactttatacactcaacactgatggagataaatttactgtaaatggtgattggttttattctcaaatagtttgcgatatctttggtgaagatacgtggaaggcatttaaccaaaacatgaaagattctgtaaacaacgcaattttaaagttcgatcccaatgaagacgatgacgaaaagaaattacgggcaggttgcaaaaaatggtggagtttaaataacgaacaaatcgaaaactttatcagcgtatggaaaaaacgccccaagaaagacacaagagtaaatctttcacgaagagccattaaaaatctactgccatatttaagagatggctggagtgtaaccgaggcaagaaatatgtatgccgaagatgcttcaaatggtgctgacagcctaacaagaaaacgatactcgactaaagagattgtagttgataaaagaatcagacattttcaggagaaacatcctggtttactgccaccagtatccgatgggatttctaacccagttgtcagaaaaagcattcacgaagtaagaaaacatttaatagaacatatcaggcaatatggcaagccggatcgggtcgtgatagaactttccagaagatcacgacaaagtgaaaaagtcatcactaaaaaaacactaagaaataaagctattgatggacttaccaaagaaataattgggacacataatcttgataacgctgatataagcagtacacaaaaggaagcagccataaaacgaatcaggctatgccgacaacaaagggaaatgtgtgcttattcaggtaatgtaataaccgataaaatggcagcggatgggaatgggctcgaaatcgatcacatagtcccaagaagtaaaggcggcgacaatagtctgagtaatcaggttttatgctattcgtcagctaatcaaggcaagggaagcagaacgccaattgactggttgagcgaggaagaatttggacggttagaacaaagatttaaacatctaaaacagaatcaagacagttacataacaaaagataatgttgatatggcggatgagtcaaaatgggaaaatcttcaccgaaaaacgcccgaagaaggttttactgaagaacagctttgttcaagtgcttatgctgcaacgcagacaacggactggataaataaagttttatacggcagtgaagatagaagtaaaagatatgtttttgcctcgaatggtgattataccggcatacttagaagagattggggattatttttcgatgagcaaggtgagcgaagcgaaaaggggagaaaactcagaggcgaccacagacatcatgcaatcgatgcggttgtaattgccttgacacctcaatttctgccaaaactcaaggaatcttttattgatttcgaaaaacaaaaagaaaataagaatgtaaaaccacaatggaaaactattgaacaaccatgggaaggatttagccagcaggtcgcggaagaatataaaaagttgaaagtttcgcatagagcatacaataggaaaattaccggctatttacataaagattcaatttacggcccagcgatgatttatgaaagacacaaaaaagataatgagaaaaaaggaatcaaaaaaggcgatataaaaatagacgaaaataggaatcgcatactaatggaaggaatgtacataaaaagtattccagtaataaaaataaaccagaatcatctgcgaatgccggaagattgggataaattaaaagaagaatgtaggaatgcaacaacgaataaaagagccataagaagaaaaatgcttgctcttgaagatgtgccaccggcaaaatccggcattattagagatatcgagttgagagataaaatccgtgactggctcaaggaacacaattttttggacatggaaaaagcgaaagggtatattaaagaaaacgggctcatcataaatggtacaccgcttagaaaagtccgaatactctggaaactaaatgaagtaagagaaattgaaagaaaaagctttgattatgaaactggtaaattcgttaaatgcaaagaacgaaaatctgtgcgagtttaccagacacaaaataatcatcatatagaaatcagagaaaataaaaaagaaaaatggattggagaagttattacaaattttgatgctgcaaaaataaatagtgatcggcttaaagcgattaaagaggctggtgtaccctcaatttatgaaatgcgaaaactaaagaaagccaaccctgaacattatcagcaaacacgagaacaatatcgaccagttatttcaaaaataaataaagagcatgcgattgtaaactgtaaggatacagaaaatggtaagtttataatgtctcttgcaaaaggtgaaatggtttatatgagggaccctgaaacacagaatgccaactatttcgtggtgtttgagattgaggcatctgccgctattcattttacattgcatacggatgctaatcctgcaagcagtaaaaaaacaactatccgtaaggatattaaattaaaaccaagtgacttacaagagctgggagttgctcccggttctgtgccatataaagttcatataagtccgcttggtgaagttaaggaactaattagagattaagtttgattaaaaagataatagagatttctcaagcacggacttctctttcaataaaatatgggcagttggtaatcaaaacacaattgcccaaggagtcggccagccctgcttcgccgaggctacgcagggtctccgcttcgctacgagagacggatatcacagagaagagtattccgtgtgaagatattggcgttcttttagttgacaatcaagcgacaaattacacacactgcgtttttacagaattattaaaatgcggcgcggccgtggtgctttgcgataataatcacttgccgagcgggatgcttttgccaattgaagccaatacaattcaaactgaaagatatgcaaaacagataaacgcaaaagagcctttgaaaaagaaactatggcagcaaatagtccgggcaaaaatcagacatcaggcaaaacttgtcaaagataatacgcaaatctataaagcattatccgcactattaagtcaggttcgcagcggcgacccttctaatatcgaggcaagggcaagcaaattattctggggagcatatattcaaggtttagaattcagaagagatgcggaaggcaagccgccgaataatttactgaattatggttatatggtaatgcgggcggcggtggcgcgtgcgatttgcagcgcgggattattgccttctgtcgggcttcatcatcgaaataaatataatgcattttgtcttgcggatgatttggttgagcctttcaggggatttgtggaggcaaaagcaagagagattataaagagcggcgaagattatgaagagctaactcaagcgataaaagcaagattgcttgaaacgctttatgaagaagtagaaatatcagaatataaggggccgctgatggttgggcttcataggacagcggcatcgcttgtgaggtgtttttgcggagaacagaaagaaattgatttacctaaaatttagccacaaaggcactaagacactaagaaaaataatatataaaaactttgtgcctttatgtcttagtggcgatagagaattatgataataagcgggtatagagcggtgtggatatttacgatgtttgatttgccgacggatacggacaaggcgagaaaagattatacacatttcagaaaaaatcttttaaaagacggcttttctatgatacaatactcggtatatgcaaggcactgtgcaagtgaggaaaatgccgatgttcattatcgcaggatacagatttttttgccgccggatggcgaggtcagacttgttacaattactgataaacagttcgaaaagatgcggattttctggggaaaaatgcgaaaaccaacaccgccggcacccaaacaactcgaattattttgagtttgtttcgccgaaactcgtttgcagacagcaggttacggaaaatgtagtgtaactaatcccgacctgaagtcaattcacaacagaaaaattagccacaaagacataaggcacgaagaaatgttgagtataagacggggggggcgcaaaataactccccggcggaaatgcgtagtgcactaaaaagtatcgtggtgaaatccgtcccgccagaggcgggtaaacttcggtggacaaccccgatgaagtagtcttaagagattctatgaagcagcgtaacgacacttcacggggcagggatatatttgctatagagacagacatcggtgagatagcccctgatgagatagctgcggcatctcacagggtaaactgtcatctcacggggtaaacatctaacggggcaagcaagcgggccgttactatcaaaagacctcaatccgaaaatgttagattatgatgattattggttccctgctgcaatcccaaaggagtgttccctgttgctgacccagtgaagctacttcccgggaatgacattacttcccgggaatgacaatgacattttccctgtattgaaatacggaaataaaaagcaaaataaaggatttccagcgtatcagcaaagacgaatatcttgaaatactgcggaaaaacggatttgttattcagacaagccagaaacgtttattttaaaaagaaaacccccgaataattcaaaccaacccgctccataactgtcgcggctctgaacccccactgaaagtgggggctaaacacgaataaacgaaccccgccttagtgaaggcggggctaactgcggggatggacaatttcaaaataattgggggcacctatcatattgacaatactgtccttagaacttactatacaggtcgaaaaatttaaaggaggcacaatggctgatattattttaagaacagaaattcccggcacaaaagccaggagcggcaaggttcgcgatatctatgacctcggcgataaattgcttataatcgcatccgacaggctaagcgcattcgatgtgattatgaagaccggtattccatataaaggtgtagttcttacgcagatttcaaaattctggtttggctttctggagggcacagtcgaaagtcatttaatcagcgacaaggtaagcgactatcccaaacctttccgcgattatccatcacagcttatcggcagaagtatgctggtaaaaaagacaaaggtcctgcctgttgaatgcgtggtaagaggctatctcgcaggctccggctggaaagaatatcagcaaaaccaaactgtctgcgggcataagctgcctgccggtctggcgcagtgcgccaaattgccggaaccgatttttacgccggcgacaaaagaagaactgggcgcgcatgatgaaaatattgacttcgagcggtgcgttaagacaataggaaagaaaaacgctgaatatgttcgcgataaaagcattgagatttttaaaaaggcttccgcctatgcagaaaaaagagggataatccttgccgatacgaaattcgaatggggcgaaatcggcggcaaaataatccttattgacgaagtcctcactcctgattcatcgcgattctggccggcggacaaataccaggcgggcagagaccaggaaagctacgacaagcagtttgtaagaaattatctcgaaagtataaacttcgacaagtccggcaaaggcattgaacttcccgacgatatctgcgaaaaaaccagcgcaaaatatatcgaggcgtatgagcagttgaccggcaagaaatttattccgccgaaaggttagacaaatgaaactgcctgattcaaaaatcggcatattttcgtggttcggctggcgaatacatatcggccaaagggcacaatttattaaaaaagccggttttgacgctacgtgcctttggtggtctgatgatgaaaaggcaaataccggctcactcgacgatttgccaaagattgtcagagacagcggacttgaaatcgacaatatccacatcccattcagtgaggcacatctgctttcatcggaaaatatatcggaacgcagaagattgattgaccttcacaaacaatggatcggc

SEQ ID NO: 4460 - DNA, 23822 bp, synthetic construct
  misc_feature 1..23822: note = Synthetic
  source 1..23822: mol_type = other DNA
atgccagcgtcacgcggtcggtctttacagatgccttctcatccgcaggcttaccgctcatcactgtacgcacagaatttatctccttctgtccctctggatagaacttcttcaggtcaaccaccattgtagtctctaccggaagcatgttgaccagcttgacgattatgtcgccgcttgcatcatccttcacaactgacgcaccgattcttgcctttgccttatcgttatctgtctctacattaagttttgtgtcgagatatttattaccggcattctcaccatacaggcgcattgtctcgtaatcagtagtcggacgaatctcactattattgaaatagatgaggtcaggtttccattgggtatggttatccttcgcaaggagcggagcgtatgaactcattgtcaccacatcaccgttgcgctccaccgacgtcagataaagagcctcagccaaggctgtctccatattcgaaggacgtccggggagatgagccgcccactcgccgagatacaccttcgtgccgttgcggtcgtagtcatcataataatcctgattatatatcagccatgcgggatccacgtaataatgctcgtctaccatatccaccttctgttcgcgggcaagacgccaaccctcctcatagtcggcaccctcatagaacggaccgacagtgccgatgaccgtgatctccggatgagccttcttcacggcagcatttatcttgttgaaacgctccttgaatactgacgtgatcatatcctcgttgccgataccgatatatttaagattgaaaggctccggatgacccgctgcggcacgtttcgcaccccattccgatgaagccggaccgttggcatactctataaggtcgagtatatcctgaatgtaaccgtcgagcatatccatcggcagaccaccctgctgaccatgttccgtgatggcatcatggctgtattgcgatttgttccatgaattttggcaaggcaccgcggctgccaccaccggcaacggctctgcgcctatatcctcgcagaactggaaatattcatgatagccaagaccacgggtctgatgataaccccagaggtttgacaacggtttcctctcctccagtttaccgatcgagcctttccagtcgtacatattgtcaagaccattgccatgcgcaacgcatccgcctgggaacctcacgaaacgcggtttcaggtcggcaagcgtctgcgcaagatccgcacgcagtccattctcacgccccttaaacgtattcatcgggaaaaggctgaccatatcgaggtcaagcacccccgtattcttaggcacgattctcaacgtggcgttagcacaatgttcatccggatttataataagctcataatcctgccaatcctttgactgcttaaccgtaagtttgccggaagcaatcttcctgccatgatccgacacaagcgcgatctccatcggcatcttcttgctgctgcgtgccttcatgcggaaacgatacggctcacccctcttcacagttatcccgtcaaaaccggaattgacaaaagcattgccgccattattaatcatcgtggcgataccacctttcacgtcaagacgtgcgtaatgcggattattgggatgcagcggttcatcagtggatatggagaaatcaatcttatccccctccacattccatgcatacttcggtccccaattcttctcatgcccgttctcacccggtgcatactcaaaatcgcggttctgcaccagttcggcatacaaaccaccgtcagcagcataatttatatcctcaaagaagatacccatcagcagcggactgatctccttagagtctccggaagctgtcacactcgccttcagcggttgcagtccggcaaaacgttccccatccttatcgcaatgttcggaataaagggcagcaagtctacctctctccgccgcatggtcttcaagcgacttaacagtcttctcatcagtcttcattgagaaaccagacaccttcttcccatcgagatctatcaccgacggcacgaaacccacattcgagcggaaagtgagtttagcggtatcggcagcaagcatatactcctgaggtttccagttgataagatcaggtgactgcgcccaacctattgcagtaccctccggattcacacggaagagacacgaccaaccggaagatgtggggaacaattgcggcgaccacatcttcttgccgctcccccaagatccgaaatcagacctcacgaagtcaaagccattaccgatgctgcgccaattcttaccgtcatcactgacagcgaaacgtaatcccccgttgccattttcgggagaatagaaaaagagatcagtagctccggcacaaagagccgccagaccaaatataccggcaaacaaagattttttcatgatgaagatattaaataaaaccggaccagacaacagtccgcatacaaagttacgaaaaatccgacatcccaacaaatttctttcgtctcatcctcaaattcatccataaccgctaaaaacgcaccgacaaaacctcagccaaagtttttttgtgtcaagttaagtgatcggaccaaaggttcgataagccgccatccctcaaaatcccatagaccaaagcccataatcccaaaagggacaagagaaacaacccaccaaccaacgaaagataaaaaaacagaacctcaacgacggcaacctcaacaactggtttcaattcacgcacccacgcggggtgcgactggttgtcaactgcgccagtcgggatttctatgccgtttcaattcacgcacccacgcggggtgcgaccacacttgtgcagcaattcggtctgacgtgggatgtttcaattcacgcacccacgcggggtgcgacctaccttgttgggatttttgataattaatgagttaagtgatataatatgcgaagttaataattttattacaaattttaaatatatttttcaatattattgattattggctgattttcaataagtgcggaaacattgagttttttgaaatgctattggttcgcaacttatcttattactaaaagtaattaaagttgcttagatatcttatatgatcaaacgtctttatatgattagagttccttcaatatcaaatgatgtttcttttccaatctgttctattttcgtcttgtaatagttccccaaacgatatattcttatggaatcagtctctttatttattatagaggatagtgccgaacgaagggttattaaatctttttcagtaagcaaacattcaaaaactgaattctgaacacgctgtccatagttcttacaacattttgctacttttgtgagtctacgttgtccttcagtggtcgtagtctcaacatcatacgtgattaagaaatggataagagcccattgtctgggacaaaacacgaagtgttgtatcccggacaatggtaataattcttcctctgaatacatgttttacaataattcaggatgagtttgatccagtgaaatatcagatgcgctcatacacctttacaccctccggcagggcggaacggtcaatggtcacatcgtagtcaaggaaacttctcggaattgtcacttcattcttcttgctgaccgtcaccgtgtcaaacaatttatcggctcgtgcattgccaagttcagtttcatgctcaaatattataagtttgcgtgcagccattagcccccttgccgcagaacggtcaagatcaaacatattttcaagggcattccagaacaattccaaatcctcttcagagaatcccgtctgcttggcaagatttgcagatatgaagccgtgtgctacgtatagtccgtatggcacggtagccttacgacccatggaatgctctttctctttatccgctttcgtaacggacatacaagtgattgtatggtcatataccctgaccgaatcaacagaacgggcaaatgtaagttgaaccggacctctcacctgtccttgtttctcctttgaagcaatcactgctccgaatgtgcgaatatcataatatttctcacacaacgcattttttacagatactttcttctgattcttatccgcattttttacggcaggagtctcataaattttatcaacgacagtattaaggacagcaccttcccgtataaaaatatcatatccctcaatgcccgacttaacgacatccacatagttgcgtatctttcttttaatacagacgtcggtcaccaatcctttatctgtttcaaaatccacacgaggtagattgccggcatcaggatcaccattaggatttccatcctgcacgtcaaacatgtagatgaaatcaattcttctttttagagtttccattttttattctgtttttactgttttatcttccttttttgtgaatagatcaattctttgatggtaatatccaataaagaatctaccctgatcttcaaaatcaagtttagttgggaatccggtcggaattatttggttatatatctcccaaacaatcttctcataatatcttcttaatttttcattagatagtttttcactataatgtagatacaatctaatcatgtcagggaatactaccgatggcgttatggaggcagcacaaaggtatttagtacggattgaagtaccatccgcatcttcctgaaatttttgcaatacagccgcaagacgtccacatagatagccaatattattatatgtcttgtcgagcatgatggttattttttccatatttttattatttttatattttctattaagatatgcctttaatatggcagcacgtaccggataaacataatgcttaggtagatcagcacggattctatccaatacgcttgcgtacaatctaacgggatatggtgtgccattgatgacggaatcgagcaacgcatccgatagattttgcggtaaattagaaatttttccaccaatagcagccgtttccagaattggatatataccgacgtatggtttgtccaaatcaaaatttctgacaatctccatatctttgaaatgctccaatattttatcggcaaaatcattcaaggtccgagtactccagttgacaacagatattcgtcctgtattcggagcaagcgacaaaatataaaagttatcggtcaaaggagtttttatttctcccgaccatatacctttgaataattttgaaaccctccccactttctcattcgggtcatcatcttcgtcgattgaattatccttttctgtcgactgcaatgatttatttgattcagatttaccccaaaatatatatgtacggctaccaatctttaccttatttttagattccttgtcaagcaatttcttaagggcggaggtatatgcaaactcagccttaacagatatcggagcattgtatgcctgctccttgccatacgagtcatatcctgaattaatctgcattcctacgagtgcagccgtcgaagtacacccggctatcggagtagccgacgtgagacgcacaagcggtcccttctctcccgttataaggcaaacacctgtcggggctgtatcgtcagaaatctccacaagaggggtaaatagatacctcttctctgcaatcagcacatcatccccctccaactggaaggcgaaattagcacctaaattcccttttatttctgcaaagagaggatccttttcaaatgccactaccctactttcctttgacctatcgtagaatgagagcatgccatttatcgatatgtcgtcagggttatgaacagcaacctcctttattttctcgataaacagattattatactccgtatgactatcttcaagtccaagtacatatttaccgttgtcccataatatattgcttttagccccacttgtgcgacctacagctttagcaacaatgaattgggcacaacgtctcttatctatccgcttggattcaaaacgtttgaactcacccttctcatcaatcactatgacatattcgatctctttaaattcagagccgaatgacggaagtgattccgattgactttgataataatcgtataatgctttcagaatcatctcaaaatctcattacttgtgattggtggcacctcaatgacaccattattcatttttgcacgataaaacatcggaatgatgttggatggattggagaaatcaaggtcataaagcattatgccgaagtcgattgattcctgaagtaaatcctccccatttttactattgtcagggagaagactaaaatacgcagaacattccctcgtgccgagatacggcatattgaagcattgcccctttgacgctctccgttcaaacatggattgatatttggcaggattctcatttgcatccggagcatgcttatgctcacctttacgatcccttaccggaacgtactccattacggcatagatcctgtaacggacatcacgcagcatcagactgtttttctgctgacgtttatcagcagcgattattggtggggcatcagcctttccaccaccgatggcaccgacttcattccgtctgattgagaaatgctttatcggattaagcacttcaatacgcgtgattctccattgtattgccggtttccaaaatattgattggaaaatgttgcgtgccgcagagggggttattacgtcataactcaccctctcaactttcaactcggggcgagtgaagcacgcaagatcgccccacacctcaagtccatattccttatctatatatatcattatattataatattttagattgtaaaaatttgttcaagatattcattatccactttcaatccagtctcttcatcatattgatctttcaatggaatatagtaaaatcctttgacaggctctgtgataagaccttccttaagcatacgatcaaataaatattttcctatatttacactatactgaccgagttgccggttaagcattcgagagggtccaaatcgttttaacttatcaatcaactttggagattctccataatttataataactggaattccatcgttatctataagatgaaaattttgggatattacctcgtatgaaatatcatcacgtatcgacattccggtaatatcgtttttatcaaaagtatttgtcttggaatacaatatcttataatattgatacattgtctctggagcaaaccaatccgaatccggataacatgaaatcatttggcgcatagaatcaatacctattccaattaatccgggagttctttcaccttccaattggaatacaaaagttttacctgattccagattcccttcacgattgcatcttccggcagcctgaagtattgaatccaatccggatagctgtcggaacaccaccgggaaatcaatgtcaaccctagcctcaatcaattgggtggataccactctcaatccgcagtcaggggtatctttcaagattcgtttcatctcattgatcttggttctgagatgaagcggacacatcatctttgaaagatgtattttcttacagtcgtccggcagattacggaatatgaggtttgcaattcttcttgtgttgacaatacagagagctttcttttcagaagaaatccgacgggatatatcctctatcgtttcattatctttcgatatcttaatctctaccctacgcagcttatcatgcaacgagaaatcagatgggatcaacgaacgtatctggtcatctgataaacctttaaagtatgctgtgcccaaccccttgttattaccgtcgagaataggctggcttgcggtacagaacaggaaagatacaccaaacattttcgcatacgaacgcatagaatccacaatgggttgcagtaaagtcagcggtaaggattgaacctcatccagaatcacaacgctatcgcagacagaatgtagtttcctgcaatctgacggacaatttgagaatacggattcaaacaactgtacatttgtagtaacgattatcggggcatcccaattttcggtagccaatttattctcccgtgagatattctgttcggcaattgcactatgatgctctattacgttcttctcaccaaaaatttcccggaatgtctgggcagtctgagtaatgatactcgtaaacggtatgcctaagattatacgtctttttccatgtttcagggcatgattgatagcccatatcatggatgcgatagtctttccaccaccggtaggcacagccaaattaaagaagccgggagattgagatgatgcagacagacaatattcctgaattttactacgcagctcattcaagggagatgatggagcttccttaaatttctcaatatatttttcaagccttgatttaagagttgcaagatcatcgaaatcccctcttttattaaaagcggagggatccatgaaacgctccgtgtcaagataatcggcatcaaccaatgaagagaaaagcatacgggtcaggtgaggtatatccaactttaccatggaaaatctcggacgctctatatttacagatggaagcgagttattcaacccattaggataaggagtttccatctttaattccaattcattaaggtcataaagtccacgatgatgacccgcaatgcaatttgcaagaatcgttccgagtcctctatatttatcccacaaaagttttgcccccaaatggctatgacttttatccttccatatcccggcatgagtatcatatccggattttacacggatatatctttggaaatccacactctccttccccctgtcgtgcatgagacccaaaagacgaccccaatttgagaatccgaagcaactgcaaaagtcggcagccaaatcagccacaccctctgcatgattatcattcgactgaataacccaatcagcattatccgttttttggaatagatgcgatatgacaatattttcatcagatgtcttcatgacggcagattttaaatagaagttgtttaaacttcacttggtaaaattataaaaaaatcattagaaactaaattttatacaaaactctctgtttccaacagattttttacgattaaaaaatttttcgcaaaaataaccgacacaactgcctaaatcaggcagaaatgagttaataaaatttaaatcagacagatgtgatatctcctataacaaacaataatgcattgtgaccttacgttaaaggatatgatgtcgcaacctatacggttgcgtgaattgaaacatactccaaagttatagtgttaaaacaaacgtataactaattaacggcaatcggatttatatatccggttgccgttttttctgaccgatacaagtctgaagaaaatctgagtaaaaattttgcgcaattgaattttaatctctatttttgtgacagcccgctccatccgcgcaaacattgctgaaggctcaggtaaacatgacacttcgctcgaaaccgaaattcgacttactgatgtagcaaggggaagttcccatgaattgatgggagatttcatcaacttcatgatgagaaaaaatatagctgcatgggaaatgcagagtacgttatatcatacttgaattgaaatcaaacacaaatcttgtatcgcttgtatcggtttgtatcggtttgtatcgggtgaaacaagcgatacaaaccgatacagaacacgataaataggtaataaaaaagacgagagaaagcacagagtgcctcctctccaaatgttttcacaacggataaaatccttattgtgatttgcttctttattatttgcgttgcaaatttaaataataattttcatattacaataccatttcttaattttaacattatttaatgtgatttaagaaagcatttattgtctaaaataacaaaaagattattatctttggaaattattttacgaagttgtataaccgacgcaatcttcaaaaaaattacccaattatcatattaagtatatcattaaaaaattgtataaccacctaacatcataatcacttatgaaaattcttggacttgatcttggcataggatccgtaggatggtgtcttattgagattgatgaggaaaaccatcccctgctgattcatgcaataggaagccgcatattaagcatatctccaacagaatccgacaatttctgcaaagggaaaggtgaaactgtttgcagccaacgcactttcatgcgcaccgcccgcaaaggtcttgacagatatcagatgcgcagaaaaatcctatctctggaattggcaaaattagggatgatcagcagcgacaatagcctgctgactctatcaccattgcagacatggcaactccgcgcggatgcagccaccaccggcaaacgtctttccctcgcagagataggaagagtcctgctgatgctgaaccaacgcagaggctatcgtcattcaaaatccgacgattccgactcctctcagaaatcttacgttaccgatgtcaaccaacggtattccgatctcaacgggatgacccccggacaattctttgctacaaaactcaaagaatcggaaaccacaagttcagccggaaaaaacgtgtatgattaccgtattaaaggatacgtactcccccgaaaagcatacgaagaggaattctatcgtatcatggaagtgcagggggaattttatccggaaatactcaacgatgccactgtcaaaaagctacacgacatcatattctatcaacgtccgttgaaatcatgtaagcgtcttgtgagcgtctgcgagtttgaaagtcttaaattcatcaacaaaacaaacgggaaggaggtaatcaccggtccgaaagtggcaccacgcacatccccgattgcgcaggaaactcgcctgtgggaaaccgtcaacaacatccgattgaaaaatttttccaacaagaaaagggtacgcaaggactctcaaccgggattatttgatgaggaaatgtcgcaatcaaaggatttccgacttttacaatatgaatatatcccgaatcaggaggaacgcacaaggatattcaatttcctgaatacaaatgagaaattgacccaaacccaactgctgaagattttagggcttaaggcaagcgacggattcagatgggaaggcgcaccgaaaaacggacttgaagggaaccgcacatacacccagctaaaagaggcgttgggagatttggcggaatccatgcctgacattctacgtttcaacatagaatatgagaacaccgatatcgtggatcaggataccggagaaatcatctctcgtgtaaaaatgaaccgacgcaactccgccaccggcaaaaacgatggagaaatatatccccaatatcaggatgaaccactttatcgcttgtggcataccgtctattcttcatcctcgaaggaggaattgtcaaaagctattgagaaacaattcggcatcacggataaagaggtgatcgaccgactttacaagatagattttgtaaagcccggctattccaacagatctgccaaattcatgaggaaactgctaccctatctgaaggatggatatctctatagcgaagcctgcactttcgtcggagtcaatcattccgatagcctcacaaaggaagagaatgagcgtcgtgtgctgaaaaagcatatcgataatattgaaaagggtgagttgagacaacccgtggttgagaagattctcaatcagatgataaatatcgtaaatgcactcattgagaaatatggtgagattgacgagataagggtggaacttgcacgcgaactcaagcagagcaaggatcagcgggcagagaccacttccaatattgcaaaacgtgaacgggaaaatgctgcgattgccataaagatcaaggaacagggtctggtggcttctcgcaggaacatacagaaataccgtctgtgggaggagagcggacacagatgcatatattgtggtaagacactgagcttaggagaatttctcggtggtcatgggggtgaaatcgagcacatcgtgccgagatccatcctctttgacgacagcatgaccaacaaggcttgcagttgcagccattgcaataaggagaaaaacaaccgtacagcctacgactatatgtcgggaaaaagcgaggcggatttcaaccgatatgtagccaacatcgacactctgttgaaggaaaagaaaatttcacgtacaaaacacgaccgcttcatgatgtcgcagtctgagattccgcaggatttccttgaccgagatcttcgtcaaagccaatatattgccaagaaagcacgcgagattctttttgaggtgtgccggaatgtatatgccacatccggatccgtcacagattttctccgccatacatggggttatgacaatatactccataatctcaacatcaaacgctacgaacaggctgacctcgtggaggaagtatcttatgagcatgaagggcagacacacaaggaattgcgcataaaggattggagcaaacgccttgaccacaggcatcatgccgtagatgcactggttatagccctgacccgtcaaggctacatacagcgactcagcaacctgaatacgcaacgtgacaagatgtatgccgacatccagggacagagtaatgagtttaaggagaaattccatctgcttgaaaaatgggcagaacttctcccccatttccctgtgaacatagcagcagatactattgacagcatagcggtctctatcaaatcgggcaagaaactttccactcccggtaaaagatatatctacaggaatggaaagagaaaacttgtgcaggataacattcttgtgccgcgtggtgcacttcatcaggaaacagtattcggaaaaataaaacttcaagacaatggaaaagatctgaaatatgccttctccaatccggaactgatagcagatgacgatatccgtaatcttgtcataaatcgtattcaggaggcagacggtgacttcaagaaagcattgaaggctctgaaaagatcccccttgatcattgccaagaatggaaaggagaaagagataacctcaattgattgctataaggagaccttcgtaactcgtgccgatctcagcgcgctgactgctccaggcatacagagaatcgtagataagagcatacgggaagctgcactggacagattagctgaatgcaagaatgacataaagaaatatcaacaaagttttgaagagaatcctatatatatcggtaacgatgtgagacatccggtaaagagggtaaggatattttcaaacgacaatcttgtacctatccgtaaggattcgaccgggaaagctgtggcatttgcaagcagtggcaacaaccatcatgtggcattctatgaaaaggatgggaaagtgacggaagttattgtgtcggcatggacaggtatgaaacgcaaactcataggacttccggtcataatcaaagatccggatgaggcatggacaagactgattgatatgcgtgaatctgatgacgtcagggaagtagccgatacccttcctcccgttggaagcagattcctatattcccttaagataggcgacatgtgtctgctcggtcttactccggagcaattgtcggatgcacttgacatgaacgacatgaagactctgactgcacatctttaccgtgtacaaaccctatctactggagactatcgattcaggctacatacatggacaaatgtagatgcaaagaatgcaagaccggatactgagatgaaagcattatatcgtatacgttcatataatgctataactttaagcaatcttataccagtaagtgtggataatcttggacaaataaaaatcttaaaatgataaaacagactctcctcttcgggaatcgggcatatctgtcgctgaaacttaatcagttggtgatagaattgcccgacatccccgaaaaaccgaaacaaccgataacacgaccgattgaggatatcggtattctgattatcgaaagtcatcaggtgacactgacctcggcattgctttcgtcattacttgaaaataatgtcgcggtcatcacctgcgactcccggcacatgcctaatggtttgctgctcccattgtcaggcaacaccatacaaagcgagcgttacctggctcaaatctcatgctccctcccattgaaaaaacaattgtggcaacagactgtcatgtcaaagattgccaatcaaggagaagtgcttaagatctggaataataaagagagcaaatgcatggctgtatggagccgcaacgtaaaaagtggagacccggacaacttggaagggagagcggcagccttctactggagaaatatcttcattgagaatccacatttcacacgacaacgtgatgctgatgactgtaatgccctgttcaactatggatatgccatccttcgggcagtaatagcccgtgcacttgtaggcagcggtctgttgccgacattgggcattcaccatcacaaccgatataatgcctattgccttgcagatgacataatggaaccatatcgtccatacgttgataatgttgtcatggaaatcatccgagaacatggaaccgatatatcactgacacctgcaataaaaaagaaactactcaccattccaactattgacgtaaagattggcaaactgacacgaccgttgatgattgcagccacaatgacatcagcctcattgtcaaaatgcttcaacggagagagtcggaaaatattatatccggaaataatatgcaaacaacaaggttaaatcaatataagatcatgtgggtgatagtattttttgatctgccggtagagacaaagaaacagaggaaagattactctgatttcagaaagagactgctgtctgacggattcaccatgtttcaattgtcaatatatgtacgtccatgcgcttcccaagaaaatagtcaggtacatatcaaccgggtaaaatcctttttacctgaagccggaaaaatctgtatcatgtcaataaccgaccgtcaatttggagacataatagtatttgaaggagccactaaaactccacctaaaacaaatgccatccaattggaattattctgaaccattctatttgtacattcagatatataaaaccgactaaaaaaataaaaaagagtgattggaaaccactcttttttattttctatcaaatctcaaaatcatctatctaacaacaagttatatagaatacattgtgtttgacagtgcaaaaataataaaaaagaagcaaatcacaacgcatcgcccaattccttgtatccgttttctattgtgtttgacagtgcaaaaataataaaaaagaagcaaatcacaacaatcccggagaggtgtatcatgatctatcaattgtgtttgacagtgcaaaaataataaaaaagaagcaaatcacaactaatgacgctcgcaggtttgattctaatgcattgtgtttgacagtgcaaaaataataaaaaagaagcaaatcacaacagagtgaaaggaggaagaggtacatcagatattgtgtttgacagtgcaaaaataataaaaaagaagcaaatcacaacggctcatcttatcttgataaacgaagtctattgtgtttgacagtgcaaaaataataaaaaagaagcaaatcacaacttattcatcgttacactcgtggacagattgattgtgtttgacagtgcaaaaataataaaaaagaagcaaatcacaaccgtatctgatggattgcttacatccggttaattgtgtttgacagtgcaaaaataataaaaaagaagcaaatcacaacgccaaaatgtatacaattctcccaaggagcattgtgtttgacagtgcaaaaataataaaaaagaagcaaatcacaactgcctcatcaccttatcaagtgcaagattaattgtgtttgacagtgcaaaaataataaaaaagaagcaaatcacaaccgcgtaattgtcttgtaatacaccgcatccattgtgtttgacagtgcaaaaataataaaaaagaagcaaatcacaacgctatggctgatataaacatcctatcgcgtattgtgtttgacagtgcaaaaataataaaaaagaagcaaatcacaacacttaccgtgtcgcccacgaaataggcgacattgtgtttgacagtgcaaaaataataaaaaagaagcaaatcacaacgtaaaagttgaccctgttaccgaaggtcgtattgtgtttgacagtgcaaaaataataaaaaagaagcaaatcacaactgtgtcagtccggaatacaaaaaactttcgattgtgtttgacagtgcaaaaataataaaaaagaagcaaatcacaacgtgcgtgaggagataccattcgcagtatgcattgtgtttgacagtgcaaaaataataaaaaagaagcaaatcacaacatccaacatccaaacgaggcgaaagtttttattgtgtttgacagtgcaaaaataataaaaaagaagcaaatcacaactattacagcatcaatcatgtcggcatataattgtgtttgacagtgcaaaaataataaaaaagaagcaaatcacaacggataattatgttagctaataattatatccgattgtgtttgacagtgcaaaaataataaaaaagaagcaaatcacaacgtgagaaccttgcatgctactatccggatggattgtgtttgacagtgcaaaaataataaaaaagaagcaaatcacaacaatcatatctgcgtatatcttgccacccttattgtgtttgacagtgcaaaaataataaaaaagaagcaaatcacaacggacgcgccaagatcctttagggtggctgcattgtgtttgacagtgcaaaaataataaaaaagaagcaaatcacaactttcaaggtgatgctttcgccaaagtttttattgtgtttgacagtgcaaaaataataaaaaagaagcaaatcacaacacctttcacattatgtcaaaatgactggagattgtgtttgacagtgcaaaaataataaaaaagaagcaaatcacaacaccgaagtcagatacccatttcccatacgtattgtgtttgacagtgcaaaaataataaaaaagaagcaaatcacaaccttttggggtacgtcaacattgttattgtattgtgtttgacagtgcaaaaataataaaaaagaagcaaatcacaaccgatacattacattacatcacactacatgattgtgtttgacagtgcaaaaataataaaaaagaagcaaatcacaacggtgcctgcacttcatcctcgttggagcatgttgtgtttgacaatgcaaaaataataaaaaagaagcaaacctatacattatgcacatcatgttgtgacatcatgcacattgttcttaactatgcaataataataaagtaaatctaaacatgcagaaggattgcatggattatccggatgttatgtttgaaatactcaattatttattacctcccaacgtccacccttatccggaccaacacgacggataagaccatctttcatcagtgattcaagacgacgttgaacactactatggtgaataccgaattttttacctaattcatctctgttgataaatggattgcctttgattaattttagcattaagattttctgatcgcccacagttttctggtcgctgccggttttctgttcggttttctgttcggttgtgcttttatgggtagttttctgggtcaattcatcaattttctggttcattttctggttcaattcatccgttttctgttcggttgctcttttctggttcatcgtatcaagtttttcatgattcggacgataaaggattgcggtgaattgcttaccctcctcatcattcttgaaactgagtttggctccatcttgcagtgaacgaagtatgccggatccaaggccccggtaatcatcccgatccgtttcaggtgtttcatgcgtttctcttgaaacagatgaaacagatgaaacgcatgaaacacctgaaacgttattccggacaagataattaccttctcattatctttgttgattttgcaccctcttttcttatcaatatctgaccttttgcattttcttcatctattttcataccctgaagattgtagtattccacatctccatctgacggtaagtatttgacttcatttactgcgctcatgtctgcaaaattgattgcaatggcattgtaaccggtgtatccataatatccgcatggtataagtagccatcccaacacctcgttgaagacaatgcggtcaaagtcaatattgaaccaatattgctgaactaaactgcttatagaagagaaatggttggcaagggtatatacctgattctctgtgaacattcggataccctctgacttagaaaaggtaaggcataggaatttgttgttttttacaaaactaagacatacttctgttggtgccacaaccgaagagtgtgaataacggggtgctggattgaccgacacgtctactttattcccgttctcaatgagccagttgaatgtccactcatcatcccatacacgccacatgacatcaaggtctgagggttcataaaactcttgtgcgcgaactgctgtcgaaagaaatacgcataataacagtaataactttttcatttctgatagtttattggttgttttgcattattgccgaattttctctttggaaaatgcaggcggatcgagtcaacattccacctcgtcgagcttcctttcggagcatgacgcacataatgaatcaactatccacacaagcctttcgctcctcacggagtgtcaggcatgttaaaccaaaaattgatcattatgaaagagaaagacttttttagagtcttcttgtaggcggatcgaatcaacgttccaccttgccttgcgtcctcacggattgccaggcatcaaaaccaattaaactttgctgttcatgaatacgtcacattactttggtatgtggattgttttggagcaaatccactttctattatattgccatttgttgtatcacgatgcaaatttaatattttttttaattaaatcctatttttagacattttttcttttctgttggattgtttttcatctttgagaattttcataaaaatagccgatgactacgcttagcgcaatcatcggcttgccttgaaccaatattttgactttgaacggagaggtggtatcccgtcagttctggttaagcacctctatctgctgacgtactgactcctcgtggattgcctgaaggatggtcttcatgaagtctgccgacatacccatctccacggctgctgccacgcgactcttgatcaggtcgttgtaacgggtctcctgcactaccggcattgagtgttccttcttatatttaccgatctcacgcgcgatgtccattctcttcttgtacatctcaacaagttcggtatcgatacggtcgatcttatcacgtagattctgaaggctttcggtctcctgcacggtgttgcggtgtaccaacgagccgagtatcactttgagcacttcgggagtgacctgctgattcttgtcgctccacgcatcatcgggtgaacaatggctctctatcataagtccggcaaacttcatgtcgagagcctgctgcgacagagaagagatcaattcacgcttaccacccatgtggctggggtcaatgacgattgggagatgcggaatgcggcggtgaagctcgataggtatgtgccactgcggcgggttgcggtagatgctcttaccgtagaaagagaaaccgcgatgtatggcaccgagacgacgtatgccggcattgtagagacgttcgagggcaccgatccaaagttcaaggtcggggttcaccggattcttcaccagcacagccacgtcggttgcacctgcctccttgagagtgtcggcaatctcctgcacggcaaacgggttagcggaagtgcgcgcacccacccacagaatatccacgcctgcctcaagagcgtcaagcacatgagcacgcatagccacctctgtagcgacaagcatacctgtctcctccctcactctctggagccacgcaagaccctccttgcctataccctcgaaaccacccggtttggtgcgtggtttccagattccggcacggaaaatctttatgccgcccatagcaagctggcgtgcagtagagagagtctgctcctctgtctccgcactgcaaggacctgccatcacaagcggctttgagggatccagaccctccacaatcggttttaaatcttcaaaattcataattatatagtttttttcatttcattcatttcaattccttcacacgcctgagagcctcctccatcttctcttcagtggcacagagcgatatgcggatatagccttcgccattctttccgaagataaaaccgggcacgatgaatacccttgcctcatgaagcacacggtcggtgaatgtggcactgtcgggcgcaccctccggcaattttccccataggaacagtccgcgctgtgcgggatcaaacgtgcatctgagtgcagtcatgatcttctccgccaccttgcgacgtccggcatatacttgattaagctccttataccagctgtcgtcaatatcgagagccttgatagccgcctccatgacgggtttgaactgaccggaatcgatattggatttcattttcctaacccaacctacaaattccgcattcgacgccaccatacccatacgccaacccgacatattatggctcttgctcaaagaattaagttctatggcaatatctttcgcgccctccaccgagagaaggctctgtggattatcgtttagcacaaaactgtaggggttgtcatgcacgatgacaatgccatgacgccgcccgaaatccaccagtttctcgaaaagctccatgcttgcacaagcacccgtaggcatattgggataattcacccacatgagtttcacgccaccctcggaagcgatcctctccagctgctcgaaatcgggcatccacccctcgtcagccttaagatcgtagcttatcacctgcgcgccaagcatacggctcacaccgcgataggtcatgtagccgggatcgggcacgagcaccttgtcgcccggattcacgaaggcaaggctcacgtggagcacaccctcctttgatcctatcaacgggagcacttctgaatcggggtcaagatccacgttgtaatgacgcttataccaccggctcattgcctgacgcaattccgggagtccggatgctatctgataggtgtggttggcgggattggaggcagactcgcaaagggtctgcaccacctccattgcaggcatacggtcaggaccacccacgccgagcgaaacgacgtcgagcccttcggcattcatgcgtgccacttcgcgcatcttgcctgcaaaccaatattcctttatctcgttcacccttgctgcgggtgatattttattttccatttttacctgtgttattgttgatttatcggaatcaattgatgcctacgcgctcctcatattccccgaggatgcggaactcgttggtgagcggacgcaccgcctgcaatgcctggcgatagcggaagtaggatgagaaggtgagatccacgtagaaacgatattcccattcacgcccgactaccgggagcgactgtatcttcgtcaggttgacgtcgtagaaagagaggattgtcagcactttcgagagtgcgccgtgggaatgagggagcgtgaacaccacgctcgacttgttgagctgctcctcacgaggtttcagctcgccggcaaggagtgggtcggcaaggataaggaaacgggtgaagttgcgcttgttggtctctatacccttctccaggatattaagtccataaagattggcggcaaactctccacacactgcggcatgtccggcaagtttctctcgcgctatctcctctgcgcttccggcggtgtcaaatttctccaccatcctcatgtggggatgacggcgtagatattgctcacactgcataagtgccatcggatgcgaatttacctcgcttatcgattcgattgtctctccgggaagggcacagagcacatggcttatcctcacggaatgttcccctatgatcgtatggttgctcttgcgcagcaattcatgattggcgagaaggcttccggcaatggtgttctctatcgccacgatgccgagcatcgacgcatccgtctccaatttctcgaaaagatcggggaaagagtcgcatggtatcgtctccacctcctgaccgtcgaaaaactgacgtgccgccgcatcatggaagcaaccggcaacgccctgtatggcgatcttctttatctgtctgtcttttgtctgcatatatcgttcctttattttcattccgttggggatcaaatccttaatatctccctcaccctttcataatccataccgcggcggcgtgcgtagtctgcaagctgatcctctcccggttctcccacaatgaaataacgtgaagatggatgggaaatatatattccgctcacggtagctgacggaatcattgccccattctcggtgagatgcactcctacactatccatcggaagcaggcttgccaaggaatgattcagcagttggtcaggaagcatcggataacccatggcgggacgaatccccacgtaatccccgcgcagcatctccgcgggggagcatttctcgtcgggtgaatatccccatagcttacgtctcaccttgcaatgcagccattcgctcgtagcctccgctatcctgtcggcaagcgactgacggagcagactgccgtaggagtcgccctcatctttcaagcgggatgcctcttcagccagcatattgccggctgtggctacaaacactcccgctatatcttctgccacaccgcgcggcgcaatgaaatctgacaatgaaagatagtctgatcccttgcgctgctgacgcagcacggggaatctcacgccaccgatctccacgtcgtcaccttcagcaaatgcgggatagaatgtcactgccgccttgccatcgaatctcttatcctcaatcaaggaattgagcaattcgcgggcatcgcgaagcagacgctgcgcctcatcgctatcgggggagatgcgccagctatggaaaaacatcttccagttgatgagctccgccacctccccgagatccgtatccagaaccaccgcattgcccaaccctactgtaggctgaggcgcacgataaccttcccaatcaatcttcatgccattacgacgtgcctcggcaagcggaactatctccactctcttattgccatacccttctctcaactcctcatattccctctcaagcgtggtcacgaaatcccccttctgttcaggattcagcaacttagaggctacgataggattctgggctgcatccgtgacgtgcaccaccggggcatgatagaccggagaaatcttcaatgccgtatgcaggcgcgacgtggtggcaccaccgacgagcagcggtatgtcgagaccagcctcctccattgcccgcgccacattcaccatctcggaaagcgacggggtaatcagtccggagaggcacacaagatcaggacgttcgcgcaaggctgtctcaactattttctctgccgggaccatcactccaagatcgatcacctcataattattgcaggcaagcacaatcgagacgatattcttccctatgtcgtggacgtcgcccttcacggtggcaaacaccaccttccccgccttcgtggaggaggcatctgctgcggcagcctccatgagcggtttcagatggtcgaccgccatcttca

SEQ ID NO: 4461 - DNA, 23747 bp, synthetic construct
  source 1..23747: mol_type = other DNA
  misc_feature 1..23747: note = Synthetic
cgtcgtacgagggcgcgaagcggaatgtcgggtcgcctatgatgtggctttcgagtatgttggtctcctgtgcccagttgcccacgcggcctccgagccagagcagcccgagcagttcgttggcctgtttgtcctgaagtacattgacgctgttggcgaatgtggccacgcattttccgtcagagaatatgtagcgggcggctatgttgtcgggttcgcggaagtcgccgttgtagcatgcgtcaaatatgaccatgcggctgttgggggcggtctcggttatgtcggtcagcacaaggccgcggcgcaggtcgctcagcgagtcggcttttatcgtctcgggtttgtcgtatccggcccaccaagtggagtcaagacccatgccggcatacttgctgctgaaattggcgaatttggcggagtcgcctttgcaacgccgtgccatgtagcgcagatactccttgataaggtctatggcatcgtcggcatattcaacttcgggtgtgcctgacagatactgacgttcaggcatgccgtgctcgtggaatatcgacaggtcgaggtcctcgcggcgcagcatgctcatgacatcttcctttggatagtcgctgaagttgtagcgcatgaagcgtgcgcggccgggagcggtgggggagtcaaacgtacccggcatctgctggcgtatggtcagtgcctcctgcgtccacgctgtaagagaattggagtaagagccctcgcccgtataggagaagaactggtcgagtctgttgcctgacttgtgctcctttacggctttgttgaaaaatttcttgatctgttcatgaggtgcctcgccgttttctatgggttttacgcgggcggagtagatctcgcattttatctgttgcggagagtcggctgcgaggtcgtagtagaagaatgccggctcttccttatcctgcttcagaaagtcaaatttcaggtcgaagtcgtcgtagaagcggtcggagggtaccgaagagtcgcggaaaggatacttttcctcatccatcttgaacgccgaggtcatgtgctgggccttgcgtatcatgggcaccggtatgtcgcctacaaataccacgccctccagtttatgctttttatacaggttttttattactttctttacttcttcaggcgacttccagtcatggtgtacgatgaaggtcgggagttgttctccggcaagtacgtcgcaatagttctgcagttcgccggcacacgcccgccatgtgggggtgtcggtgattactgcaaatgacgtattggtgattttggcggccggcttgacaacggtctgtgcctgaacacccagacacagaccgcttaaagccacaccactgattaataatcgtaagttcattaacggtaatgtatgatttatgtggttagaaatttactcctacagagaatagtacgttgttacggtgattgaatatgtcgcccgatgcttttgtgtagccgaacgacgcgcgtgcgaagaaattcatcttctgcgttctgctgaactgctgtgaatattcggccgatgccccgagacggtagtagtcggttgtcaggtaggcttcatccatttcggtgaggccggtcacggtcggatactcgggattggctcctccgtatacatattcgcccgacagattgttgttgtatcctccgttgaggcttacgagcagacggcggcgcaattgattgccgagtttggcgttgtagcgggccgtgaggtgcatgtacagattctcggagtccatcgatgacgcgggcagtatgtatttgtcatcctgcttcacatagtctactccggcatccacgcgccaagcatactcggcgtcgcggttgcgcagcagcgagtagtcggccgacaggcgggtagtcttgtaggtggagcgtaccgaatggtatatgtcgacccatccctgaaacgagtcggtgttgtcgtatgtgctcacatactgtatgccgtccatatcgcggaatttgcctttcagcgtcaggaagttgctccagtttttgccggtcaggtgagcggtcagggccgcttcccagatgtggtcgttgaccgaggcttccttcttgggtacgtcgggactgcggtcaaagttctccacacggcgcgagtagtcgacgctcgcgagcaggttgatgccttgcgagcggtagttgtactgcaggccgccgccgagtttcgtgccgtgatagtcgaggcgctcgccgtcgcctatctgctccgaagccactccgagaccatacagtatgtaataggtctgagctacggtgacattgatgttctccatacgcgagtcctctttgagcgagcagaactggaagttggcgcctatgctgttgcggtcatctatcttgtagaccacgccgggattgatgtcgagctggaagtagcgggtgtcgacacgcgggtcaagctgcttggcggcaagcgaggccttgtatttgccttctacacctatggcgaggcggtcccaataaaacggggtgcctacgcggaatttcatgtcgtagtactggttgcgccattcgctctgatgggtgtcggccatgaagaagggcatgccgcggtaggggtcggtgatcgatgcgttgaacgatgcgtcgtagatgttgcgctgctcgaagttgaactcgccccatgcataagcgctattcaggttgaggaagccctcgcagcctaccaagatgctcttctcctcggcgccctgctgcggacggtggaagtcgcctttcgtcatgtcgtagcctatgttgacgagcgagtagttctgcagattgtcgagagccgctccggccgcgtttgacgagtgaaaccacaatttctgttctttcagcagttcaagcgaggccgaggtgtagccttgtgccgatacatgtgccgaagtcgcgcctatcagtatagcgagcgcgcccgctttatatatgaagttactcattttattcattgatttaaaccaagttgtttattttagagtatgattccatgccggcatcttggagtggcggtgaagcaccggagttacgcctacttcaaagtcgtcggttgtgttgttgctgtcctgatacaggatggcgccgttggctccgtggccgtcaccttcgagtttgcgggttatgcccttgttgaggtaggctccgcccatggtggcaaaccctgcgtcaagtatggcggggatgtttttggcgtcgacatacgatgcgttgcgtatgcactctacggcatcgaccacgtaggttacaggcacttttgccgctatgccggcccattcgttggccgcgttcttggcctgaagcgacaggttgttgaccggatcccatacttcgtcgtcgggaatacggaatatgacatagccagtaccgaataccgaggtcaggtactgcatgcctgtcatcgtggagttgccgtcgtagaatacgtggatcatgtcttcggccggctggtcgggatagttgacgttgttcatgttgaactcaaactcggctgccgagcagtctaccggtgaagtggggttgtagatctccagcttgtggttggcggcaaactgggctatgacacatgattcgcccggctgcagcgggtagtcggtgccgttgccgggcactttccatacacgctctacatagatgtacttgtcgccgtcctcgctcggccatacgggacgtaccttgtcgaagtcgatagtctcgaggtgggcgaagtggagtccgtcaagatactgcacctcggtggtgttgttggctatttcgtagaactggtcgcggaagtatgagaatgcgttgaccggcttggagccgcagtaatatatttcggaaaacacgaggctgccctttaccgagcctttcatgtcgacggtgaggggcgcgctttctataagtgacttgttgaccatgttgccggccacgataaactcctgtccgtcggcatcatatcctacacccgaaataagtatggtgtatatgccgggcactatgttttctatcgtcgttgaggctccggtgaatgatttttcgtaatgaagtccttcaatatagttgtccatcttgacggtcatgtcgccgaatgttatgtcgccgtcagcacggcctccggtctctataagtgagttgaggtcgaggtctatggtcagtccggctacagtgggggcgtctgatgcctcgttgaactgcccgcaggcagcaagcgtcaatgtcagaaatgctgatgttatatagtttataatcttcatgattcaatatgtgttaaagagtcagtgcaagttctataccgaaatagaagcggttgttgagcagggtgaatgagccgggataacgcttcgattcacgtcgcggatagctgcggaacatgttgttggcgaaaaacgacacgcgcatcatgtcgccgatttccttagtcacgttgatgttgaagcagaagtaggggctgtaactctcttttacttcgagaggatgtgccacattggtcttaagcagatggttgagaccggcatcctttacatcctgaacggtgttgaattgtccctcttcaaagaatacgggcttggcgtcattcagcggtatgtatccgataggaattgtgtcgttgccgtatttaccccagtcggagtctttccatacggtctgggcggtaagagtcacgacaaaaccgatgcttggaaggttgtgggtaatgcgcagcgctgttgacaggcggtcgctgtaagagtggagcgtgcccggtgcatagatggctacatcggtgcgcttgtcagctgttttatcattattgggttcatagaatgtataggagctgttgttgctcttattgtgtatgtataaaccgttaagcgatatgctggtattgattttttcgatacggccgaagttgaagtcaaattctatacctttggaagtatagtttatgcagttgtcaggcgtgtaccacgaagacaggactgaattgctcgatttgagttcgagtttgccgtcggcgttacgctcgtattcgttccatacaaacggcatgaatgtatcgaatgtcttgttgagcgagtagccgtttttaagctgctcacggaaggcggttacggagaatgtcatctggccgaatttcatgtcgatgccggcttccgcttttctgttggtggctatcttcagatttttgtttgaagagtcatatactttggtcgtggtgatgattgttttctggtcatccggaacttttgaacttgtggattcatcgatattcttatattcgaagtaggcctgttcgggatgcagatagagcatggtgggcatctttgccgttacgccgtagcctccgcgtatccacactttggaggggataagctcgaatgaaccgttgaaacggggcgataccgtgccgcctacctccgatgcgtggtcgtaacgcacaccggcctgaaggcgcagctcgcgcagaccgagctgccatgtgaagttttcttcggcaaatacaccgacttgatttataaacggtatgtcgctgtagtcgcgcggacgataagatccgttggcggaagtcacttcacgttgtggcggagtcagagggtcccaagtcttgccgtggcctacattgccgtcggtacggaagtcggcgccgaaaagtatgcggttgttgatcatgcctgtctgcttgaacagtgtaccgacgactttcgcaaatacatttacttcacgtgagtctatatcgtagcgcgagaaataattggccggcatgatgtaagcgtagttattgcggtcggcttccgtgaagttggttatcttgttgccctcggcatcaaatatgtcctgaccggcaaaattggacaggattgttccgtcggttactgttgttgagtacggcgtattgtttgatacggccatttcctgatagaacgacttctttgaggcataggtgcctgacactacatagcgcagtgacttaagccagcctttgttgatgttccacgtgccgttggtgttgaggttgaagttgtactcctcgcctcgcgatgcacgtttgttgtctacgtcgtcaggattgaggtcgcgggagtcctttccgtagtagaaattaaacgatgtgttgctgttgaagttgcgccacaattccttggagtacattactctggccgaaagacgctgatacgttctgtatgactctacgggattgttggtgttgtgggcatagtcggcgtttacgttgagcgctccgcggttttgaccgagaatgaagcctgtgcctatcgaacccatgtacactttcggattggctttggccgtgatgcgcagcggttcgcgtccggccttcgagttgattatcaccgcgccggaagtaaggtcgccgtgctctaccgagggtatgcctcgtattacttcgatagactcgatgttgtcggtcgataccgtacgcatgtcaataccggtagctgccgaggctccaccgcctacagccgtagtctttcctactattgtcgggtttattgtcgacaggttggcattgttggatatgggcgctccgtcgcgtataatggcggtaccgagcgagttcatcgaacctgaacctcgtatagtggcggtcttggccgcgctaaggttgggctcggtggtaagaccgcccggcagcagcgacattacgtcgctcaggctcgtggcctgcatgtggtccatggctgtgcggcctatgatcgacgatgtcgactggcccgcctgcgatgcctgtgccgtcacggtcacctccttgatgcggaagttctcgttttcgagcgtgaagttaagaaccgtgttggcggtaatgttgactgtctgctctacgggaagtttgcctacgtaggttatagtaaggcgggtcttgcctttgggcacaccgcttagctcatagtaaccgcctatgcgcgatgcggtggacatgccgtagtcgggcagtgctattactgcatactctaagggtatggagtcggaattctctctttcgaagattgttcccgacagcttgaccgtgttgtggtgggcgtgctgatgttgcgctgtcactgtcaacacggaaaaagcaattacaattagtaatgaaaacagctttttcatacgttaatgaaatgtgaatggttgataaatcttttttgcaatttgtcgtggtttggcgacttttgctaacaaaatattaggtattctgacgtaaagatatatcatttgcattaataataattaacttaccccccctaatttatacttttttaacattaaaaggcgcaattaacttaacacatataccttatgtccgatatactgtattatttgtcattaatttgtcaccgaatagcgatatgcaaaattagaaactaaccgcagcggcgacaatcgcatcgattgggtaaaaagtgtgtttaaacagcgatttttttaataggtattaggtatttccacggcatatggccatccggatatgcgggcgccgtactaccggcgccctactttacccggtcgggattttttgcgataaattctttccatgaacggggccctttggctatgtcgggcttggccgactcgtagaagtgacataatgcggcaccgagggcgtcggtggcatcaagttccggcaacaggttttcgcggggtatgtcgagtatgcggcgcagcatctcctgcacctgctccttggcggctcctccgttgcctgttattgccatctttatcttgcggggttcgtattcggttatcgatatgtcacggcttatggcggcggccatggccaccccttgcgcgcgtccgagtttgagcatcgactgcaagttcttgccgaagaagggggcttcgatagccatctcatcgggaagatattgctccagtatgcctgtgacccgcttgaatatatggcccagccgcaggtagtgcgactcgaatttgttcagttttattactcccatggctatcatggccggcttgccgcgcttcactccgagcacgccgtagcccatgacattggtgccgggatcgatgccgattattattcgttcccagtcacgcagcgcttcgttgcgcgaggtgctcacggggccacctcctccatgactgtggtgaagtacatgactttgtcggcccacatggaggccatctcggccagcttgacgggttgctgacattcaagccattgttcggtagcctgtactgaagcacttcgaagctgtacggcatagcccgtccctccctccatgtcggcgagtatgcgcatgaaaagaggggcggatagtccgcagtcgtcagtggcgtagggtatgtatgtgtccagtacccacttcttgaagccggcttcagcttcaggggccacatgaaaggtagtgtttataatcattccagattacccagtacgccggcgaaaactatcagtattatgtaaagtacgctgacaacgaagcctgttatcgctcctattatggtccagcgcttggcgttggccgacgatttttcagcctcttcataacgtccggcgctccactggctgttgacattggcggcatttacgatgccgactatgccgaagggcagacagcacagaagggtgacgagaatcgactctacaagccagctcttggggggagccacatagctctgctgctggttgggctgctgctgatagggctgctgatacggagggggagggcatcccggaaccgtattctcgttaggcagctgaggtatggcggtctcgcggtaagcctcggcggaggccacggagggtgccgcaagtgcctcttttatctcatccacgctgtcggcgcgaacccaagtttcgtatccctcggcccatacgagatcggagcctttaagaccgcgggccacgagctggcttacctcaaacgggccaaccggcttttcgttttctgctacgtaaaatttcataatgtaaggtattgtttaatttgtataaatgtcatttaactgatgtctgccggtcgagccggtcaagtgcggagcgctccttgcggcgctgtctgatgaagcggggaatgaaggctaaatgccgcgctatggtaggcacccagccgtagtagtagcccatgatgcgcatgcgctccagcagcgaggcgcggcggttggccgtggtggtgccctcgttgaggtagtcgataatggtggcgggtatgtatacgttgcggcgtgaacgctgcaagcatctgatgcaccattcgtagtcggccgaataccggtacttcaagtcgtaatgctgtgccagcttgcggtttacgatgaatgcctgatgacacactaccatgccctcggcaaaacttttgagcgtaagccggtcgggtgcggtgaggtggcgcggggctatatagcgccgttcgctgtccacaaggtcggtctggccgtatactatgccgggaaagtcgttgtccatcacggcactcgctatcttgtcgagagtgtcggcggagtgaaaggtgtcgcccgcgttaagaaatatcagatactcgccggtggcaatgtcgatggccttgttcatggcgtcataaatgccggtgtccttgcttgagaatatcttggcctgcggtattccggcatcgatggcaagtttcagtgtcctgtcttttgacaccccgtccataacaatgtactcatacaggtcaaacgtctgctcccgtacgcttgcgagcgtcgggggcaatgtcgactcggcattgtacgtgacggttattatggaaaacaacggagacattacagcttaagcgatagatgttcttaatgcaaatatacatacaattcaaataaaacccaaagactgtgcaaaatttagcgaaatattttacacatataaattaatgccggttgaatttggataaatagtaatgcttgcatatatttgcaaaaaccataaaaagaaagagggcttgaggcccccgttccagatgttttcacaacggaatactccttattgtgatttgcttacttttatggtgcaaatatagacgtaaatatacaaacttgcaaattttttcatatggaaaaagcgctgaatgacaatataagagttattttgggattggatctcggagtagggtcgataggttgggcacttatcgaagtggatgaatccgacaagcctgtgcgtatagtcgatgcaggagtaagaatcgtaccgttgactaccgatcaatccgacggttttgtcaaaggcaacggtaaaagcgtgaatcagggccgtaccgagtgccggacaatacgcaaaggctatgaccgctatcagttgcggcgtgctgatttaaaagaggctatttccggattgggtatggactatggtcccgaacttgtagccttgcctccgttgacattatggaagttaagagctgatgcggcaacaccgggatgccgtctcgccttgtctgaaattgggcgagtgttgatgcacataaatcagaaaagagggtataaacatgccaagtcagacttgggcgaccgcaagcagactgaatatgtgacttccgttaataagcggtataaagacatacaggatgccgggatgactgtggggcaggctatatatgcacgtcttgaggcatcggctgtgacgggtgagaacggtaaggttcaatgtacttatcgggccaaaggcgaggtatttccgcgcgcagcttatgaagcggagttcgatgctgtgatgaaagcacagcagccgttttataaagatgtgctgaccgatgaggcgatagcgcggttgcgcaatattatcttctatcagcggccgctgaagtcgtgcaagcatcttgtgtctatgtgcgattttgagaagcggccttatgtaaacgcacagggcgatatcgtttattccggtactaaagttgcgccgcgcacctctccgttggcgcagctttgtgccatatgggagtcggtcaataatatcgttctgaaaagccgtcgtaatacatcgaccggtacgctgtttgatacagctgctgagggacgctatgaactgtcgattgacgaaaaacgcgatatcgtggcgtttatgaacactcatgaaaagttgaccgtgaccgagctgttgaaaatactcggattgagtaaaaaacatggctactcggccggcgaggcggtagggaaagggctcaaaggcaatactacttactgccggcttaagaaagcgctcggcaattatagcggtgctgaagacttgctgaggtttgatgtgcataatgtcgattcgggcaaggtcgatgaggaaaccggcgagataatacttgagacgagcaatgacctcatggagcagccgctgtataaactgtggcatacggtatattcaatcaacgacaaggaggagttgcgtgctgcacttgccaagaagtttggcatagatgacgatgaggtggtggagcggttgtatgccattgactttaccaaagacggctttgccaataagtcggcgcgattcatgcgcaggttgttgccttatcttcagcagggacttatgtacagcgaggcatgtacatatattaatgtgaatcactccaatagccttacatcggaggagaagctgcgacgcgagcttaaaaaccgtcttgagccgctgaagaagaatgaacttcgtcagcctgttgtggaaaagatattgaaccagatgataaatctggtcaatgccgtgtttgaccgttacggacatgtcgatgaagtaagggtggaactcgctcgcgagctgaagcgaagcaaggatgagcgaaacaaaatgtggtctgataacaccaagcgagagcgtgaaaacaaacagtatgctgaacggatattggaaaatagtatcgctccctcgaagaacaggatcaagaagtatcgcatgtgggaggagtcgggcaagctgtgtatgtattgcggcaaaactgtcaacttcaaggagtttggagagggcaatggcgccgagatcgagcatatattgccgaagtcggtatttttcgacaacagtttctccaatgtagtgtgtgcgtgccgcaagtgcaatcaggacaaaggcaacatgactgcatttgattacgtaaagaagatgctgcccgataagttcgacagttacgtggcgagagtcgaggaactgtatgaaaatcataaaatatccaagacgaagcacgaccgtctgcttatgtcgcagaccgacatacctgaggatttccttaaccgtgacctgcgagagacacaatacatatccaagaaggctaaggaattgctgctttcggttgtgcgcgatgtcagcgtaaccaccggttcggttaccgactttttcagacatgtatggggatatgatgaaatactgcatgatctcaatctggaaatatacaaaatgagcgatcgcactcagatgatggaatatatccacaacggtcagcgacatgtcgaggagcgtataactgattggtcaaagcgtcttgatcatcgtcatcatgccattgacgcgttgactgtggctttgatgaagcctgcctatataaatcggctgaaccgtcttaatactgaacgtgacaggatgtatgaggaactgaaaaaacagtcgcccgagtatcagcgtaaacattcgctactcgaggactggagcgcgcgacagcctcatttcacggtcagagaagttgtggaagcggtcaagcgcatagctgtgtcgttaaaggcaggtaagaaagtcgtcacgccgggcaagcggctggtttataaaaacggtaaacgcgtggtaaagcagaccggtattcttgtgccgcgtggtccgttgacaaaagagagcgtgtatggtaaaataaaggtgcttgaacgaaacaggccattgaagcagttgctcctgtcgccggaggaaattgcggatacagctgtacgcgaaaaggtcatggaagtgcttgggctttatggcaatgatgcgaaaaaggctcttgcatatattcggaagcatcctgtcgtggtcaatggccgggaagtgaccgctgctgattgctatgtcgagcggttcgtgataaagaccgacataacggccctgaaatgcaaagatgttgagtctatagtcgatgagggggtgaaacgtgccgtacgcgcacgcatggcggagtgtggcaacaatgactccgcatttcagaaaagtcttgtcgaccggcctgtatgtgtagataaaaacaacagatatccggtgtatgcggtgagattgtttgacaactggggccctaactctatagctccggtaaaaaaggactcgtcagggaagaccatcggttatgcagcgaagcaaaataatcaccatgtagcgttatataaatcatatgatgataagatgcatgagattgtacttccattttgggatgctgtattgcggaaacgttatggactgcctgtcgtagttgaaaagcctgacgaggtatgggacgacattgcagggcgctgtgaagatatacctgatgatgtcctttcaactttgcctcagcccggttggaagttgtttatgacgatgcagctaaatgagatgtttgttctcggactttccgatgcagagtttatggcggccattaaagataataataaggcagtgctcacagctcatttataccgagttcagaaactcggttcgctctactattatttccgatttcatacacagactactgtcgatgctaaaaatgaatcaaaagacatggaaagtaagacacttttccgtatccaaagtttaggagttctattagctttaaatccgataaaggtaagagttaactacttgggcgaaattatacctatatgatattatgataaagcgtacgttatatttcggcaacagggcttacctgtcgttggagaaccggcagatggttatctctaaacttgatgatgacaataagcccgtgaaggtgacgcgcccgattgaggacattggagttgtcgttatcgacagccctatggtgactataacctcgggattgatggaagccctgttggaaaataactgcgctgtcataacgtgtgataaaagccatatgccggtagggctgatgttgccattgtacggcaactcgacccaaaacgagcgtttcagagaccagcttgatgcaagcctcccgttgaagaagcagctgtggcagcagactgtatcgcagaaaatagccaatcaggcggccatattaaagcacatcggcatcgaatgtggcaatatgatggcatggtcacgttcggtgaaaagcggcgataccgacaatctggaaggtcgggcggcggcatattattggcgcaacatatttccggaatatcccgactttacccgagggcgtgaggggccgcctcctaatgccttgctcaattacgggtatgccatactgcgtgccgtcgtggcgcgtgcattggtgtcgagcggcatgcttcctacactaggcattcatcatcataaccgctacaatgcctattgccttgccgatgacattatggagccgtatcggccttatgtggacgagcttgtccttgacatgcttaaatcgggttataacgactttcttgataaagaggcaaaagcccggttgctgtcggtacccgcgctggatgttgtaataggagggcgccgcaggccgttgatgatagcagtcaccgaaacaacggcttcattatataagtgttttagcggtgaatgccgtaagatatcttatccagaacgttgattgtggaccgtcttagtgaatatcgcatcatgtgggtattggtgttttttgatctgcctaccgagacgaaacgtcagcgcaaggaatatgccaaattccgtaagctgttgatatgcgacggcttcactatgtttcagttttcaatatatttgcgtcactgtccgtcgaaagaaaatgccgatgttcatatacgcagggtcaagagcttcttgcccccgcatggaaaagtcggaatactgtgtataacagataagcagttcggcaacatcgagctttttcaaagcgccgctccgtatgatgccgacacccccacacagcagttggagctgttctgaattgccgtaaaaacaccgatttttgcattttaacagtccaacggagcttagctgatgctgtgtcgtaatgaacgggcaatgtaaaagccggttgacaactgaaagcattgtcaaccggctttatttttcgtatcaacggattgtatgtctatttgtctatcaattctttagcctcgtctacggtatggtgggccttttcgcgaagtcggcctatctgctgttccacatttccgtaaatatcacgtattgtacggtccacctctcttcttattttacgtccgcgcatggtggtgcgtgaatatctctcggcatacattcctgtaagagctcctaatacgagtcctacgaaaaaggtttgggtactgcatttcataattaaaacgtattattaagttgataaaatcaccttaataacctgtaggcggtgtgaaatgtttcccgtgtaaccgaatattaacatccctttgtcgggctgttaaaaagtgcttatgacagcgaggctatgaccttctttatgtcttgtgcgagggcgttggcctgctctacggtgggcgcttcggaatatattcgtattatgggttccgtattggacttgcgcagatgtacccagcagtcggggaagtctatcttcacgccgtctatgtcggtgatcttttccgatgaatagcgctcctttacggcttcgagtatggcgtcaacgtcaatgtcgggcgtaagctctatcttgttttttgctatggcataagccggatagcctgcctttagctcgctcaccctcttgccgctcttggcgagtaaagttaagaacagagccacacctacgagagcgtcgcggccgtagtgcgatgccggatatatgactccgccattgccttcgccgcctatcacggctccggtctctttcattttggtgactacgttgacttcacctacggcggcggcagcgtagctgcatccgtgggcggcggtcacatcacgtagtgcgcgcgacgagcttaggttggacaccgtggagccgggggtatggctgagcacatagtcggctacggctacaagagtgtactcttcgacaaacatatctccgttttccattactatagccagacggtctacgtcggggtctacgacaaagcctacgtcggccttgccgtcgcgcatcagatccgatatctgggtgagattttcaggaataggctccggagtatgggcaaattttcctgtggcctcgcagtttagctctattatattttttacgccgagtgcacgcagcagctggggtattacaattccgcctacggagtttaccgcgtcgacagccaccgtgaaatcggctttggctatggcttcggtgtccacaaggtcaagcgcaagtacggagtcgatgtgcttgcggttgtatgtatcgtttatatacacatggccaagcgagtcaacgtcggcaaatgtgtactcgtcgttttcggctatgcggagtacctccttgccctgcgcgtcgttgagaaattcgccgtcgctgttcagcagcttcagggcgttccactgtttgggattgtgcgatgcggttatgatgatgccgccgcatgctttttccataaccacggctatctccgtggtgggggtcgaggccaagcctatgtttatcacgtcaaatcccatgccggtaagggtggcttccacgagcttgctgaccatggggcccgatatgcgggcatcgcgtcctaccactatagtccgcgattttgtgtcggtgtttttgcctataaagtgggcatatgcggcggtgaacttcactacgtccactgggctaaggccttctccggcagcacctccgatggtgccgcgtatacctgatatggattttatgagtgacatgataatgctgttataattgttctgtattcgttaaatctggctcttgtagtagcgtatggtataaagatagggtattaccaccgctatttcgtcggagcgtccggcctgtgagcgtaccactatctgcacctcgcagttgtagcccaagtagccgagcggcacctgtatgccttcgccccaagccgacgtattggtcgacgagaagttctgatagcgtatcgactcgcttattgacacgtcttccgcgttgccgtcgcctgaaggcagcgtcttgtccttgtagtagctcagattatagcgtgtaaagcgtagatacacgaggtcgttgactttggggcgtttgtccatgttgccgttgttgatgaccctcatgtatacgttgccgtcgccgtccatgcgatagaagggcgcgtcttcgcccggatgcttttcaagatattggagcgcttcgccgagtttgacgccgtagtcgggtgaattcgggcttaccgactgttgctgaagcatcttttccgcaatctcctgacgggttatgaataccgagtctttgggtacttcattgatgactttctggtcggcaagatagttatttatggatttggtctccgcactgagcaggtctgcatagctctttgagtcgttgcagccggttgcgaggattgataccgcggtaatcgtgcaaagtgaaatgaataggttgcgtaatgatttcatcttttattgttctgaaaataaattcgttaagttttatctatggttttcctcttttaaatattcgtccatgaacgtcagcgtcgacttgaatatttctatcgcttcgtcaagggtgcagggcagttctcctcctgcggcgtttacatgtccgccgccgttgaagtaacgttcacacacacggttcaccggaaaatcgcctttgcttcgggtcgacacctttatgtggcgctcgtcctcgcgcagaaatacggagtagatgacatcctcgatggcaagcggttcgttgacaaggccttcggtgtcaccgcgctcgtagtcgaagcgtttcaggtcatcggccgagagcacgagcagtgcggctttgtgctcttcaaatatctccatgcgcgacactgcataaccgttcaacttcagcacattggctttctttgtgttcatgacgcgcttgtatatgtcatctttgttgatgcctttgcgtacaagttcggctatgattgtatacaggtccgggtcgttggagttgtacgagaagttgcccgtgtcggtcatcatgcccgtgtatatacatgtggcggccttgcggtcgatcatgttaaacagctcaaggcggcacaatagcctgaatattagcgctgatgtcgatgactggtcggtgtgcgatatgacgacgtcggtgaaatcctgcggactctcgtggtggtcgacaagtattttcttggcttgggcggcagctaatgcgtcggccatgcggtctacgcggtagagggcattgaagtcaagacagaatattaagtcggcgtcttcgagcaattttgttgcgaaatcggtgtacttggagtagggcacgatatctttggcccccggcagaaaacggagtgtctccggtatgcggtcgggagttacgatacgggcctctttgcctatgttggcgagagtgtgtgacagaccgagcgatgaccctacggcgtcgccgtcgggagccatatggcacgtgatgactatgcgctcgctttcttcaagaagctcacgcacagcctttacatcggactcggctattataggtcttagcatatagttttatatatcaagatgcaaagatacgaataagtcgagcgcaaaaccaaatttatttgagttttgccgagcgaaagtatctaagacggatgtcaaagatacgaataagtcgagcgcaaaaccaaatatttttgagttttgccgagcgaaagtatctaaatccgtgaagtcaattgcgcgatttccgtaatttattccacatcgggaggccttttatgaggtgtatgagcacggtaatgctcatggcgatgccgatgctgtaatgccacaagccaagatgaggtattttaacgggtgaaagcaattttaccgttccggtcagtaacgtggcggtaaacagaatgataagcagccatgtgtcggcgtaaaaccacatgaacctgtttttcacggcagtcagcgctttgctgaattgaagcgaatgaataatgagaagcacggtcatggcatacccgaatatccagtgtatggattttattacgcctcgtggttgtatcagtatgccgtggcttttgagatgcaggatgatgcccgctattagtgttacggcaaatgccacaaccagtgcaatacctatgtccgctttatttttcattgattaaaaatgaattgcttgcattatcagtgcaataatgtcttattaattaaatgcctgactgtccaaaaagtttacttttatgtgaaacatgccgggagatagaaaacgggcttattccgcactgtcatattcaacatatatctgccatcttccttgcgatatatattcactctgaatttcatatgggagagaggtctgttgtcggtaattatggtaaaaccgatgtttttcagccatgcgcggtcttttacattaaccggtatcgccaatccttgtcctgcggctttatacccttcgacattaataaaaataaagccgcctccaccttttcgtcctgctgttttcccctttatcctttgtggttttactacaacctcacttaacattacggcattatccgcgagcctgatggtgtcgggtatattatgtatgtctttgacagcgaatgtctgtgccgaagtttcggttaattacacctacactggcataagttattggtttttcggtagattccgatactactgtccgggcgaatccgggtaggcagcccgatgctaaaaataaatagcagaacaattttggaagtaaataattcatggtacaaaattaactatatttttatgatatcatgaattatttcgtttaaatcaaaacatactctgaccgcgtagtcaaaattaggtaaaaatcactatattttctcttgccgtggttgaaatatcacgattttagcctaaatttgtgtttacaatctataatgtgctgcggcactgactaaaaaatactatggataaaaaaagattttgcataggactgctccctcgcatacttattggcatagcgctcggcataggggtcggatacgtcatgcccatgtggggcgcgaggttgttcgaaacgttcagttgtctgtttggcagcttcttgggctttcttgtgccgtttattattgtcggctttgtcactcccgctattgccgatataggccaccgggccggcaaggtgctgctgcttaccgccgtcatagcttatgccgccactgtgtcatccggattgctggcatattttgtcggcgaactgactttcccttcactcataaccccgcgtacacttgacagccatgtggctgaagctgtgggcgtgacgccgtattttaaggtggagatacccgccatgttcggtgtgatgaccgcgttggtgtttgcttttatgaccgggttgggtatagcctgcagcaaaggtaccgtgctccgccgcggggccgaggagttccgcgatatagtcagcgccaccatacgtactgtcatcataccgcttttgccgctttacatattctgtatatttctcaacatgaccgtgtcggggcaggtgggcagtgtgctgatggctttcatcaagattatcggcataatctttcttatggcggctgtgatattgatattgcaatattgtgtggcggcgctgtttgtgaggcgcaatccgtttaaattgctctatacgatgctgccggcctattttactgcgctgggcacccagtcatcggcggcgactatcccggtcactctgcgtcaagctataaagatgggagtaagcgaagagatagccggcttcgtggtgccgctgtgtgccacgatccatatgtcgggcagcacgctgaagatagtcatgtgtgcattggcgctcatgatcatgcacgggcttccgttcagcctgcctatgtttgccggatttatcgccatgcttgccgtgactataatcgccgctccgggcatcccgggcggggctatcatggcctcgcttggcctgcttgcttcgatgcttggtttttccgagcaggatcaggcgctcatgatagctctctatatagctatggacagtttcggcactgcctgcaacgtcaccggcgacggctttattgcgctgattgtcgataagtttttcggcaaaaaacttcctgacgagaagcggattgacgataatctgattggcaacgactgatatagttcgaggcttatcaggtgacgcctcctgactacaccgttatatcgtgagcctgcaaaggctctcaccaaacgttagccggggacaaggcatccgcaggatgacgcagtctccggtaagtagtacaaccccgtttttgagtctgcaaagactcatgctcatgtcatatagccgaagtaagcacgggtcttgtcggactcgaacgggttttgccgctgacctgtaggccgctttgggcagccatttggtactatggtgcgattatattgtcaatatgtgcttcgttaagcatttttgatgataatatgttgattttttgataaatttttacgaaatttgcagccaatttgtataggaatatattgtactaatctgtaataatttagctcatgaaaaagagtgctcttcagcaagcgcgtgccgcttatcagcccaagttgcccatcgtactcacaggtgcggtaaaggcggttgagggccacgccactcaatcagtggccgatcaggacgagatcaagaacttgtttcccaacacctacggccttcccgaaatacactttgaaaaggatgccaatcccgtcaaaggcacgcccctgaatgtgggtgtcatattgtcaggcggtcaggctcccggcggtcacaacgttatcagcggacttttcgacggtataaagaaagttcatcgcgacagccgtctctacggattccttatgggccccggcggcttcgttgaccatcagtatatggaacttacggctgatattatcgatgagttccgtaataccggcggtttcgacataatcggctccggacgtaccaaacttgagacaaaagctcagtttgacaaaggccttgagatacttaagcagctcgacataaaggcactcgttataatcggcggcgatgactccaatacgaacgctgccattcttgccgaatactataagtcaatcaatgccggtgttcaggtcataggctgccccaagactatcgacggcgacctcaagaatgaagtcatcgagacctcattcggcttcgacaccgccactaaggtttacagcgaggttatcggcaatatacagcgcgactgcaactcctcaaaaaaatactggcacttcatcaagctcatgggccgttcggccagccacatcgctcttgagtgcgctctccagtgtcagcccaatgtctgcatcatctccgaggaagtggaggccaagaagcagaccctcaacgacatcgtgaattctatcgccgacaccgtggctgcacgtgccgccaacggtaacaatttcggtactgtccttattcccgaaggtcttatcgagtttataccggctatgaaggctcttatcgccgagcttaacgagctgcttgccgttaacgccgaggaattcgccgctatcgaccgcgccaaccagttgagctggatcgttgaccgtctaagcgatgagaacgccgctatattcaacagcctgcccgaaggtgttgcccgtcagctctgtcttgaccgcgacccccacggcaacgtacaggtatcgcttatcgagaccgagaagctgctcggcgagatggttgcacgccgtcttaacgatatgaaggccgagggccgttatgtaggcaaattcgcttcactgtatcacttcttcggttacgaaggccgttgcgccgatccctccaacttcgacgccgattactgctatgctctcggcttcaatgctgcttgcctgatcaacgcgggcgttaccggctacatgtcgagtgtacgcggtcttaccaagccttctgtacagtggaccaccggcggtatacctatcactatgatgatgaacatggagcgccgtcacggtgccatgaagcctgtaatacagaaagcgcttgtaagcctcgaaggtgcacccttcaagaagtttgccgcttgccgcgacgcatgggctgtcaataccgacttcgtttatcccggtcctatccagtacttcggcccggcttcggtatgcgaccagccttctctcactctgaaatacgagcacgagaagcgttaatgatataaacccgaatcatcagcttgcagggaccgcctcgggggagcaatgtcgctctcaggcggtctctttatttttgcctcctcctgaagcgcatagatgcggccaagaccttccatgaccgttatattgtccagcttggttcctttctcatactccgccacgagcatttcatgtatgtatcggcgtattttcgcccggggtacattgaattggatatgcatctcgttcacgtatgccgtatcattcattatcctttcgagcatcgtttccggcgtaaccgtatcatttcgacgttgcggtttctccggtgtagcgcatacggctggcgtgcatacgggttgtgcctccggcttcttttgcgggcttttttccacacctgtcgtcttgctgatgcttctcttgtgtctgttctgcttggcgcgccggcgacggttcagctcggggcatatgaaaagaaaca

SEQ ID NO: 4462 - DNA, 23747 bp, synthetic construct
  source 1..23747: mol_type = other DNA
  misc_feature 1..23747: note = Synthetic
agacgacggtgcaaaacgaaatgtcgggtctcctattatgtggctttcaaggatatttgtttcctgtgcccaatgtcctacgcggctgccgagccatagtagtccgagcaactcgttggcttgtttgtcctgaagtacattgacgctgttggcgaatgtggcaacgcacttgccgtcagagaatatatagcgggcagctatgttgtcaggctcgcggaagtcgccgttgtagcaggcatcaaatatgaccatgcggctgttgggagccgtttcggttatgtcagccagcacgagaccgcggcgcaaatcgctcagagagtcggcttttatcatttccggcttgtcatatccggcccaccaagaggagtcaaatcccatatcggtgtacttgcggctgaagtcggcgagtttggcggagtcgccattgcagcgtcgggccatgtcgcgcatcgattcctttatgaggtttatggcgtcgtcagcatattcaacttcaggagtgcctgacagatattggcgttccggcatgccgtgttcatgaaatatcgacaggtcaagatcatcgcggcgaagcatgctcatgacatcttccttcggatactcgctgaagttgtagcgcataaagcgtgcacgtccgggagcggtgggcgaatcaaatgttccgggcatctgctggcgtatggttagagcctcttgtgtccaagccgtaagggaattggaataagagccttcaccggtgtatgagaagaattgatcaagtttattgcctgactgatgctcttttactgccttgttgaaaaatttcttaatctgcttatgcggatcctctccgttcttgacgggttttacccgggcggaatagatatcacattttatctgttgcggagagtcggccgcaagttcgtaatagaagaatgtcggtttttccgggtccttcttaagaaaatcaaatttcagattgaagtcatcatagaagcggtcagagggtactgaagagtcaacaaacggatatttttcttcatccattttgaaagcagaggtcatgtgctgggccttgcgtatcatggggaccggtatgtcgcctaccagaaccacaccctcaagattatgtttcttatgtagattctttattgctttttttacttcttccggtgatttccagttgtgatgcacgatgaacgtaggaagttcttcttcggcaagtacgtcggcatagttttgcagctcatcggcacatgcctgccatgtaggagtgtcggtgattacagcaaatgacgttctggttattttggcggccggcttgacaatggtctgtgcctgaatgcccagacacagactgcttaaagccatacaacctattaatgatcttaatttcattatcggtaatttgtgatttagatggttagaaatttattccaatggagaacagcacgttgttacggtgattgaagatgtcgcctgaagcttttgtgtagctgaacgccgcgcgtgcaaagaaattcatattctgtgtgctgctgaactgctgcgagtattcagccgatgctccgagacggtaatagtcggtggtcatataggcttcatccataccggtgaggtcagtgacggtgggatattcgggattggctcctccgtatacgtattggcctgacagattattattgtatcctccgttgaggctcacaagcatacggcggcgcaactgattgccgagtttggcgttgtatcgtgctgcaagatgcatatacaggttttcagaatccattgatgatgccggcagaatgtatttatcgtcctgcttcacgtagtctattccggcatccacacgccaagcatattcggtgtcgcggttgcgcagtagcgagtagtcggctgacaagcgggtcgtcttataggtcgagcgtatggagcggtatatgtcaacccatccctgaaacgaatcggagttgtcgtaggtgctcacatactgtatgccgtccatgtcgcggaatttaccttttaatgtcaggaaattgctccagtttctaccggtaagatgagctgtcagggcagcgtcccagatatggtcgttgactgaggcatctttctttggcacagtggggttacggtcaaaattctctacacggcgagagtagtcgacacttgcgagcaggttgaagccttggacacggtagttgtactgcagacctccaccgagttttgtgccgtgataatcaagacgttcaccgtcgcctatctgctgcgaagccactccgagcccgtatagtatgtagtaggtctgtgctactgtcacgttcacgtttgtcatgcgtgagtcttctttaagcgtacagaactggaagtcggctccgacgctgttgtggttgtcaatcttgtaaaccacaccgggattgatgtcgagctggaagtagcgggtgtcgacacgcgggtcaagctgcttggcggcgagcgaagccttgtatacaccctctataccgatggcgaggcggtcccaatagaagggagttcctacacggaatttcatgtcataatactggttgcgccagttgctaagatgagtgtcggccatgaagtacggcataccgcggtatgggtcggttatcgatgcgttgaacgacgcatcgttgatgttgcgctgctcgaagttgaattcgccccatgcatatgcgctgttcaggttgaggaagccttcgcaaccgaccgataagcttttctcctcggcaccttgctgcgggcggtggaagtcgccttttgtcatgccgtagcctatgttgacgagtgaataattctgcagattgtcgagtgccgctccggctgcgtttgacgaatgaaaccacagtttctgttctttcagcaactcaagcgaggccgaggtgtagccttgtgccgatacatgtgccgaagtcgcgcctataagtatagcgagcgcgcccgctttatatatgaagttactcattttattcagtgatttaaactaagttacttatttgagagtgtgattccatgccggcatcttggagtggcggtgaagcaccggagtgacacctgcttcgaagtcgtcggttgtgttgttgctgtcctgatatagtatggcgccgttggctccatgtccgtcaccgtcgagtttgcgtgttatggacttgctcagataagcgccttctatagttgcaaaacctgcgtcaagtacagcgggtatatttttagcgtcaacgtacgatgcattgcggatacattccacagcatccactacataagagacggggactttcgccgatatgcctgaccattcattggcggcgttcttggcctgaagcgacatgttgttgacaggatcccatacctcgtcctcgggaatacggaagatgacatatcccgtgccgaacaccgatgtaagatactgcatgccggtcattgtagagttgccgtcgtagaatacgtgaaccatatcttctgccggctggtcgggatagttgacattgttcatgttaaactcaaattcggcgctcgagcagtcaacaggcgaagtgggattgtagatctccaacttgtggttggcggcaaattgggcgattacacatgactctccgggttgcaggggatagtcggtgccgttgccgggcactttccatacacgctcgacatagatatacttgtcgccgtcttcgctcggccatacggggcgcactttgtcgaagtcgatagtctcgagatgggcaaagtgaagtccgtcaagatactgcacctcggtggtattgttggcgatttcgtagaactggtcgcggaagtatgagaatgcattttcaggcttggagccgcagtaatatatttccgagaatacaagactgccttttaccgacccttttacgtcgatgattatgggcgagttttcgataagcgatttgttgacgagattgcctgctacgataaactcctgcccatcggcatcataaccgtgacctgatataaggatggtatagataccgggcactacgttctcgattttggtcgaggagccggtaaagttttgctcgtaatgcagaccttcaatatagttatccatcttgacggtcatatcgccgaacgttatgccgccgtcagcacggccgtcggtggctataagcgagtttagatctatgtctatggtaagtccgtcgactgtgggtgagtcagacgcttcattgaactgcccgcatgaagcaagcgtcaatgtcagaaatgctgatgctatatattttataatcttcatgattcaatatttttaaagagtcaatgcaagttctataccgaagtagaagcgattattaagcaagacgaaggaaccgggatatcgctttgattcatgccggggatagctgcggaacatgttgttggcgaagaacgatacacgcatcatgtcgccgatttcctttgttacattgatgttgaagcagaagtagggactgtagctctcctttacttccagcggatgagccacgttggttttaagcagatggttgagcccggcgtcctttacatcctgcacggtgttgaagaggccctcttcgaagaatacgggcttggcgtcctgcagggacaggtatccgatgggaattgtgtcgttgccgtatttaccccagttggcatctttccatacggtctgggcagtgagtgtcactacgaaacctatgctcgggatgttgtgggtgacgcgcaatgctgttgagaagcggtcgctgtaagagtgaagcgtgcccggggcatagatggccacatcggttcgcttgtcggctgttttatcattattaggctcatagaaggtatatgaactgttattgctcttatcgcgtatatataaaccgttaagcgatatgctggtgttgattttttcgatacgtccgaagttgaagtcaaattctataccttttgatgtgtagtttatgcagttgtcaggcgtgaaccacgaagacaatactgagttacttgacttgagttcgagttggccgtcggcattgcgcttgtactcatcccacataaacggcatgaatgtatctaaagtcttgttgagtgaatagccgtttttaagctgttcacggaatgcggtgacagagaatgtcatctggcctaatttcatgtcgatacccgcttctgcttttcggttggaggctattttcagatttttgtttgatacatcgtatactttggtagttgtgatgaagagttgttcttcttcaggtatttttgaacttccgatttcatcaagattcttgtactcgaagtaggcctgttcaggatgcaggtataacagtgtcggcattttggcggtcacaccgtaaccaccgcgtatccatagtttattaggtatcaattcaaacgaaccgttgaagcggggcgatacaatgccgcctacctccgatgcatggtcgtaacgtacaccggcctgaaggcgcagttcgcgtagtccgagctgccatgtgaagttttcttcggcaaatacaccgacctgatttataaacggtatgtcgctgtaatcgcgcggacggtatgagccgttggcagaagtaacttcacgctcgggcggtgccgtgggatcccaaattttaccgtgacctacattgccgtcggtacggaagtcggcgccgaaaagtatgcggttgttgaccatacctgtctgcttgaacagtgtacctaccactttggcaaatacgtttacttcacgtgaatcgatattatagcgtgagaagtagttggcaggtagcttatagctgaatttgtctttgtctatatcggagaaattcgtgattttgttgccttcggcatcgaagatatcctgaccggcgaaattggacagaacggtgccgtcggtggtggtcattgagtatggtgtattgttggacaccatcatttcctgatggaatgatttcttcaaggcgtaggtacctgacactacataacggagtgatttcagccaacctttgttgatgttccacgtaccgttggtgttgaggttgaaattatattcctctccgcgggacgcgcgtttggaagcctcgtcatcggggtttaggtcgcgggcatcctttccgtaatagaagttgaacgatgtgttgctgttgaaattgcgccataattccttggagtacatcgttctggccgatatgcgctgatatgtcctgtaggactccacaggatcgttggtattgtgagcgtagtcggcgttgacgttgagcgctccgcggttttcaccgaggagaaagccggtgccgatcgaacccatatatactttcggattggccttggccgtaatgcgtagaggttcgcgtccggctttggaatttataattacagcaccggatgtaagatcgccgtgctctaccgagggtatgccccggataacttcgatcgactcgatattgtcggtggagacagtacgcatgtcaataccggtagttgccgaaacacctccgcctgtagctgtcgttttgcctgctatggtggggtttatggtcgacaggttggcattgttggatagcggtgcgccgtcgcgtataatagcggtaccgagtgagttcattgagcctgaaccgcgtatgttagcggttttggctgcgctgaggttcggttccgttgacaattgccccggcaacagcgacatgacatcgctgaggcttgtagcctgcatgtggtccatggctgtgcggccgatgattgatgatgttgactgccctgcttttgatgcctgagccgtaactgtcacttccttgatgcggaagttctcgttttcaagggtgaagtcgaggacagtgttggcggtcagattgacagtcttttctaccggaagtttacctacataggtgattgtgagcagtgtcttgcccttgggtactccgctgaactcgtagtatccaccgatgcgtgatgccgtggacatgccgtagtctggcagtgctattactgcatactctaagggtatggagtcggaattatctctttcgaagattgttcccgacagcttcaccgtgttgtgatgggcgtgctgatgttgcgctgtcactgtcaacacggaaaaagcgattgcaattagtaatgaaagcagctttttcatacgttaatgaaatgtgaatggttgataaatttgcaatttgttgtggtttgccaacatttgctaacaaaatattatataatctgtcgtaaagatataataaatgtattaatacttattaactatctcattcgttttagcgttttttaacacaaacggacgtaattaacttaatacagatatcttcttttataaatacattataaaataattgtcattttgttgtcaccaaacaatgatatgcaaaattaggaattagcaactgcgatggcaatagcatcaatcaagtaaaatgacgaggtgtcagttatgttttctaattggtattaggtattatatggataggctacttgacgcgtccgggattttttgcaataaattctttccatgaacggggccctttcgctatgtcgggcttggacgactcgtagaagtgacacaaagctgcgccgagggcgtcggtggcatcaagttcgggcaatagattttcgcgaggtatatcaagtatgcggcgtaacatttcctgtacctgctccttggcggcacctccgttgcctgttattgccatctttattttgcggggttcgtattcggtgattgatatgtcgcggtttatggcagccgccatagccactccttgcgcacgtccgagtttaagcatggactgtacattctttccgaagaatggggcttcgatggccatctcgtcgggaaggtattgttccaatatgccggtgacgcgtttgaatatatgaccgagccgcaggtaatgcgactcaaatttgtttagttttattacccccatggttatcatggccggcttgccgcgttttacaccgagcacaccgtagcccatgacattggtgccgggatcgatgccgatgattatgcgttcccaatcgcggagcgattcgttacgaaaggcgctcacggagctacctcctccatgattgtagtgaagtacatgactttgtcggcccatatggaggacatttcggccagcttgacgggttgttgacattcaagccactgttcggttgcctccacggaagcacttttaagttgtacggcatagcccgtccctccttccatatcggcgagtatgcgcatgaaaagagggtcggataggccgcagtcgacattggcgtacggtatgtaagtgtttaatatccacttcttgaagtcgggttcaacttcgtacgccacatgaaaagtagtatttataatcattccaaattgcctgatacggctgcaaataccattaagccgatataaattatgcctacaacgaatccggatatggctccgattatggtccagcgtttggcgtttgccgatgatttttcagcttcatcatagcgtccggcgctccactgactgttgacattggcagcgttaattatacctactataccgaacggcagacagcacagcaaggtgacgaggatagactcgacgagccagcttttaggaggagccatgtagttttgctggggttgctgaaggggttgctgatacggctgctggtagggagggggaggaggacataacgaagtcgtattttcgttaggtagctgtggtatggccgtttcgcgatatgcgtcggcctgtgtggtaggtgctgcaagagcttcttttatttcatacacactgtcagcacggacccaagtttcatatccttcagcccatacaaggtcagagcctttaagaccgcgggccacgagttggcttatctcgaaaggccccaccggtttttcgttttctgctacgtaaaatttcataatacaatgtattttgtttaattatataattattgtcttaatgaagaatgtcattcaaggctgttcagcgcggagcgctctttacgacgctgtctgatgaagcgtggaataaatgcgacatgcctcgctattgtcggtatccatccgtagtagtagcccatgatgcgcatgcgctctatcagcgaggcacggcggttggctgtcgtagtgccttcgttgaggtagtcgatgatggtggctggtatatagacgttgcggcgtgaacgctgcagacatctgatgcaccactcgtagtcggccgagtaccggtatttcaagtcataatgctgggccagtctgcgattgacgatgaatgcctgatggcatactaccataccgtcggcaaaacttttgagtgtaagccggtcgggtgcggtgagatgacgcggagctatatagcgacgttggctgtccacaaggtcggtctgaccatatactatgccggggaagtcatagtccattatggtttttgctattttatccagagtgtcggcgctatggaatgtgtcgcccgcattaagaaatatcaggtattcgccggtagcaatgtctatagccttgttcatggcgtcatatatgcccgtgtccttgcttgaggatatcttggcttgcggtatgcctgcatcgatagcaagtttcagggtcttgtcttttgacacgccgtccatcacgatgtactcatacaagctacatgtctgctcccgcacgctttcaagcgtcggtggcaatgtcgattcggcattgtacgtgacagttattatggaaaacaacggagacattactgcttaagcgatagatgttcttaatgcaaatatacatacaattcgactaaaaaaccaaagaccgtgcaaaatttagcgaaatattttacatatataaattaataccgattgaatttgcataaataataatgcttgcatatatttgcaaatgcggaaggtattcttctgcgtaggccataaaaacgcatagtcataaaaaaagaaagagggctttaggcccccgttccaaatgttttcacaacggaataatccttattgtgatttgcttacttttatgatgcaaatataaggaaaaaatataaacttgcaaattttttcatatggaaaaagcgctgaataataatattagagttattttgggattggatctcggagtagggtcgattggatgggcacttatcgaagtggatgacgccgacaagcctgtacgtattgttgatactggagtaagggtcataccattgacaaccgagcaatcggacggttttgtcaaaggcaacggtaaaagtgtgaatcagggccgtaccgagtgcaggacaatacgcaaaggctacgaccgctatcagtcgcggcgagccgatttaaaagaggatatttccggactgggtatggactatggtaccgaactggtggctttgcctccgttgacgttatggaaattgagagctgatgcggctactcccggatgtcgtcttgccttgcctgaaatagggcgtgtgttgatgcacataaatcagaaaagagggtataaacatgccaaatcggacttgggcgaccgcaagcagactgaatatgtggcttccgtcaataagcggtataaagacatacaggatgccggaatgactgtcgggcaggctatatatgcacgtcttgaggcatcggctgtgacgggtgagaacggtaaggtgcagtgcacttacaaggctaagggtgaggtgtttcctcgcgcggcttatgaagcggagttcgatgctgtgatgaaggcacagcagccgttttatgaagatgtgctgaccgatgaggcgatagcgcggttgcgcaatataatcttctatcagcggccgctgaagtcgtgcaagcatcttgtgtctatatgcgattttgaaaagcgaccttatgtcggcgcacagggcagtatcgtttattccggtcctaaagtggcgccgcgcacctctcctttggcgcaactatgtgccatatgggagtcggtcaataatatcgttctgaaaagtcgtcgtaatacatctaccggtgcgctgtttgataccgaggctgaaggacgctatgaactgtcgattgacgaaaaacgcgatatcgtggcgtttatgaacactcatgaaaagttgaccgtgaccgagctgttgaaaatactcggattgagtaaaaaacatggcttctcggccggagaggcggtagggaaagggctcaaaggcaatactacttactgccggctgaagaaagcgctcggcaattatagcggtgctgaagacttgctgaggtttgaagtccataatgtcgataccggcaatgtcgatgaggaaaccggcgagataatactcgagacgagcaatgacctcatggagcagcctctgtataaactgtggcatacggtatattctatcaacgacaaggaggagttgcgttctgcacttgccaagaagtttggcatagatgacgatgaggtagtggagcggttgtatgccattgactttaccaaagacggctttgccaataagtcggcgcgattcatgcgcaggttgttgccttatcttcagcagggacgtatgtacagcgaggcatgtacatatattaatgtgaatcactccaatagccttacgtcggaggagaagctgcgacgcgagcttaaaaaccgtcttgagccgctgaagaagaatgaacttcgtcagcctgttgtggaaaagatattgaaccagatgataaatctggtcaatgccgtgtttgaccgttacggacatgtagatgaagtaagggtggaactcgctcgcgagctgaagcgaagcaaggatgagcgaaacaaaatgtggtctgataacaccaagcgagagcgtgaaaataaacagtatgctgaacggatattggaaaatagtatcgctccctcgaagaacaggatcaagaagtatcgcatgtgggaggagtcgggcaagctgtgtatgtattgcggacagcctgtcaacttcaaggagtttggagagggcaacggcgccgagattgagcatatattgccgaagtcggtatttttcgacaacagtttctccaatttggtgtgtgcgtgccgcaagtgcaatcaggacaagggcaacatgactgcatttgattacgtaaagaagatgctgcccgataagttcgacagttacgtggagaaagtcgaggaactgtatgagaatcataaaatatccaagacgaagcacgaccgtctgcttatgtcgcataccgatataccggaggatttccttaaccgcgatctgcgcgagacacaatacatatccaagaaggctaaggaattgctgttttcggtcgtgcgcgatgtcactgtaaccaccggttcggttacagactttttcagacatgtctggggctatgatgaaatactgcataatctcaatctggaaatatataaaaggagtgaccgcactcagatgatggaatatatccacaacggtcagcgacatgtcgaggagcgtataactgattggtcaaagcgtcttgatcatcgtcatcatgccattgacgcgttgactgtggctttgatgaagcctgcctatataaaccggctgaaccgtcttaatactgaacgtgacaggatgtatgaggaactgaaagaacagtcgccggagtatcggcgtaaacattcgctacttgaggactggagtgcgcggcaacctcatttttcagtcaatgaagtaatggaagcggtcaagcgcatagctgtgtcgttaaaggcaggtaagaaagtcgtcacgccgggcaagcggttggtttataaaaacggtaaacgcgtggtaaagcagaccggtattcttgtgccgcgtggtgcgttgacaaaagagagcgtatatggtaaaataaaggtgcttgaacgaaacaggccattgaagcagttactcatttcgcctgaagagattgtggatgctgctgtacgagatatcattattgatgcgctcaaacagaacggcaatgaccagaaaaagacgcttaattatttgaaaaagcatcctgtcgtggtcaatggccgggaagttaaggctgctgattgttataccgaacgttttgttataaagaccgatataaagactcttaaatgcaaggatgtcgagtcgatagtagatgaaggagttaagcgtgccgtgcgccgacgcatggaggagtgtggcaacaatgattctgcgtttcagaaaagtcttgtcgaccggcctgtatatgtagataaaaacaacagatatccggtgtatacggtgagattgtttgacagttggagagccgatgctgttgctccggtaagaaaagacctgtcgggccgtcctatcggttatgccgctaaacggaataatcatcatgtggccctttataagtcttccggtggagagattcacgaaatcgttgtgccgttttgggatgctgtattgcggtgccgttacaacttgcctatagtcattgagacccctgatgatgtatgggatgacattgcagggcgtagtgacgagatacctgaagaggtccttgccactttgccgcagcccggttggaagttgtttatgtcgatgcaacaaaatgagatgtttattcttgggcttacagatgaggagtttatggacgctatatcggaggataataaagcgttgcttacggcccatttgtaccgggtgcagaagcttgctacagtaaactattatttcagacttcatacacagactactgtcgatgcaaaaaatgaattagttgataaggaatctcgaatgttgtatgtcgtacaaagcatgaagacactgtctctattaaaccctataaaggtgagaattaattacttaggcgaaattattccgatataaatatgataaagcgtacgttatatttcggcaacagggcttacctgtcgttggagaaccggcagatggttatctctaaatttgatgatgacaataagccggtgaaggtgacgcgcccgatcgaggacattggagttgtcgttattgactgccctatggtgactataacctcgggattgatggaagccctgttggaaaataactgcgctgtcataacttgtgacaaaagccatatgccggtagggttgatgttgccattgtacggcaactcgacccaaaacgagcgttttagagaccagcttgatgcgagcctcccgttgaagaagcagctgtggcagcagactgtatcgcagaaaatagccaatcagtcggctatattaaagcacatcggcatcgaatgcggcaatatgatggcatggtcacgttcggtgaaaagcggcgatatcgacaatctggaaggtcgggcggcggcatattattggcgtaacatatttcccgattatcccgactttacccgaggtcgtgagggggcgcctcctaatgccttgctcaattacgggtatgccatactgcgtgccgtcgtggcacgtgcattggtgtcgagcggcatgcttcctacgctcggtattcatcatcataatcgctacaatgcctattgccttgccgatgacattatggagccgtatcggccttatgtggacgagcttgtccttgacatgcttaaatcgggttataacgactttcttgataaagaggcaaaagcccggttgctgtcagtccccacgctggatgtggtaatcgggggacgccgtaggccgttgatgatagcggtcaccgaaacgacggcttcattatataagtgttttagcggtgaatgtcgtaagatatcttatcccgaacgttgattgtggatcgtcttagtgaatatcgcatcatgtgggtattggtgttttttgatctgcctaccgagacgaaacgtcagcgcaaagaatatgctaaattccgtaagctgttgatatgcgacggattcaccatgtttcagttttcaatatatttgcgtcactgtccgtcgaaagaaaatgccgatgttcatatacgcagggtcaagagtttcttgcccccgcatggaaaagtcggaatactttgtataaccgataagcagttcggcaacattgagctttttcaaagcgctgctccttatgatgccgactctccaacacagcagttggagctgttctgatgacaaaaagtctgtaagaataaaaaacaagctctttttaagagcttgttttttatttctaaatagctgtgctaaaccttgaccattaggtatttgcgccgattgtgctgtatcctatagtacaaaagtaataaaaagtaagcaaattacaacgggcgccccatgccggttccccctcctccggctgtatcctatagtacaaaagtaataaaaagtaagcaaattacaacacggtatattatttcatagacaataatctggctgtatcctatagtacaaaagtaataaaaagtaagcaaattacaacacggggcgaattgaccgccgcttttttgatgctgtatcctatagtacaaaagtaataaaaagtaagcaaattacaaccggacggagaggaagcccgcgacgataccagctgtatcctatagtacaaaagtaataaaaagtaagcaaattacaacccaaaggcgacaagtatataattaccgagagctgtatcctatagtacaaaagtaataaaaagtaagcaaattacaacccggaactgcgtaggttcgccgagccgtgggctgtatcctatagtacaaaagtaataaaaagtaagcaaattacaacaccgacgggaatagccgcgccgagggttgtgctgtatcctatagtacaaaagtaataaaaagtaagcaaattacaaccggaaattctgccgtcttcgtttttgcaacgctgtatcctatagtacaaaagtaataaaaagtaagcaaattacaacggaaaggttaatacttccaaggaggcaagagctgtatcctatagtacaaaagtaataaaaagtaagcaaattacaacaacagcttttgcaagatcatcatacctaatgctgtatcctatagtacaaaagtaataaaaagtaagcaaattacaacagcaaagaagaaattgatagctataatgccgctgtatcctatagtacaaaagtaataaaaagtaagcaaattacaacttctattaagttctcgtagatacatctcatgctgtatcctatagtacaaaagtaataaaaagtaagcaaattacaaccgcgacacgctggagagcggccggtcgggggctgtatcctatagtacaaaagtaataaaaagtaagcaaattacaacatgcacggcgtcaaggtattcggcctcggcgctgtatcctatagtacaaaagtaataaaaagtaagcaaattacaacggagggaaccgggttccgaggtcgcgccgcgctgtatcctatagtacaaaagtaataaaaagtaagcaaattacaacgcgtcggagctgcgctggtacgctgtcattgctgtatcctatagtacaaaagtaataaaaagtaagcaaattacaacggctttcttggtgtattataagccggggccgctgtatcctatagtacaaaagtaataaaaagtaagcaaattacaaccagcagcttgcaacggaacggaagcccacggctgtatcctatagtacaaaagtaataaaaagtaagcaaattacaacgcgttcgctgatacctacaaactttataaagctgtatcctatagtacaaaagtaataaaaagtaagcaaattacaacgggttattgctttgtcaatcttcccggaaggctgtatcctatagtacaaaagtaataaaaagtaagcaaattacaactggcggtccgcaaggcccgtgtcaaagcccgctgtatcctatagtacaaaagtaataaaaagtaagcaaattacaactctcgagctctgacacacgaagtgctcgaggctgtatcctatagtacaaaagtaataaaaagtaagcaaattacaacaggggatgccggaaacccccaagcaaacctgctgtatcctatagtacaaaagtaataaaaagtaagcaaattacaacaacgacattcgccttgcggacttcatcctcgctgtatcctatagtacaaaagtaataaaaagtaagcaaattacaacacgcagacgcttaccgtctatgatgctgttgctgtatcctatagtacaaaagtaataaaaagtaagcaaattacaacctgtaacactgcgtccttgtcggtgtaatcgctgtatcctatagtacaaaagtaataaaaagtaagcaaattacaacatgacatagaggatacaaccataaagcacagctgtatcctatagtacaaaagtaataaaaagtaagcaaattacaaccaaaagcgtttggatgtcattaccaaaaagctgtatcctatagtacaaaagtaataaaaagtaagcaaattacaacgggcgggaacgggtgcggtatcaccctgtcgctgtatcctatagtacaaaagtaataaaaagtaagcaaattacaactagcaaaagaaaatacccccacacccctaagctgtatcctatagtacaaaagtaataaaaagtaagcaaattacaaccatggacggagttcctcgccagtactatgggctgtatcctatagtacaaaagtaataaaaagtaagcaaattacaacactgccgaatatctttacgagaatggctcggctgtatcctatagtacaaaagtaataaaaagtaagcaaattacaacatttcaatcaatcccgttacgccctcctcggctgtatcctatagtacaaaagtaataaaaagtaagcaaattacaacttccgaaagggtgggaactgtatcaaattgctgtatcctatagtacaaaagtaataaaaagtaagcaaattacaacggcttcacggatgttggctcattcagtcctgctgtatcctatagtacaaaagtaataaaaagtaagcaaattacaactttcgccttataaagaatggcaggattatggctgtatcctatagtacaaaagtaataaaaagtaagcaaattacaacttcgccgtagcgagtctcacatcaagtcaagctgtatcctatagtacaaaagtaataaaaagtaagcaaattacaactcatttcaaaacattaaaaacgtacacgacgctgtatcctatagtacaaaagtaataaaaagtaagcaaattacaaccggttaagttgttcatcttcattgttgtaagctgtatcctatagtacaaaagtaataaaaagtaagcaaattacaacttcaaaacatggagctatctatccttgctggctgtatcctatagtacaaaagtaataaaaagtaagcaaattacaacggttcctaattcggctgttggttccatgtgctgtatcctatagtacaaaagtaataaaaagtaagcaaattacaacgactctgtacctactctgtctgaagagtttgctgtatcctatagtacaaaagtaataaaaagtaagcaaattacaacacaccaactgccagctcgcgcagcacccgtgctgtatcctatagtacaaaagtaataaaaagtaagcaaattacaacatttcaatcaatcccattgaggccacctcggctgtatcctatagtacaaaagtaataaaaagtaagtaaattgcaactaatatatacattttaccatatgtccgtcattgccttgaatacattaacaatcttgctcctgactgtgacagcgcaacgttgtcattacaagaatgtcttagaatcgaaatctatagatatgcagtgagattttttatatctttgcaatatgaaaatatcagacaactttatacgcaatctttttactgcttgggcaattttttgcgcattagttgtttttgtttttatttttatcgtcgctttgatttgtttcggcattatatgctaaaagttgatagatagtgcatattaacctaatatgggtcttgagaaataatgctgtagtctatagttccgagtaacaaaaattaagcaaattacaacagctatacgacatttgaatactggcttaagggcttggaaatgtacaataaagtggaactgaatccgttgaataccaagagcgtaaaattcgaaataataccaaacgatctgaaattcttttatgacaaggctcacggatggattgatgaactgagagaattcaaggtttatatcggctcgtcaaataccgacatgaaatcggcagtaattaggttgcagttatattataaactgattcatacaaaagggcaaaggcttgattagatttgttatgccactaataaaccgtcaatgtctatggaaagcttctctgcctttcttggccaccttcaagtagacagaagtattgtcgccgggaggagtatcttcttcaagtgtaactgtataatagacataatcgtctatattgtgtttctcatgccatttccgaggttctacccctgaatcgcgcagcccgcaataccaaatcatagtgtcaatttcactgccaatcttaattcccgaagagtaagctatgattggaaattcctcatcaccgccagcagtataggtttccagaagtattttatttttgtcgatatccaatgtgtcggagaacatcggctgaccggtagcggaatgtacacattccaatatcattttgccgtcattagtaggtacggccatgaaatcaagcgtttccacgctgtcgaccagtacgaaatgaataaaatcctccagcatttccttttcggcaaactccccgttgtgacaagaaattcgcttaattttaccccgtttaccgttaaattcccccttcatagtggcacttatgctctggactccctttattctaaggtattgccgcataatctctggtagcgacagtgtcttgtcgttatattccatcttaatctgctgggcacgcacatcaacaatgcagataaacgcaattaaaaatgcgatgaatgacttcttcatatttctatatataaattttcacgaggctatttcaagctatacaaagatacggaatatttcgctttatcgcttctttataaaatcataattactacttgcctaactgggcgtaaaatactatttttacaaaaaaaagtacatatgaataatcttgcgaaaataacaatattattgattgttgttctaagcagttccgctttttttgctcagacaacaagtaataagataatcagcagtgtagatacattagatataaatgtatcacaggattctttacctatggacacaataaagcaatacacattggccgtaaatggaaatatagattcatttaaagctgaacatagtgctatcgatactgccttatatcggtcaataatgttatgtcgggacagtatttgcgataatttaaagaaaccatataataacgatgtttttaaattgaaatataatccattcaaggaaaagatgaaagaaccatggataggtgaggtttttaaagaaatttttttgagataattaagtcatatatttgtcacttttattatgtcagacatcttaatcgaaacatgttcttaagaacatgttatgtataatatataaacatgtcatgagaaaaattagtatttaatgccatcgttgcggtatcgtttatgtcggttgaggtgcaataaaaatttgtcgcgattttgtgccggttccaataattgttattagctttgtgccctgttaacaaaaaagaatgtttaacttatataaaacacaattaaagatgaaacaaattcttactgtcgtcgcagctacggcgcttacgctttcttcatgcgggagcaaaaacaattcacaaagtgcagatacagtaaacgatacaattgcggaagcagaagttgtctattcattgctcggcaagtggaatatagaaaatatcgtggttaacgatgctgtttcggtaaggcctgactcaatcgacgcatattttgattttaaaaacgattcggcctatgtcgtagcgaccggttgcaattccattcagggcggctacgctcttgtaggcgactcgatcaagtggggcaattcgctcaagactacaatgctttgccccgacaatatggctgttgaggatattttgacacaggtacttcccaatgttgttgtcgttgattttgaaaatgatactgtagcacggttaaatacctctgttcccaatcaatacatagtgctgtccaaagagcagtcaaagcaataagcaactaactgcttatcgctatcgcttgtcgtggaagcggtagccgaaaccgatcattagattattgggattcttgaagctgtttagctgatagcctatatgcagaaatgcctgtggcattatatgtactttcaacgcaagtatctgatagaaattacggttttcatgacatgctatgaagttgcgtcctatgcccatgttgattgaaaatatgggcattacaagttcaccgcgtatcgagactccggcgctgatacaatccttgaacggttgccggcgaaattttatattttcgtcatgggttccttcaatccagtatttggagagattggaaccctcgtcatattgtatgtcggccgacagacccgcacggaagtagcggttgaagttgtacataggtgcgaagtttatgccggccacagcgaagtgtcccggcaccatttctgtctcatacgtttctaccgcacgcttgcgggctgctccgtatacgaccatgtcatagcttatatggggcttcatgcatgcggctgtatcgggcatggcatagttcctgcgttcaggtactgtgttgagtgtgtaaacgacaccgactctacctccgattgaatttactccggggttgggccacgatgtgttgccgttggagtagtgcgacatgtctatgcctgccgtcaggttaatccgtttcgatattcgatatttaagcatgaggccgagattgatgtaggcatttactttagagcctaccaccagatttacgtgagggagttcgggatcatatttcttccacccgaatgtcgctccgaaattccattcgtagtttaacgacagtctgtcagatagatgcactataggagcgccctgaaatatataaaggccaatgggatttcctatacggtcgctgttgaaaaatgaagtataaccgatgcctatgccttgatatgcctcaggatacatgcggccgagtttggttgcgtccgagaaactgaacgaccacttcatgtgggccgacagtgcggtgtgcatttcgccgggacgttcgccgtcgtcgtaactgtatgtcgtcgcatttcgcgatgatgccacatatgacggacgcacgtctgctccgatgtggtgtattagctttggcgataccgtgcatgtgtcattttgtgcggcatatgacgttatcgctgaaaaaatcagtattgacgctataatttttcggcacatagatgccaaaacacgcggtatgttattcttcttcataaggtatatctatccatttaagattaaacaagaaaggctgagatacccccactgtaaacgcgatgtctatttcccttcccgacaaggtgttgactgcgcgtatattgccgtaggcccgggctatgccgaagtcggtcctaagtatggcctgctttgaggaatacggctctacttccgtgctataagtcttgttgaattcggggtcaagcgggtccatttttatcgtttcagtagaaaacctgacctttataccgtgaaaccccggcatgtatatgccgtctacttcgtctataagcggataggtgggaatttctacctccggcatttcttcggtaaattctatcgagcgtttgtcaatattaaatagcacttgcatgggcctgtttttacccggggtcactttcgtgtatgaagtgttgggagtgctgtttatatacgtaagtacaggcgacgttatagaccgggtctcaaagtcaatgcctctgtcggaattgtaggttatatcggttatgcggtataatgacggttgggccggactgatgctgaatgtgatgtcatctatcttgtattcatattcaagttctatatgtccggtcatactaatgccgtatggattgtcaagttctgtcagtgttatctcattgccgttcagttccactttaaacgacaggtcatcctcagtggtgacctcgacatatttagtctgaatataagatgctgtcctatctattatgggtatggtataaccttcgctctcacgcactacttttccgtcggcgctataatatacctgatgtgtaaaatcatatggcgtatttacattaagagcggtaagaaggtcggtctgaaacgttaacgatgccgtggctccgctgccgtcaagcgtgagcttttcggccgaaggcttggtgtcatcgataaatacatcgtcgttgcatgctgcaatgactgtcgataatgcgcagagcaacaagaacttgaatggtgcgtgtactatattcatgtcaaggcaataatgaatggtttatgcctcacaaagatagtcaatagaattaccttgtttatcgtatttgttttattttgatttttttttaacaaatattttgatttaagcctgcaattagcctaccgatataccggcaaagcccatgaatgccattgcgagaagcccggcgcagataagggctatggggatgccacgcatcggtgacggtacttcggtaagtgcgagccgttcgcgtataccggcaaaaagtaccagtgcaagtgtgaagcccaaagcggtagctaccgcatagaccagtgactcacccagcgaaaggcctttctgcgtcacaagtatggctactccgagtacggcgcagttggtagttataagcggcaaaaaaacgccgagcgcactat

SEQ ID NO: 4463 - DNA, 23744 bp, synthetic construct
  misc_feature 1..23744: note = Synthetic
  source 1..23744: mol_type = other DNA
aggaccgcaccggtaagcgttgaaaagctttcggatgacctgagggtaggagtgaaaggccaatcaaacttggagatagctcgtactccccgaaatgcatttaggtgcagcctcgggcgaaataccgcggaggtagagcgactgataagatgcgagggcttcaccgcctatcaagtcttgacaaactccgaatgccgcggcatgatacccgggagtgagggcgtgggtgctaaggtccacgtccgaaagaggaacaactcagaccaccggctaaggcccccaaatacgggccgagttgaagccaataacgaggtgggattgcatggacagctaggatgttggcttggaagcagccattcatttgaagagtgcgtaacagctcactagtcgagtgatcccgcatggataataatcgggcataagtccgttgccgaagccgtggaatgcagcataaagctgcgttggtaggggagcattccggcagccgcagaaggtggggcgtgagccctgctggaggtaccggaaaagcaaatgtaggaataagtaacgataaagggggcgggaaaccccctcgccgtaagaccaagggttcctgatcaacgctaatcggatcagggtaagccggggcctaagtggaagccgcaaggcgcacacgatggacaaacggtaaagaatccgttgccccgcagtcccagtgatgtggagacggagcagtgacacacccgcgtgctgacggaatagcacgttgaaccgcgtaggtaaacgctggggaggcaaatccccccggcgtgctgaaacgggacagtacggagcgcccccgggcaatccgacagcggtggtaaccatactcccgagaaaatccgctaaacgctataaagggctgcgggcccgtaccgtaaaccgacacaggtggtcgggtagaatataccaaggcgctcgagagattcacggttaaggaactaggcaaattgaccccgtaacttcgggataaggggtcccctcctccgggaggggcgcagagaataggtccaggcaactgtttaacaaaaacacagggctgtgcgaagttgaaagatgaagcatacagcctgacacctgcccggtgccggaaggttaagaggaggcgtcatcgcaagagaagcgctgaattgaagccccggtaaacggcggccgtaactataacggtcctaaggtagcgaaattccttgtcgggtaagttccgacctgcacgaatggtgtaatgatccggacactgtctcaaccgtgagctcggtgaaattgtagtatcggtgaagatgccgattacccgcaacgggacgaaaagaccccgtgaacctttactgcagctttgcattgtgaccgggtgctcgatgtgtaggatagtcaggaggcagcgaaacagccacgccagtggttgcggagccgacgttgaaatactgaccttcgcgcatctggtctctaacgccctgagggcggacattgcatggcaggtagtttgactggggtggtcgcctccaaaagagtaacggaggcttctaaaggtgcgctcaggccgattggtaaccggccggagagtgtaatggcacaagcgcgcttgactgggagaccaacaagtcgatcaggtaggaaactagagcatagtgatccggtggttccgcatggaagggccatcgctcaaaggataaaaggtactccggggataacaggctgatccctcccaagagctcatatcgacggagtggtttggcacctcgatgtcggctcgtcacatcctggggctggagaaggtcccaagggttgggctgttcgcccattaaagtggcacgcgagctgggttcagaacgtcgtgagacagttcggtctctatctgttgtgggcgcgggagatttgcgaggacccgacactagtacgagaggaccgtgttggacggagcaccggtgtaccggttgtggcgccagccgcaccgccgggtagccgcctccggcaaggataagtgctgaaagcatctaagcacgaagcccccctcaagataagatctccacataagggccgtcaaagacgatgacgtcgataggtcgcaggtatacgggcggcaacgtcctcagccgagcgatactaatcacccaacccctttccgcaaacagacaccttcccttccaccatcatggtgaaggaaaggaaaacaaacaaatgcacgaaaacgcaagaccaaaggcgacacgccttcggtgggagatgccgcaaggcaattccggcgaactcgaggcagagaatcagagagaacaaatcgaaattgctcactgcttccaccgccctcctttttacccaacacagcagccggaggaaagcgacaaaagagtctgagaccctggaatcgcagacaaaacatccggttgactgataaacgaactaaggcggccatagcacgggggttccacctcttcccattccgaacagagaagttaaaccccgccgcgccgatggtactgcgaaagtgggagagtaggtaaccgccccctatccgagagccccgacgagtcaaccgacccgccggggctcatctttattacccatccagccccaaccgccaatccctccgcccgaaccgccaatccccatctttttacccgttcccctccgccaacccccctccaggaccttgatgcccttaaggttcatagtgcctttaaggtctttaatgtctttaatgtctttaaggtcgttaaggcctttaaggtctttagggtcttttaaggtccttagggggtgtaggtgaataataaggttgaaatgctgattagctgcgcgatcttaaaaatgaatcgtctgctggcgcattaaatattgttaaatttttaatataaactattttttagcctcaatttccgcctcatgtagctccatccgggcgatggaatttgcatattccgataaatttcagtaattttgcatcggttatcggaggaggcctttcggcttcctccctttattttggacagtctgatttccagacaatattgtccggctaatttacacgctgtttatgatagacaagaatctcctgcgcgagtcggttgaaaaagctattgagggcaccgacctctttattgtggatatcaccgtaagtccgcagaacaatattgtggttgaactggactcccccggaagtctcgatatcgacacttgtgcggccgtgacgcgcgcaatcgagaaggacttcgaccgcgacgtggaggactacgacctcgaggtcggttcggcaggactgaccgcccccttcagagtgcgcggccagtatgagaaaaatatcggcaacgaaatcgagattctcacccgcgacggccgaaaaatcaaggccactcttactgcggtaggcgccgacgacttcactttcgaatatcaggtgaaagtaaaggagccgggagccaagcgccccgtgctcaaaaccgagaccgagaccctcccgtttgccatggccaagcaggtgaagtatcttatctcgttcaagtaatttcccggctcgaccgggcctgacccccagaaattttaaaggaagaagtggctccgccggcctctgattccactgcaattcagaataataaaaaatacagacatataaaaatggctaagaaagaggaaactcccaacatggtcgagcgcttcgccgagttcaaggaactcaagaacatcgacaagaccacgatgatcagcgtgctcgaagaatccttccgcaacgtgctcgccaagatgtttggcaccgacgacaatctcgacgtaatcatgaaccccgacaagggcgacgtccagattttccagaatcttgaagttgtgcccgacggcgaggtagagaaccccaatctccagatttcgctctccgacgcccgtgctgacaacgatccagaggtcgagatcggcgaggagcacaccaaggagatcatattcgccgatttcggccgccgcgcaatccttacgctgcgccagactcttcagagcaagattctcgaacttcagaaggaggcgatttacgccaaattcaaggatctcgagggtgagctcgtaaccggtgaagtctatcagacctggagccgcgagaccctcctgctcgacgacgacaagaacgagcttcttctgccgaaaaaccagtcgattcccggcgatttcttccgtaaaggcgaaactatccgcgccgtgatcgccaacgtcgacaatacgaacaacaatccgaaaatcaccgtttcgcgcaccaacgagaatttcctccgccgcctcttcgagctggaggtgcctgaaatccacgacgggcttatcaacatccgcgccgtggcccgcatcccgggcgaacgcgccaaaatcgccgttgagagctacgacgaccgcatcgatcccgtaggagcctgcgtgggcgtcaagggatcgcgcatccacggaatcgtacgcgagctgcgcaacgagaatatcgacgtaatcaactatacggccaacccgtcgcttttcatccagcgcgctctgtcgcctgccaaaatctcgtcgatacgcatcgacgaggaggagaagaaggccgaagtgttccttaagcccgaccaggtttcgctcgccataggcaagggcggtctcaacatcaagcttgcctcgatgcttacaggctacgtaatcgatgtataccgcgacaccgacgaagtgttcgaggaggatatctacctcgacgaattcaaggatgaaatcgaggaatgggtaatcgaggcactcaaggatatgggttgcgtcacagccaagtccgtgctcaatacgccccgcgaggatctcgtaaacaaggcagacctcgaggaggagaccgtagacaacgtgcttgcaatcctgcgcgccgaattcgaggacgaagaggcaccggccgatgctcccgcagcttctgctgatgctcccgccgacgacgctcccgaagctccggccgacgagacgcccgccaactgattcacgccaaaagtggccgtgagagccacgtcttcccgtgaaactcccgaatcctctccactccacccgcaaaatcactttagaacacaaaaaccactacatggcgagaatcaaaataagtaaagtagcaaaagatctcaacgttgccctgcctaccgttgtagagttcctgcgaggcaaaaacatcgaggtcgacgacaaccccaacgcgcgcatcgaggaagacgtcgttgagcttctggaaagctcgttcaagaacgaccgcgaccagaaaaacaagtcgcagcaactctcgaccgaccgcgcccgcgagcgcgagaaggccaaacccgctcctgcgccgcgcgaggtagaggaggtgcgtcttacctccgaaatcaataagccgaagattcttggcaagatagagcttgacgctcatggcaaccccatccgtaagcaggcgcccgcacctgctcccaagcctgcgccgagcgcagaggtgaagccggaaccgaagccggcagttacctccacgccccagccggctactcaggcagcccctaaacccgctcctgcgcctcaggccgagcctaaggccgttcccgctcaggaaacccctctggcgaaggctgaaactgctcccgcccccgcatccgctcctaaggagaatgccgcaccggcagctgcccctgctctcgaagctccaaaggccaaggaagaggaaatcttcaccgtcggcctcccggccaacggccccacaatcaacgtggtcggcaagattgacctttcggccatcaaccagtccacacgccccaaaaagaaatcgaaggaggagcgtcgcaacgagcgcatagccaaggcaaacggcggcaacggcgccgcttccgaagccggcggcgaccgcaagaagcgccgtcgcatcggcggcaaggagaaaatcgatatcgagaagacctcgggccagcagtccgggcagggcggaggccgcggccgcgacggaaagtcgggcaaaggcggcgaccgcaaccgccgcggtcccggtcataacgacgtcaacgaagaagacgttcagaagcaggtgaaggaggtgctcgcacgcctcaccgccaaggataaaggtcagaaacgtggcgtgaaatggcgtaaggagaagcgcgaggccatagccgagcgcgaacgcgaagccgccgaactcgaagcagcagagagccgcgtgctcaagctcacggagttcgttaccgccaacgacctcgcctcgatgatggacgtgcccatcaacaaagtaatcggtacctgcatgaacatcggagtgatggtttccatcaaccagcgtctcgacgccgagaccatcaacctcgtggccgaggagttcggcttcaagaccgaattcgtttcggccgaggtagtcgaggccatccatcaggaggaagaccaggcggaagacctcatggcccgtccgcccatcgtcaccgtgatgggccatgtcgaccacggcaagacatcgcttctcgactacatccgcaaggctaacgtaatcgccggcgaggccggcggcatcacccagcacatcggagcctacaacgtgacgctctccgacggccgccacatcacattcctcgacaccccgggccacgaagccttcaccgccatgcgtgcccgcggcgccaaggtcaccgacctctgcatcatcattgtggcagccgacgacgatgtcatgccccagaccgtcgaggcaatcaaccacgcctcggccgccggagtccccatcgtgttcgccatcaataaaatcgacaagccggccgccaaccccgacaaaatcaaggaggaactggccgcaatgaactacctcgtggaggaatggggcggcaaataccagagccaggacatctcggccaaaaaaggtatcggcgtggaggagcttctcgagaaagtgctcctcgaagcggagatgctcgaactcaaggccaatcccaaccgcaacgccaccggttcgatcatcgagtcgagcctcgacaagggccgcggctatgtggccaccgtgctcgtgcagaacggcacgctccgcgtgggcgacgtaattctggcaggcacacactacggcaagatcaaggcgatgttcaacgagcgtaaccagcgcatcaaggaggccggccccgccgagcccacgctgattctcggacttgacggcgctcccaccgccggcgacaccttcaacgtgctcgacaccgagcaggaagcccgcgagattgccaacaagcgccagcagctgcagcgcgaactgggcatgcgcacctccaagcgccttacccttgaggaaatcgcccatcgtcaggccctcggctcgttccacgaactcaacatcatcgtaaagggcgacgtcgacggttccatcgaggccctcagcgactcgctcatcaagctctcgacccccgaggtgcaggtcaacgtgctccacaaggccgtcggcgagatttcggaaagcgacgtcacgcttgctgccgcctccgacgccatcatcatcggcttccaggtgcgcccctcgcaggctgcgcgtcgcgacgcagagcgtgagggcgttgaaattcgcctctattcggtcatctatcaggccatcgaagaggtgaaggacgccatggccggcatgctcgctcccgaggtgaaggaagagattaccgggtcggccgaagtgctcgagacgttcaagatttcgaaggtcggcactattgccggagccattgtgcgcgaaggcaaaatcaaacgttccaacaaagtgcgcctcatccgcgaaggcatcgtacgctacaccggcgagctcggctcgctcaagcgcttcaaggacgacgccaaagaggtcgttgccggtctcgactgcggtctttccatccagggttacaacgacatccaggtcggcgatatcatcgaaggcttcgagcaggtggaagttgcccgcgccctctgatgtagcgctccgcagctctgcatccggccggaattccggcacaccttgcaatacaccccgatatggccacagcgcatatcaacataggatccaacctcggcgacagccgcgcctatctggcgcgtgcggtcgccggggttgccttattgtcggagccctccgggcttcaggtatccgacataatcgaatcggagccgtggggcttcacgtcgtcgcatcgcttccttaacgtgggaatgaacatccataccacgctcagtgtgcccgagcttatggagcggttgcacgctgtggagcggtcgatttccgatgctccccaccgccatgccgacggaagctatgccgaccgcaccgtcgacatcgacctgatttgtctcgacgatactgttgtgcgtcagcccggtatcgaagtgccccatccgcgcatgcatctgcgcgaattcgtgctgagacccatgattcaactgtggccgcagtgggttcatccccagctccggctcactcccgccgaaatgcttgccggactgaaaaaaatgagctaaatttgagtgtcggcccttccttcggcccgacagcggaacaatcccctcttaccaagccccatggagcaactgatgcaatttgtatggcagcaccgcctcggtctccgcggcggtcagaccactgtcgacggccgtcgcgtctgcgtcgtggaccaggggatactcaacgccgatgccgggcccgactttttcaacgctaccgtggaaatcgacgggcagacctgggtgggaaacgtggaaattcatgtgcgcgcctccgactggttccgccatcaccatgatgccgatcccgcctacgattcggtgatactgcatgtagtgcaggtcgacgacgcgcccgtctaccgctccagcggcgagctgattccccagatgataatgcgttgcacccccgagggagcgcgccgctgcaacctgctgatcaaccatgccggggcgtcgctcccatgcagttccaccatcgcctcgctgccccatatctaccataccgactggcttacgtcgctcggtgccgagcgactttacatgaagagcgaacgaatccgcagtctcgtcgacgatagcgccggcaactgggaagctgccgcgttcgtcaccctcgcccgcgccctcggcttcgggctcaacagcgaacccatggaaatactcgcgcggcagctcccgttgaaattcctcaaccgccaccgcgacgagctgacatctgtcgaagccttcatgttcggtcaagccggccttattccgccgcccgacgcaggcgaggacccctacataacgcgtctgcgcgacgattaccgttttttcagccacaaatattccctgcggccgctcgcactcgcgtggaagatggcgcgtacccgtccgcagaactttccccaccgccgcatagctgccctggcacagaaagtccacgaaggcttctatctgatgagcagccttgtggaagccgacaccatcgaccgcatgcgccagctcttcgacataaccctgcgcggcttctgggctacacactatacattcgccccgacgcaggccacatcgccccgggcacttagccgcccttccatcgacacactgataatcaacgccgccgtacctctgcgccacgcctacgccacatatcgcggcgacgacgacacactcacctccgacatcgagctactccaggccatcgaacccgagaacaactccgtcacgcgccttttcgccgacgcaggcatcgaagccgccgacgccttcgatagtcaggccctcatccagctgcgccgagaatactgcgaaaagcgcaaatgcatctactgccgcttcggccaccgcatgctctccgccgaaatctcccgctaacccccattgataaaatgaaaaaaagagaaagggattgctccccttctccggatgttttcacaacggataaaatccttattgtgattcgctatagttagtattgcactacaaatttaaaattaaatttttatatttgcaaaaggtgactctataaaagtctcggatagaattttagccatttaatctgaagaattaacgcatataggccatgagagtactcggtcttgatctcggggttggctcagtcggatggtgtctgattgaagtcgacggtaaatacaatcccattgaaatactcggtatgggtagccggatattgagtctcacacccgatgaatcctcaaattttgacaggggaaatggcgaatccgtatgcgctcaacgtacgttccgtcgcactgcccgaaaaatgctctgtcgctacaagatgcgtcggtgcctgttgcgttcgcagctggcgtttctgggtatgcttgactcggcagattccttgaacagcctgagtccactggaattgtggaaactgagatccgatgcggccacgtcaggtgtggggcttacattgccggaaatcggccgtgtacttctgcatcttaatcaaaagcgaggctataaacatgcgaaaactgatgtggctgatgcgaaacagactgaattcgttcagggcgttaaccgtaattatgccgagattcatgccgaagggaaaacttacggtcaacatttctatgaacgacttttagccacagctgctaccaccgacaaaggtgcgaaagtggcaaccttccgcatccgcgagaatgtgtttcctcgtcaggcctacgaggatgaattcgatacaatcatgcgcgttcagcgcaaattttatccggaaatactgaccgacgaagttatcgcaggattgcgtaatgcaattttcttccagcgtccgctcaaatcatgcaagcacctggtgagcgtatgtgaattcgagggaaaaaactatcgtacggccgatggccgcgaggtatttggcggcccgaaggttgctccgcgcacttcgcctctggcgcaggtgtgccgcctatatgaggtaatcaacaatattcgtctggtcaacgtacgcaataaggatgccgcccccatacctgatggtatcgtttcttcggaagcgagaaagagccagtatcagtttgtatttactgcggaggaacgtgaaagaatctatgaattcctcaacacccacgagaagatgaccgtgacagacctccttaaactcatcggtttgaagaggggcgacgggttcagacccgaccagtcgctcgggaaggggattccgggcaacaagacctatactgccctcttcaacgctcttgagggggtggaccgtcgcgatgagttgctaaggttcaatcttagattcatcgattggaatgccgactccgccacgggcgacatgcgtcgcgttgtatctcccgactttatcaatgaaccgctctacaggctttggcatacggcttattccatcgccgaccgcgatgaactggctgctgcgctcgccaagaacttcggaatcacagatccggctgttgtagaccgtatattcgccattgacttcaccggcgcaggtttcagcaaccgttcggcacgcttcatgcgcagaattatcccatatctcaccgaggggatggtctattccgacgcggctgccgcagccggtgtcaaccattcggcgtctgtgacagcagaggaaaatgccgcgcgcgtcctcgtcgaccatctcgatattattaagaaaggcagtctgcggcagccggtcatcgaaaaaattctcaaccagatgattcatgtggtgaatagccttatcgcacaatttggcccgatagatgaggtgcgcgtggagctggcccgctcgctgaaacagagcgctaaggagcgttccgatgcctctaccgccatcaatgcccgcgagaaagaaaacaaagccctcggcgagaagattgctgaatacgggctgacgccttcgcgaagaaccatccagaaactgcgtttgtgggaggagacggaacatgtgtgcatgtactgcgggcagcccgtatcggctacggaattccttacgggggatgccgaggtcgaacatatcattccgcgttcgatattcttcgacgacagtctctcgaacaagacatgcgcctgccgtcggtgcaacaaggccaagaacaatcgtaccgcctacgattttatgaaggaggatcataccgatgaggaattccgcgcctatatagcccgcgtggaggctatggcggaagcaaagaagatttcacggacgaagcgcgaccgtctgctctgcccgaaagaggaaattccttcagacttccttgaacgcgacctgcgccagtcgcagtatatcgcccgcaaagccatggagatacttcatacggttgtacgaaacgtttgggcgacatccggttcagtgacggacttcttccgtcatcagtggggatacaatcgcattctccatgaccttagcctggataaatatgcgttggccggtcttgtagaggaagttgaatacgagcataaggggcagacccaccgccgccagcagataaagaactggagtaaacgatttgaccaccgccatcatgctgtcgatgctcttgtaattgctctaacgcgtcagggctacgtgcagcgactcaacaacctcaatgccgagcatggaaacatccatgccgagcttgtgaaggaaaatgcagatttcacacgcaacaaatcgcagcttgaactctgggcttcgacgcggccacgtttcgatattgaaacggtgcgtaaggccgtggaggggattgcagtttcgttcaagtcgggtaagaaactcactacgccaggcaagagggctataatgcgtggtggaaaaaagactgtggttcaggataaactggtcataccgcgtggggccctccatcaggagacggtatatgggcttatccgacttcccgacgggcgaaaaaccttgaaatatgcttttgatacgccgacccttgtaagcgatccggctgcccgcaaagcaatccaggccatcttggagcattttggcggcaatgtaaaaaaagctctcaagagtcttcccggagaaggtcttgaggtgatgagaaaggggaagagagaaaatgtcactgaggtgtcttgccatcgcttcgaatatgtggtgcgtaaaagtgtcgctgcgctaaaatacaaggatatactgaaaattgtcgatggagccgtaaggcggagcgtcgaagtccgcttcgccgaatgcggcaataaggatagcgaatatcagaagagtttagcggagcggcccctcatacttccgggcgcgtttactcctatacgtactgtgcggattgccacaggcttaaagccgaaatccatggctgcagtgcgccgcgattcttcgggcaatcccataggttacgctaagaccgccagtaaccatcatatagccatctatgaggatagcgtaggcaggaaactctgctctgtgacctcgatgtgggatggtgtgttgcgacgtctcaatggcattcctgtgatagtgaagcatccggacgatgcctggaacttactgatggatattgccgacgaggatgtgcgcgagcggcttgccgcatctctgccacgcccggactggaagttccttatgagtctgcagatgaatcagatgtttgtgctcggcctttcggaggatgaattcaacgatgccgtcagaaacaatgaccgagcgactcttgccgcccatctctatagagtacagaaactcgctgacaatgatttcttcctgcgaagacatactaacaccactgccgatgatacgacggagtttaggaagatgttagatgtctatcgcttgtcgacgcaagcctttttaaacctcaatccacacaaggtgaaaattaccccgaccggcgattttgcttatgattaaacagactcttctcttctccaaccgtgcctttctctcgctgaaactcaatcaactggtaatcgatacgaaatccgaaaggggaattttgacacgtccgctcgaggatatcggactgatagtgatagaaacgccgtgtgtaacgctgacatcggccctcatggctgagctgtcggcaagaaatattgccgtggtaatttgcgattcccgacatatgccttcaggaatgcttcagcctctcgaaggcaatacactcctgtcgcagaagtcgcgtgcccagcttgccgcatcacttcccttgaaaaagcaactgtggcagcagacagtcatggctaaaattcggaatcaggcgtgtgtactgcgtatgcgccgacaatgtgagaccggatgcatggagcagtggtctaaaaccgtaaggagtggcgaccccgataattttgaggcccgtgctgccgtgtattattggaaaaatttgtttgccgatagtggattctttcgtggggatgacgataatccggtaaattcactactcgattatgggtatgctattctcagggctgtgatagctcgggctattgtcggtgccgggctgattccgcagtgcggtctgtttcatagaaacaaattcaacgcattctgtctggcagacgatgttatggagccctataggccctacgtagatatgcttgtatgcgagatcctttccagccatgcctgtagcgtggggttgactccagagattaaacgtgagcttctgggaatcccggtcctcgatgtaatgattggtggacttagacgacctcttatggtagctacgtccactacagtggcctcattggtaaagtgctatgaaggctcagcccgtaaaattttatatcccgaaatataacgttgttatgtcgaccgaacgcttcagttcctatcgcattatgtgggttttcatatttttcgacctcccgaccgagaccaaaaagcagcgcaaggctgcagccgacttccggaagtacctgcttctcgacggattcaccatgtttcagtattcaatctacgtgcgtcattgtgcgtcgcgcgagaacatgcaggtgcacattgaccgcgtcatccctcaaatacccgatactggcaaagtatgcattatccaacttactgaccgccagttttctgacattcgtatattcgagggcaccgaagcagctattccgcataatacttcctttcagttggaacttttctgaaaatcattgtggcaaatacgctcaccagaaagtcttaggacagcaaaaacaaggttcaaactaaaaaaccgcatctatttgatgcggttttttagttgtctaatttcgtttgtatcccgctgtattgcagcggcttgtatagagtctgttggactctatattgcaaatgtactaactttcaagcgaatcacaaccaatcccggtcctctcccactcgagcagcggttggactctatattgcaaatgtactaactttcaagcgaatcacaacctaaccaagctcaagtttgtttggcagaggttggactctatattgcaaatgtactaactttcaagcgaatcacaacggtgaacgccgcagggttgcccgttcagcagttggactctatattgcaaatgtactaactttcaagcgaatcacaactgctttaaagtcttcccaacgtaatggtatgttggactctatattgcaaatgtactaactttcaagcgaatcacaacagaggacggacaacctcgtattgatgtccgttggactctatattgcaaatgtactaactttcaagcgaatcacaacgccatgatgtccagaatgtgaggtttttagttggactctatattgcaaatgtactaactttcaagcgaatcacaactttcaaggagggagaataatatggcagtaggttggactctatattgcaaatgtactaactttcaagcgaatcacaacgctgaaagtcgccgttgccgtagagcattggttggactctatattgcaaatgtactaactttcaagcgaatcacaacccatcatggcttcgaccagtccgcggaaatgttggactctatattgcaaatgtactaactttcaagcgaatcacaaccctgtcgggccgattactgtcagcgagccggttggactctatattgcaaatgtactaactttcaagcgaatcacaacaggaaaaaacgaatcaagatgagcagatgcgttggactctatattgcaaatgtactaactttcaagcgaatcacaactgatgagacacttattgctaaacttgatgggttggactctatattgcaaatgtactaactttcaagcgaatcaccattgcaggacggttctgtttcatttcatgctattcagctctatgttgtggaaataaatggcttttaatgaactacgatggcattcgtctcatgttttttcgaaaaacaacaacattcccaccacgcttgtaagctgcaatgcggtccatgaagtcaaattggcgaatcttcgagtagatggcgtaggaaggtacgggtactacagtttgcgactggggccaacaccctaacggaatggcctctccgtgcccgtttggaccaaacaccagcgcccctgccgcaatcatatatggatcgaatgtgattgcggcaggggcgctgtgttattatcgtttagctgttgtatagtggtatcaggtggggaaggggcgggtgaaggagatgccggggcggagggggagggtggtggcgaggaaggtggagtaggccggggagttgtatttgatgtggtagcgctcgggggcgaggccggggatgcggaatatggcgcggcctacggcgtcggcgtcggtgaggccgtagggtgagggggtggagaaggcgccgcggaatggggcggggaggtcggcggcagggtcgcggcgcacgcgggcgtggtcgttgcgcacgatgcgttcctggatgtcgatgtcgaagcctatgcgggttatggcgagggatacggagtcggcggaggtcaggtcggtgaggccgcagcgcgagatttcgagggtgccgtcgggggcgacgcggaattcgacgcgcggggtggtgtcggcgtcggggtagagctctccgcgggcaaacgaagtttcggcctgaccgcgtcgggatggcttcacgatgaggcctaccagcagggcggccactacgaagaggcttacaagaaattcggtggagtgcaggaatccgtacatataggggtgcggagcgggtagggatggaatcaggcgaagaggctcatgagccaggaggagatgagcatgtagatgagcatgccgatgatgtcgttggtgatggagatgaaggggccggtggcgagggcggggtcgattttgaagcgttcgagggtgaggggtacgaaggtgccgaatatcgatgcaaagagcaccactcccatcagcgagagcgatacggccagggtggtgggattccagggggagagctggaagcagttgtagatgaatacgagaagggagattataaggccgttgacgaagcctacgcctacttccttgagtatctgtctgccggactccttgaggtcgagcgagccgttggcgaggccctggaccacgatggcgctcgactgtatgccgacgtttccgccggtgccgccgatcatggggatgaacagggccatggcggggttggtgacgaatccctgctcgaagtttccgagaatcagggagttgccgatgccgcccacgatgcccatgaggagccaggggaggcgggccttggtctgggtccagagggtgtcgtcggattccacgtcctgcgacagaccgctggccagctgatagtcgcgttcggaggattcgcgcacgcggtccatcacgtcgtcgacagtgatgtggcccacgaggcggccgatggagtcgaccacgggcattgccacgaggtcgtatttctcgaagtcgattgccacgtcgtcgagcgtggtgtcggtctttacggagacggggtcggtctccatcacgtttttgattttggagacggaggggtgggttatgagctctttgagcgggagtgtgccgcggaggcggtcgtcgttgtcgacgacgtagacgtagtagacctcgtccatgtcctcggcctgcattcgcagctgcttgatgcattcgggcatgctccagttctcgttgaccacgagcatttcggtgcccatgaggccgccggcggtgtcctcgtcgtatttgaggaggtcgatgatgtcgcctgcctgctctacgtcgtcgatgtgggagataacctcgttgcggtcttcttcgtcgagttcctggataaggtctacggcctcgtcggagtcgaggtggcccacgaatttacgggcgatgtcctcgggctccatgtcggagaggagcttgtggcggtcgtcttcgtcgagctccatgagcacgtcggcggccttgtcgcccccgaggagcttgtagaggtattcggcctggtcgaggtcgaggtcgttgtagagctcggcgatgtcggcggggtggagctcgtcgaggagttcgcgcgccttggcatcgtcgtgttcggcgatgattctgcggatgttgtcgagatattcttcgttaaactccttcataatggtaaagctcctttatgggtcgatggctgcggacggcagcatcggtagttgcggattcaaaatgcggatggagagcgacggggggcgttcaggtccgggagttggcttgcgcgagcagtgcggtaagctccacgaactgagctacctcgagctgctcgggcctcatagccaacaggggagactcgggcaactgtgcgcccggggcgagcagcgaccggatggagttacgtatcgtcttccggcgctgtccgaatgtggttttcaccacggtgcggaaaagcgcctcgtcgcatccgaggctgcgggtggaattgcgcaccatgcggattacgcccgacttgactttggggggcggattgaacacatgctcgtcgacggtgaagaggtattccacgtcgtaccacgcctgaagcagcacgctcaggattccgcgggcctttgtgcctgcgggggcggcaagacgttcggccacctcgcgctggagcatcccggagcagcattccaccagctccttccattcgagcacgtggaagaatatctgcgaggagatgttgtaggggtaattgcctatcacgcatattttttccgcgccggggaaaagtgtggagaggtcgaggcgcaggaagtctgcctcgactatgcgcccgcgcaggcgcggctcgttggcatcgagccattccacgctctcggcgtcgagctccacgaccttcacgtcgcgccccttgtcgagcaggaagcgggtgaggacgcccatgccgggccctacctctactacgggaagcgtgggaaaggcatcgacggtgtcggcgatgcgtgcggcgatgccgaggtcggtgagaaagtgctggccgagggcctttttcggacgtacggagtgcatgctgttgcgaagtctttaaactttagcgcaaatttagcaataaatttcgcgaaacaaaataggcagatagcgcggcggccacctcgatgcgtgttaaaatcgacgcatcggggcggccgcggtaaggcgttgtgccgtcggaattatttggcggcggcagccgggataagatatatgcggtagcctgccattgaatggggtgcacccgattcggcacgcggcagcacgtcgatggccgaaacagtctcgtcggctccgaggtcaagcattatgtagtgggggaagggaacgcgtttggccgtctgccaataggtggattcctggaggtcgtagaccttgtcggcagtgcggttggagcctttggtgtcctcgctgtcggcatggacggtggtccatggctcgcgcgagaggcgtttgccgtcggtgccgagggcatagagttcggctatagccacgcggtcggcatctttggcgtcgtgagtcccgagggcttccaccacgaggtatcggccggtggcgggagctgcgagctggagagtctgccagccgttgcctgcggcggctgtgccttcggccacgggtttggctccgtcgagcagccgggcggccagacgctcgttgtcgccggcgccgggggcggtctgttggagcatgtcgagcagcggctctttgtggccggcgacttttacgtcgcgcggaccgaccacgtcgaacaccacaatctcattctcgcccttgcgcagccagcatccgggggcgtagagcgtctgctgcggaccgatttcccagatgcgtcccagcgggtggccgttgacgtaaaccaggcctttgccccaggagctgaaatcgaggaatgtatcgtcggtgcgcttgaggttgaacgtgccgcggtagataccgggaatgcggtggccgtcggcatcggtaaggctgccgacgggagcgaaagtgcgcgaggtgtagaactcaagttcgtcggggagaggatagatctgccagtcgcggaggtcgcaggtgaaggggcggccgtcgtgcatggccgtgaggagcactttggaggttatccccttgtagtccttgatggcgcggccgaaattgatgcggcccatggcttcgacgagaatgtcgagagtgtcgccgctggcggtggcggggaggcgcagctcacgctcgttgacgcggcggtcgagcttgccgatgtagcggccgttgacaaacacctgggcgtagtcgtggccgtcgaagcgcaggatggcgccgtcggggagcgacgggagcggggtgcggtagagcacggagccgaatcccatgtcgaggtcttccatggtgagtacctcctcggagctgacaggctcgggaagattggccatgagcggggccacctcggtgaggctgaactcgggcacggccatcacgggaacctctttgggtgccttcgggagcttgccgggggcgtatttggcgagggtctggcgcagggcgtcgtatttgggagtgtagtggccggcctcgctgatgggggcgtcgtagtcgtagctggtcacgtcgggggcgaatccgggggagtttgctccggcccagtggccccagttggtgcctccgtgggtcatgtagagcgagaaggagatccccttggagagcatttcgtcgatgcctgcgatcatgtcggctgcgggacgcgtctcgtggtttgcgccccacttgtcgaaccatccgctccagaattcagagcacatcaggggtgagtcgggacgcagctccttgagtttggcgaactgctggtcgatgtcggcgccggtgccgaagttcattgtccagataaggtcgtcgaggccgttgagggtgaagttgctcgaccagtcgcactggaacatctgcacgtcggagccgaaattcttgcggagcatgtcgcggatggtagccacgtagggcttgtcctcgccatatgagccgtattcgttctctacctggaccataattatcggtccgccttctggagcggtaaggcccttgagctgttcggcaacctttttctggaagatgtcgacgcgctcaaggaaataggggtcggactcgcgcaggcgaatgtctttctttcggaggagccaccaggggaggccgcccatctcccattcggcgcatacatacgggcccggacgcagaatcacgttcattccgttggcctgacagaggcgcacgaattcggccaggtcgttctggccggtgaagtcgaactcgtcgggacgcggctcgtgggcgttccagaatacgtagagacacaccgtgttcattcccagcgctttggtttgcttgatgcgctggtaccagtaggggcgggggatgcggggataatggagctcggcggctttcaccacgtagggctcgccgttgagaagaaacgcccctttaccggcttcgaaagtaatcggggcagcagccttttcggctttcggtgcggccttggcggccataagccaggcggcggcaccgatggcaacggcggccagcgccgcgcgtagggcggaatgttgcatggtattcaaggcaaaaagtaaggataggttataattgacttatagaataataaggtataggagcggagagaggcagccgtagggctgttggtgcaaatttagcaataaatccgctgaaataaaacagccggcggaatcagggctctcggagcgaagatttttgtggcgagataatggagaaataatagacgtaaattcatgtgaaattactaattttgtggttcaaaacgaataaaccaaaaaaatcagtagatataatgcttactcttcagcagataaaagcggatccggcccgcaccatcgagcgccttgccatcaagggcttcgacgggaaggagccgattgcaaaagtgctgcagctcgacgaacagcgccgcgccctccagcttgaaaacgataatctcgccgccgagctcaaccgcgcggccgcatcgataggcgcccttatgaagcagggcaagcgcgaggaggccgagcaggcaaaggctacggtggcttcgctcaaggagcgccagaagggcgtggcccagcagcttgccgaaacagagatggagcagcacacgcttctgaccaccattcccaaccttccctgcgacatggtgccggcaggcacatcggcagccgacaatgtggtggaaaagaccggtggcccgatgcctgatctgggcgacgacgcgcttccccactgggacctctgcaagaaatacaacctgattgacttcgacctcggtgtgaagattaccggcgccggattccccgtatatataggaaagggagcacgcctgcagcgcgccctaatccagttcttcctcgaccaggccaacgaggccggctatgtggaaatcgagcctccgtatgtggtaaacgaggcttcggcctatggcacgggtcagctccccgacaaggaggggcagatgtaccactgcgaggtcgacaatctctaccttattcccacggctgaagtgcccgtgacgaacatctaccgcgacgtgattctcggcgaggaccagcttccgaagaagaactgcgcctattcggcctgcttccgccgtgaggccggcagctacggcaaggacgttcgcgggctcaaccgcctgcatcagttcgacaaggtggaaatcgtgcgcatcgagaagccggagaattcctatgccgctctcgaagagatgaaggaccacgtgcagggccttctcgagaagctcggcttgccctggcacatactccgcctctgcggcggcgacatgagtttcacgtcggccatcacgttcgacttcgaggtgtggagcggcgcgcagaagcgctggctcgaagtatcgtcggtatcgaatttcgaaacctatcaggccaaccgtctgaagtgccgctaccgcggggccgacaagaagacgcatctctgccatacactcaacggctcggcgctggccctgccgcgcatcgtggccgctcttctcgagaacaaccagactcccgaaggaatcgtggtgcccgaatgcctgcgcaaatacaccggcttcgacatcatcgactgaacttcagtataataataaacactacgggcgatgcattcagcggattgcatcgcccgtagtgttgtttgtcgccctatgggccggttgtttattggcgtacggcggctccctgctcgcggatggcgccggtagcagggtcgagaattatataaatcggagcttttttgtcggtgaacgagttgggtgcgagtccatagaccacgccgaactgtgcgaactgctcggagcgcgagaagtaggtgcggtcgtcgtagcttacggttacgtcggctgtgccgggaatgcagtaggcgaaaccgtttttgggaaattcgaggcggatgcctttttcgttgaggggcatttcgccgcgctgcgtcacggagaggttgaggtatacgggtgcgcccgagaggtccgaggcgctgactatgccgtcgacg

SEQ ID NO: 4464 - DNA, 21225 bp, synthetic construct
  misc_feature 1..21225: note = Synthetic
  source 1..21225: mol_type = other DNA
cctatccgagagccccgacgagtcaaccgacccgccggggctcatcttttttacccatcccgccccaaacgccaatccctccgccccaaccgccaatccccatctttttacccgttcccctccgccaatccccctccaggaccttgatgcccttaaggttcatagggtctttaaggtctttagggcctttaaggtcattaaagtatttaaggtctttaaggcctttaaggtcgttaagggtcttttaaggtccttagggggtgtaggtgaataataaggttgaaatgctgattaactgcgcgatcgtaaaaatgaatcgtctgctggcgtattaaatattgttaaatttttaatataaactattttttggcctcaatttccgcctcatgtagctccatccgggcgatggaatttgcatattccgataaatttcagtaattttgcatcggttatcggaggaggcctttcggcttcctccctttattttggacagtctgatttccagacaatattgtccggctaatttacacgctgtttatgatagacaagaatctcctgcgcgagtcggttgaaaaagctattgagggcaccgacctctttattgtggatatcaccgtaagtccgcagaacaatattgtggttgaacttgactctcccggaagtctcgatatcgacacttgtgcagccgtgacgcgcgcaatcgagaaggacttcgaccgcgacgtggaggactacgatctcgaggtcggttcggcaggactgaccgcccccttcagagtgcgcggccagtatgagaaaaatatcggcaacgaaatcgagattctcacccgcgacggtcgaaaaatcaaggccactcttacggcggtaggcgccgacgacttcactttcgaatatcaggtgaaagtaaaggagccgggagccaagcgccccgtgctcaaaaccgagaccgagaccctcccgtttgccatggccaagcaggtgaagtatcttatctcgttcaagtaatttcccggctcgaccgggcctgacacccagaaattttaaaggaagaagtggccccgccggcctctgattccactgcaattcagaataataaaaaatacagacatataaaaatggctaagaaagaggaaactcccaacatggtcgagcgcttcgccgagttcaaggaactcaagaacatcgacaagaccacgatgatcagcgtgctcgaagaatccttccgcaacgtgctcgccaagatgtttggcaccgacgacaatctcgacgtaatcatgaaccccgacaagggcgacgtccagattttccagaatcttgaagttgtgcccgacggcgaggtagagaaccctaatctccagatttcgctctccgacgcccgtgctgacaacgatccagaggtcgagatcggcgaggagcacaccaaggagattatattcgccgatttcggccgccgcgcaatccttacgctgcgccagactcttcagagcaagattctcgaacttcagaaggaggcgatttacgccaaattcaaggatctcgagggtgagctcgtaaccggtgaagtctatcagacctggagccgcgagaccctcctgctcgacgacgacaagaacgagcttcttctgccgaaaaaccagtcgattcccggcgatttcttccgtaaaggcgaaactatccgcgccgtgatcgccaacgtcgacaatacgaacaacaatccgaaaatcaccgtttcgcgcaccaacgagaatttcctccgccgcctcttcgagctggaggtacctgaaatccacgacgggcttatcaacgtccgcgccgtggcccgcatcccgggcgaacgcgccaaaatcgccgttgagagctacgacgaccgcatcgatcccgtaggagcctgcgtgggcgtcaagggatcgcgcatccacggaatcgtacgcgagctgcgcaacgagaatatcgacgtaatcaactatacggctaacccctcgctcttcatccagcgcgctctgtcgcccgccaaaatctcgtcgatacgcatcgacgaggaggagaagaaggccgaagtgttcctcaagcccgatcaggtttcgctcgccatcggcaagggaggtcttaacatcaagcttgcctcaatgcttacaggctacgtaatcgacgtataccgcgacaccgacgaagtgttcgaggaggatatctacctcgacgaattcaaggatgaaatcgaggaatgggtaatcgaggcactcaaggatatgggttgcgtcacagccaagtccgtgctcaatacgccccgcgaggatctcgtaaacaaggcagacctcgaggaggagaccgtagacaacgtgcttgcaatcctgcgcgccgaattcgaggacgaagaggcaccggctgatgctcccgcagcttctgctgatgctcccgccgacgaagctcccgaggctccggccgacgagacgcccgccaactgattcacgccaaaagtggccgtgagagccacgtcttcccgtgaaactcccgaatcctctccactccacccgcaaaatcactttagaacacaaaaaccactacatggcgagaatcaaaataagtaaagtagcaaaagatctcaacgttgccctgcctaccgttgtagagttcctgcgaggcaaaaacatcgaggtcgacgacaaccccaacgcgcgcatcgaggaagacgtcgttgagcttctggaaagctcgttcaagaacgaccgcgaccagaaaaacaagtcgcagcagctctcgaccgaccgcgcccgcgagcgcgagaaggccaaacccgctcctgcgccgcgcgaggtagaggaggtgcgtcttacctccgaaatcaataagccgaagattcttggcaagatagagcttgatgctcatggcaaccccatccgtaagcaggcgcccgcacctgctcccaagcctgcgccgagcgcagaggtgaagccggaaccgaagccggcagttgcctccacgccccagccggctcctcaggcagcctcaaaagccgctcctgcgccgcagtccaagcctaaggccgttcctgctcaggaaacccctgtggcgaaggctgcaactgcccccgcccccgcatccgctccaaaggagaatgccgcaccggcagctgtccctgctcccgaagcgcctaaagctgcggaagaggaaatcttcaccgtcggcctcccggccaacgggcccaccatcaacgtggtcggcaagattgacctttcggccatcaaccagtccacacgccccaaaaagaaatcgaaggaggagcgtcgcaacgagcgcatagccaaggcaaacggcggcaatggtgccgcttccgaagccggcggcgaccgcaagaagcgccgtcgcatcggcggcaaggagaaaatcgatatcgagaagacctcgggccagcagcccgggcagggcggaggccgcggccgcgacggaaagtcgggcaaaggcggcgaccgcaaccgccgcggtcccggtcataacgacgtcaacgaagaagacgttcagaagcaggtgaaggaggtgctcgcacgcctcaccgccaaggataaaggtcagaaacgtggcgtgaaatggcgtaaggagaagcgcgaggccatagccgagcgcgaacgcgaagccgccgaactcgaagcagcagagagccgtgtgctcaagctcacggagttcgttaccgccaacgacctcgcctcgatgatggacgtgcccatcaacaaagtaatcggcacctgcatgaacatcggagtgatggtttccatcaaccagcgtcttgacgccgaaaccatcaacctcgtggccgaagagttcggcttcaagaccgaattcgtatcggcggaggttgtcgaggcaatctctcaggaagaagatcaggaggaagacctcgtggcccgtccgcccatcgtcaccgtgatgggccatgtggaccacggcaagacatcgcttctcgactacatccgcaaggccaacgtaatcgccggcgaggccggcggcatcacccagcacatcggagcctacaacgtgacgctctccgacggccgccacatcacattcctcgacaccccgggccacgaagccttcaccgccatgcgtgcccgcggcgccaaggtcaccgacctatgtatcatcattgtggcagccgacgacgatgtcatgccccagaccgtcgaggccatcaaccacgcctcggccgccggagtccccatcgtgttcgccatcaataaaatcgacaagccggccgccaaccccgacaaaatcaaggaggaactggccgcaatgaactacctcgtggaggaatggggcggcaaataccagagccaggacatctcggccaaaaaaggtatcggcgtggaggagcttctcgagaaagtgctcctcgaagcggagatgcttgaactcaaggccaatcccaaccgcaacgccaccggttcgatcatcgagtcgagcctcgacaagggccgcggctatgtggccaccgtgctcgtgcagaacggcacgctccgcgtgggcgacgtaattctggcaggcacccactacggcaagatcaaggcgatgttcaacgagcgcaaccagcgcatcaaggaggccggccccgccgagcccacgctgattctcggacttgacggcgctcccaccgccggcgacaccttcaacgtgctcgacaccgagcaggaagcccgcgagattgccaacaagcgccagcagctgcagcgcgaactgggcatgcgcacctccaagcgccttacccttgaggaaatcgcacatcgtcaggccctcggctcgttccacgaactcaacatcatcgtaaagggcgacgtcgacggttccatcgaggccctcagcgactcgctcatcaagctctcgacccccgaggtgcaggtcaacgtgctccacaaggccgtcggcgagatttcggaaagcgacgtcacgcttgctgccgcctccgacgccatcatcatcggcttccaggtgcgcccctcgcaggctgcgcgtcgcgacgcagagcgtgagggcgttgaaattcgcctctattcggtcatctatcaggccatcgaagaggtgaaggacgccatggccggcatgctcgctcccgaggtgaaggaagagattaccgggtcggccgaagtgctcgagacgttcaagatttcgaaggtcggcactattgccggagccattgtgcgcgaaggcaaaatcaaacgttccaacaaagtgcgcctcatccgcgaaggcatcgtacgctacaccggcgagctcggctcgctcaagcgcttcaaggacgacgccaaagaggtcgttgccggtctcgactgcggtctttccatccagggttacaacgacatccaggtcggcgatatcatcgaaggcttcgagcaggtggaagttgcccgcgccctctgatgtagcgctccgcagctctgcatccggccggaattccggcacaccttgcaatacaccccgatatggccacagcgcatatcaacataggatccaacctcggcgacagccgcgcctatctggcgcgtgcggtcgccggggttgccttattgtcggagccctccgggcttcaggtatccgacataatcgaatcggagccgtggggcttcacgtcgtcgcatcgcttccttaacgtgggaatgaacatccataccacgctcagtgtgcccgagcttatggagcggttgcacgctgtggagcggtcgatttccgatgctccccaccgccatgccgacggaagctatgccgaccgcaccgtcgacatcgacctgatttgtctcgacgatactgttgtgcgtcagcccggtatcgaagtgccccatccgcgcatgcatctgcgcgaattcgtgctgagacccatgattcaactgtggccgcagtgggttcatccccagctccggctcactcccgccgaaatgcttgccggactgaaaaaaatgagctaaatttgagtgtcggcccttccttcggcccgacagcggaacaatcccctcttaccaagccccatggagcaactgatgcaatttgtatggcagcaccgcctcggtctccgcggcggtcagaccactgtcgacggccgtcgcgtctgcgtcgtggaccaggggatactcaacgccgatgccgggcccgactttttcaacgctaccgtggaaatcgacgggcagacctgggtgggaaacgtggaaattcatgtgcgcgcctccgactggttccgccatcaccatgatgccgatcccgcctacgattcggtgatactgcatgtagtgcaggtcgacgacgcgcccgtctaccgctccagcggcgagctgattccccagatgataatgcgttgcacccccgagggagcgcgccgctgcaacctgctgatcaaccatgccggggcgtcgctcccatgcagttccaccatcgcctcgctgccccatatctaccataccgactggcttacgtcgctcggtgccgagcgactttacatgaagagcgaacgaatccgcagtctcgtcgacgatagcgccggcaactgggaagctgccgcgttcgtcaccctcgcccgcgccctcggcttcgggctcaacagcgaacccatggaaatactcgcgcggcagctcccgttgaaattcctcaaccgccaccgcgacgagctgacatctgtcgaagccttcatgttcggtcaagccggccttattccgccgcccgacgcaggcgaggacccctacataacgcgtctgcgcgacgattaccgttttttcagctacaaatattccctgcggccgctcgcactcgcgtggaagatggcgcgtacccgtccgcagaactttccccaccgccgcatagctgccctggcacagaaagtccacgaaggcttctatctgatgagcagccttgtggaagccgacaccatcgaccgcatgcgccagctcttcgacataaccctgcgcggcttctgggctacacactatacattcgccccgacgcaggccacatcgccccgggcacttagccgcccttccatcgacacactgataatcaacgccgccgtacctctgcgccacgcctacgccacatatcgcggcgacgacgacacactcacctccgacatcgagctactccaggccatcgaacccgagaacaactccgtcacgcgccttttcgccgacgcaggcatcgaagccgccgacgccttcgatagtcaggccctcatccagctgcgccgagaatactgcgaaaagcgcaaatgcatctactgccgcttcggccaccgcatgctctccgccgaaatctcccgctaacccccattgataaaatgaaaaaaagagaaagggattgctccccttctccggatgttttcacaacggataaaatccttattgtgattcgctatagttagtattgcactacaaatttaaaattaaatttttatatttgcaaaaggtgactctataaaagtctcggatagaattttagccatttaatctgaagaattaacgcatataggccatgaaagtactcggtcttgatctcggggttggctcagtcggatggtgtctgattgaagtcgacggtaaatacaatcccattgaaatactcggtatgggtagccggatattgagtctcacacccgatgaatcctcaaattttgacaggggaaatggcgaatccgtatgcgctcaacgtacgttccgtcgcactgcccgaaaaatgctctgtcgctacaagatgcgtcggtgcctgttgcgttcgcagctggcgtttctgggtatgcttgactcggcagattccttgaacagcctgagtccactggaattgtggaaactgagatccgatgcggccacgtcaggtgtgcggcttacattgccggaaatcggccgtgtacttctgcatcttaatcaaaagcgaggctataaacatgcgaaaactgatgtggctgatgcgaaacagactgaattcgttcagggcgttaaccgtaattatgccgagattcatgctgaagggaaaacttacggtcaacatttctatgaacgacttttagccacagctgctaccaccgacaaaggtgcgaaagtggcaaccttccgcatccgcgagaatgtgtttcctcgtcaggcctacgaggatgaattcgatacaatcatgcgcgttcagcgcaaattttatccggaaatactgaccgacgaagttatcgcaggattgcgtaatgcaattttcttccagcgtccgctcaaatcatgcaagcacctggtgagcgtatgtgaattcgagggaaaaaactatcgtacggcctatttggcggcccgaaggttgctccgcgcacttcgcctctggcgcaggtgtgccgcctatatgaggtaatcaacaatattcgtctggtcaacgtacgcaataaggatgccgcccccatacctgatggtatcgtttcttcggaagcgagaaagagccagtatcagtttgtatttactgcggaggaacgtgaaagaatctatgaattcctcaacacccacgagaagatgaccgtgacagacctccttaaactcatcggtttgaagaggggcgacgggttcagacccgaccagtcgctcgggaaggggattccgggcaacaagacctatactgccctcttcaacgctcttgagggggtggaccgtcgcgatgagttgctaaggttcaatcttagattcatcgattggaatgccgaccccgccacgggcgacatgcgtcgcgttgtatctcccgactttatcaatgaaccgctctacaggctttggcatacggcttattccatcgccgaccgcgatgaactggctgctgcgctcgccaataacttcggaatcacagatccggctgttgtagaccgtatattcgccattgacttcaccggcgcaggtttcagcaaccgttcggcacgcttcatgcgcagaattatcccatatctcaccgaggggatggtctattccgacgcggctgccgcagccggtgtcaaccattcggcgtctgtgacagcagaggaaaatgccgcgcgcgtcctcgtcgaccatctcgatattattaagaaaggcagtctgcggcagccggtcatcgaaaaaattctcaaccagatgattcatgtggtgaatagccttatcgcacaatttggcccgatagatgaggtgcgcgtggagctggcccgctcgctgaaacagagcgctaaggagcgttccgatgcctctaccgccatcaatgcccgcgagaaagaaaacaaagccctcggcgagaagattgctgaatacgggctgacgccttcgcgaagaaccatccagaaactgcgtttgtgggaggagacggagcatgtgtgcatgtactgcgggcagcccgtatcggctacggaattccttacgggggatgccgaggtcgaacatatcattccgcgttcgatattcttcgacgacagtctctcgaacaagacatgcgcctgccgtcggtgcaacaaggccaagaacaatcgtaccgcctacgattttatgaaggaggatcataccgatgaggaattccgcgcctatatagcccgcgtggaggctatggcggaagcaaagaagatttcacggacgaagcgcgaccgtctgctctgcccgaaagaggaaattccttcagacttccttgaacgcgacctgcgccagtcgcagtatatcgcccgcaaagccatggagatacttcatacggttgtacgaaacgtttgggcgacatccggttcagtgacggacttcttccgtcatcagtggggatacgatcgcattctccatgaccttagcctggataaatatgcgttggccggtcttgtagaggaagttgaatacgagcataaggggcagacccaccgccgccagcagataaagaactggagtaaacgatttgaccaccgccatcatgctgtcgatgctcttgtaattgctctaacgcgtcagggctacgtgcagcgactcaacaacctcaatgccgagcatggaaacatccatgccgagcttgtgaaggaaaatgcagatttcacacgcaacaaatcgcagcttgaactctgggcttcgacgcggccacgtttcgatattgaaacggtgcgtaaggccgtggaggggattgcagtttcgttcaagtcgggtaagaaactcactacgccaggcaagagggctataatgcgtggtggaaaaaagactgtggttcaggataaactggtcataccgcgtggggccctccatcaggagacggtatatgggcttatccgacttcccgacgggcgaaaaaccttgaaatatgcttttgatacgccgacccttgtaagcgatccggctgcccgcaaagcaatccaggccatcttggagcattttggcggcaatgtaaaaaaagctctcaagagtcttcccggagaaggtcttgaggtgatgagaaaggggaagagagaaaatgtcactgaggtgtcttgccatcgcttcgaatatgtggtgcgtaaaaatgtcgctgcgctaaaatacaaggatatactgaaaattgtcgatggagcagtaaggcggagcgtcgaaggccgcttcgccgaatgtggcaataaggatagcgaatatcagaagagtttggcggagcggcccctcatacttccgggcgcgtttactcctatacgtactgtgcggattgccacaggcttaaagccgaaatccatggctgcagtgtgccgcgattcttcgggcaatcccataggttacgctaagaccgccagtaaccatcatatagccatctatgaggatagcgtaggcaggaaactctgctctgtgacctcgatgtgggatggtgtgttgcgacgtctcaatggcattcctgtgatagtgaagcatccggacgatgcatggaacttactgatggatattgccgacgaggatgtgcgcgagcggcttgccgcatctctgccacgcccggactggaagttccttatgagtctgcagatgaatcagatgtttgtgctcggcctttcggaggatgaattcaacgatgccgtcagaaacaacgaccgagcgactcttgcctcccatctctatagagtacagaaactcgctgacaatgatttctccctgcgaagacatactaacaccactgccgatgatacgacggagtttaggaagatgttagatgtctatcgcttgtcgacgcaagcctttttaaacctcaagccacacaaggtgaaaattaccccgaccggcgattttgcttatgattaaacagactcttctcttctccaaccgtgcctttctctcgctgaaactcaatcaactggtaatcgatacgaaatccgaaaggggaattttgacacgtccgctcgaggatatcggactgatagtgatagaaacgccgtgtgtaacgctgacatcggccctcatggctgagctgtcggcaagaaatattgccgtggtaatttgcgattcccgacatatgccttcaggaatgcttcagcctctcgaaggcaatacgctcctgtcgcagaagtcgcgtgcccagcttgccgcatcacttcccttgaaaaagcaactgtggcagcagacagtcatggctaaaattcggaatcaggcgtgtgtactgcgtatgcgccgacaatgtgagaccggatgcatggagcagtggtctaaaaccgtaaggagtggcgaccccgataattttgaggcccgtgctgccgtgtattattggaaaaatttgtttgccgatagtggattctttcgtggggatgacgataatccggtaaattcactactcgattatgggtatgctattctcagggctgtgatagctcgggctattgtcggtgccgggctgattccgcagtgcggtctgtttcatagaaacaaattcaacgcattctgtctggcagacgatgttatggagccctataggccctacgtagatatgcttgtatgcgagattctttccagccatgcctgtagcgtggggttgactccagagattaaacgtgagcttctgggaatcccggtcctcgatgtaatgattggtggacttagacgacctcttatggtagctacgtccactacagtggcctcattggtaaagtgctatgaaggctcagcccgtaaaattttatatcccgaaatataactcccgaaatataacgttgttatgtcgaccgaacgcttcagttcctatcgcattatgtgggttttcatatttttcgacctcccgaccgagaccaaaaagcagcgcaaggctgcagccgacttccggaagtacctgcttctcgacggattcaccatgtttcagtattcaatctacgtgcgtcattgtgcgtcgcgcgagaacatgcaggtgcacattgaccgtgtcatccctcaaatacccgatattggcaaagtatgcattatccaacttactgaccgccagttttctgacattcgtatattcgagggcaccgaagcagctattccgcataatacttcctttcagttggaacttttctgaaaatcattgtggaaaatacgctcaccagaaagtcttaggacagcaaaaacaaggttcaaactaaaaaaccgcatctatttgatgcggttttttagttgtctaatttcgtttgtatcccgctgtattgcagcggcttgtatagagtctgttggactctatattgcaaatgtactaactttcaagcgaatcacaactctccctcttgaacagcgccgtggcattgagttggactctatattgcaaatgtactaactttcaagcgaatcacaacttatccccctattactcattttgagtattagttggactctatattgcaaatgtactaactttcaagcgaatcacaactgggtacataatggcaattatttctattgtgttggactctatattgcaaatgtactaactttcaagcgaatcacaactgatggtcatgacactactgattaccacctgttggactctatattgcaaatgtactaactttcaagcgaatcacaacaatagcaacaagttccttgtacggaaccgggttggactctatattgcaaatgtactaactttcaagcgaatcacaaccttattcccctattgctcattttgagtattgttggactctatattgcaaatgtactaactttcaagcgaatcacaacatcgaggggagttttactgctcccctcttagttggactctatattgcaaatgtactaactttcaagcgaatcacaacaacatgtcaacatttctcgaaatcacatctgttggactctatattgcaaatgtactaactttcaagcgaatcacaaccggcaagcttcaaactatttttattccaagttggactctatattgcaaatgtactaactttcaagcgaatcacaaccgaggaaagctttgaataaccggaataagagttggactctatattgcaaatgtactaactttcaagcgaatcacaacgaactggcgctgcatgagtccggcgggcgagttggactctatattgcaaatatactaactttcaagcgaatcacaacagcatctcggtgtagccgaccttttggcacgttggactctatattgcaaatatactaactttcaagcgaatcacaacgcgcatcggtcagtctctcaataatcgcttgttggactctatattgcaaatgtactaactttcaagcgaatcacaattgtaggacggttctgtttcatttcatgctattcagctctatgttgtggaaataaatggcttttaatgaactacgatggcattcgtctcatgttttttcgaaaaacaacaacattcccaccacgcttgtaagctgcaatgcggtccatgaagtcaaattggcgaatcttcgagtagatggcgtaggaaggtacgggtactacagtttgcgactggggccaactccctaacggaatggcctctccgtgcccgtttggaccaaacaccagcgcccctgccgcaatcatatatggatcgaatgtgattgcggcaggggcgctgtgttattatcgtttagctgttgtatagtggtatcaggtggggaaggggcgggtgaaggagatgccggggcggagggggagggtggtggcgaggaaggtggagtaggccggggagttgtatttgatgtggtagcgctcgggggcgaggccggggatgcggaatatggcgcggcctacggcgtcggcgtcggtgaggccgtagggtgaaggggtggagaaggcgccgcggaatggggcggggaggtcggcggcagggtcgcggcgcacgcgggcgtggtcgttgcgcacgatgcgttcctggatgtcgatgtcgaagcctatgcgggttatggcgagggatacggagtcggcggaggtcaggtcggtgaggccgcagcgcgagatttcgagggtgccgtcgggggcgacgcggaattcgacgcgcggggtggtgtcggcgtcggggtagagctctccgcgggcaaaagatgtttcggcctgaccgcgtcgggatggcttcacgatgaggcctaccagcagggcggccactacgaagaggcttacaagaaattcggtggagtgcaggaatccgtacatataggggtgcggagcgggtagggatggaatcaggcgaagaggctcatgagccaggaggagatgagcatgtagatgagcatgccgatgatgtcgttggtgatggagatgaaggggccggtggcgagggcggggtcgattttgaagcgttcgagggtgaggggtacgaaggtgccgaatattgatgcaaagagcaccacacccatcagcgagagcgatacggccagggtggtgggattccagggggagagctggaagcagttgtagatgaatacgagaagggagattatcaggccgttgacgaagcctacgcctacttccttgagtatctgtctgccggactccttgaggtcgagcgagccattggcgaggccctggaccacgatggcgctcgactgtatgccgacgtttccgccagtgccgccgatcatggggatgaacagagccatggcggggttggtgacgaatccctgctcgaagtttccgagaatcagggagttgccgatgccgcccacgatgcccatgaggagccaggggaggcgggccttggtctgggtccagagggtgtcgtcggattccacgtcctgcgacagaccgctggccagctgatagtcgcgttcggaggattcgcgcacgcggtccatcacgtcgtcgacagtgatgtggcccacgaggcggccgatagagtcgactacgggcattgccacgaggtcgtatttctcgaagtcgattgccacgtcgtcgagcgtggtgtcggtctttacggagacggggtcggtctccatcacgtttttgattttggagacggaggggtgggttatgagctctttgagcgggagggtgccgcggaggcggtcgtcgttgtcgacgacgtagacgtagtagacctcgtccatgtcctcggcctgcattcgcagctgcttgatgcattcgggcatgctccagttctcgttgaccacgagcatttcggtgcccatgaggccgccggcggtgtcctcgtcgtatttgaggaggtcgatgatgtcgccggcttgctctacgtcgtcgatgtgggagataacctcgttgcggtcttcctcgtcgagctcctggataaggtctacggcctcgtcggagtcgaggtggcccacgaatttacgggcgatgtcctcgggctccatgtcggagaggagcttgtggcggtcgtcttcgtcgagctccatgagcacgtcggcggccttgtcgcccccgaggagcttgtagaggtattcggcctggtcgaggtcgaggtcgttgtagagctcggcgatgtcggcggggtggagctcgtcgaggagttcgcgcgccttggcatcgtcgtgttcggcgatgattctgcggatgttgtcgagatattcttcgttaaactccttcataatcgtaaagctcctttatgggtcgatggctgcggacggcggcatcggtggttgcggattcaaaatgcggatggagagcgacggggggcgttcaggtccgggagttggcttgcgcgagcagtgcggtaagctccacgaactgagctacctcaagttgctccggcctcatagccagcaggggagactcgggcaactgtgcgcccggggcgagcagcgaccggatggagttgcgtatcgtcttccggcgctgtccgaatgtggttttcaccacggtgcggaaaagcgcctcgtcgcatccgaggctgcgggtggaattgcgcaccatgcggattacgcccgacttgactttggggggcggattgaacacatgctcgtcgacggtgaagaggtattccacgtcgtaccacgcctgaagcagcacgctcaggattccgcgggccttggtgcctgcgggggcggcaaggcgttcggccacctcgcgctggagcatcccggagcagcattccaccagctccttccattcgagcacgtggaagaatatctgcgaggaaatgttgtaggggtaattgcctatcacgcataatttttccgcgccggggaaaagcgtggagaggtcgaggcgcaggaagtcggcctcgactatgcgcccgcgcaggcgcggctcgttggcatcgagccattccacgctctcggcgtcgagctccacgaccttcacgtcgcgccccttgtcgagcaggaagcgggtgaggacgcccatgccgggccctacctccactacgggaagcgtgggaaaggcatcgacggtgtcggcgatgcgtgcggcgatgccgaggtcggtgagaaagtgctggccgagggcctttttcggacgtacggagtgcatgctgttgcgaagttttgaaactttagcgcaaatttagcaataaatttcgcgaaacaaaataggcagatagcgcggcggccacctcgatgcgtgttaaaatcgacgcatcggggcggccgcggtaaggcgttgtgccgtcggaattattttgcggcggcagccgggataagatatatgcggtagcctgccattgaatggggtgcgcccgattcggcacgcggtagcacgtcgatggccgaaaccgtctcgtcggctccgaggtcaagcattatgtagtgggggaagggaacgcgtttggccgtctgccaataggtggattcctggaggtcgtagaccttgtcggcagtgcggttggagcctttggtgtcctcgctgtcggcatggacggtggtccatggttcgcgcgagaggcgtttgccgtcggtgccgagagcatagagttcggctatagccacgcggtcggcatctttggcgtcgtgggtcccgagggcttccaccacgaggtatcggccggtggcgggagctgcgagcgggagagtctgccagccgttgcctgcggcggctgtgccttcggccacgggtttggctccgtcgagcagccgggcggccagacgctcgttgtcgccggcgccgggggcggtctgctggagcatgtcgagcagcggctctttgtggccggcgacttttacgtcgcgcggaccgaccacgtcgaacaccacaatttcattctcgcccttgcgcagccagcatccgggggcgtagagcgtctgctgcggaccgatttcccagatgcgtcccagcgggtggccgttgacgtaaacaaggccttttccccaggcgctgaaatcgaggaatgtatcgtcggtgcgcttgaggttgaaggtgccgcggtagatgccgggaatgcggtggccgtcggcatcggtaagactgttgacgggggcaaacgtgcgcgaggtgtagaactcaagttcgtcggggagaggataaatctgccagtcgcggaggtcgcaggtgaaggggcggccgtcgtgcatggccgtgaggagcactttggaggttatacccttgtagtccttgatggcgcggccgaaattgatgcggcccatggcttcgacgagaatgtcgagagtgtcgccgctggcggtggcggggaggcgcagctcacgctcgttgacgcggcggtcgagcttgccgatgtagcggccgttgacaaacacctgggcgtagtcgtggccgtcgaagcgcaggatggcgccgtcggggagcgacgggagcggggtgcggtagagcacggagccgaatcccatgtcgaggtcttccatggtgagtacctcctcggagctgacaggctcgggaagattggccatgagcggggccacctcggtgaggctgaactcgggcacggccatcacgggaatctctttgggtgccttcgggagcttgccgggggcgtatttggcgagggtctggcgcagggcgtcgtatttgggagtgtagtggccggcctcgctgatgggggcgtcgtagtcgtagctggtcacgtcgggggcgaatccgggggagttcgctccggcccagtggccccagttggtgcctccgtgggtcatgtagagcgagaaggaaatccccttggagagcatttcgtcgatgcctgcgatcatgtcggctgcgggacgcgtctcgtggtttgcgccccacttgtcgaaccatccgctccagaattcggagcacatcaggggagagtctggacgcagctccttgagtttggcgaactgctggtcgatgtcggcgccggtgccgaagttcattgtccagataaggtcgtcgaggccgttgagggtgaagttgctcgaccagtcgcactggaacatctgcacgtcggagccgaaattcttgcggagcatgtcgcggatggtagccacgtagggcttgtcctcgccataggagccgtattcgttctctacctggaccataattatcggtccgccttctggagcggtaaggcccttgagctgttcggcaacctttttctggaagatgtcgacgcgctcaaggaaataggggtcggactcgcgcaggcgaatgtctttctttcggaggagccaccaggggaggccgcccatctcccattcggcgcatacatacgggccgggacgcaggatcacgttcattccgttggcctgacagagacgcacgaattcggcaaggtcgttctggccggtgaagtcgaactcgtcgggacgcggctcgtgggcgttccagaatacgtatagacacaccgtgttcattcccagcgctttggtttgcttgatgcgctgctcccagtaggggcgggggatgcggggataatggagctcggcggctttcaccacgtagggctcgccgttgagaagaaacgcgcctttaccggcttcgaaagtaatcggggcaggagccttttcggctttcggtgcggccttggcgggcatgagccaggcggcggcaccgatggcaacggcggccagcgccgcgcgtagggcggaatgttgcatggtattcaaggcaaaaagtaaggataggttataattgacttatagaataataaggtataggagcggagagaggcagccgtagggccgttggtgcaaatttagcaataaatccgctgaaataaaacagccggcggaatcagggcgctcggagcgaagatttttgtggcgagataatggagaaataatagacgtaaattcatgtgaaattactaattttgtggttcaaaacgaataaaccaaaaaatcagtatatataatgcttactcttcagcagataaaagcggatccggcccgcaccatcgagcgccttgccatcaagggcttcgacgggaaggcgccgattgcaaaagtgctgcagctcgacgaacagcgccgcgccctccagcttgaaaacgataatctcgccgccgagctcaaccgcgcggccgcatcgataggcgcccttatgaagcagggcaagcgcgaggaggctgagcaggcaaaggctacggtggcttcgctcaaggagcgccagaagggcgtggcccagcagcttgccgaaacagagatggagcagcacacgcttctgaccaccattcccaaccttccctgcgacatggtgccggcaggcacatcggcagccgacaatgtggtggaaaagaccggtggcccgatgcctgatctgggcgacgacgcgcttccccactgggacctctgcaagaaatacaacctgattgacttcgacctcggtgtgaagattaccggcgccggattccccgtatatataggaaagggtgcacgcctgcagcgcgccctaatccaattcttcctcgaccaggccaacgaggcaggctatgtggaaatcgagcccccgtatgtggtaaacgaggcttcggcctatggcacgggtcagctccccgacaaggaggggcagatgtaccactgcgaggtcgacaatctctaccttattcccacggctgaagtgcccgtgacgaacatctaccgcgacgtgattctcggcgaggaccagcttccgaagaagaactgcgcctattcggcctgcttccgccgtgaggccggcagctacggcaaggacgttcgcgggctcaaccgcctgcatcagttcgacaaggtggaaatcgtgcgcatcgagaagccggagaattcctatgccgctctcgaagagatgaaggaccacgtgcagggccttctcgaaaagctcggcttgccctggcacatactccgcctctgcggcggcgacatgagtttcacgtcggccatcacgttcgacttcgaggtgtggagtggcgcgcagaagcgctggctcgaagtatcgtcggtatcgaatttcgaaacctatcaggccaaccgtctgaagtgccgctaccgcggggccgacaagaagacgcatctctgccatacgctcaacggctcggcgctggccctgccgcgcattgtggccgctctgctcgagaacaaccagactcccgaaggaatcgtggtgcccgaatgcctgcgcaaatacaccggcttcgacatcatcgactgaacttcagtataataataaacactacgggcgatgcattcagcggattgcatcgcccgtagtgttgtttgtcgcccgatgggtggtttgtttattggcgtacggcggctccatgctcgcggatggcgccggtagcagggtcgagaattatataaatcggggcttttttgtcggtgaacgagttgggggcgagcccatagaccacgccgaactgtgcgaactgctcggagcgggagaagtaggtgcggtcgtcgtagcttacggttacgtcggctgtgccgggaatgcagtaggcgaaaccgtttttgggaaattcgaggcggatgccttttt
